United States Patent Application Publication US 2011/0191912 A1 - sequence listing, part 5

SEQ ID NO: 4824 - DNA, 3000 bp, Unknown; identical to SEQ ID NO: 4815
  misc_feature (1)..( 3000): cDNA_ID_3442322_gDNA_ID_1620734_Annot_ID_166199 3000 nt of promoter + ATG

SEQ ID NO: 4825 - DNA, 3000 bp, Unknown
  misc_feature (1)..( 3000): cDNA_ID_3074293_gDNA_ID_1620734_Annot_ID_166198 3000 nt of promoter + ATG
aaatataagccgacaagtagtgtgactgactatattttttccataaaaacatttaagtttctcttctaaccataatgtgatccgcttcaattttgggttggtggagccgtatacacgcactgattaattcagtttcttttttcaaccatagcgtgtgtgtgaaacaaaaaaaaagtatatgcatgctcatcctgcaatctctataacaataaaattaaccatatttgcggatcaaaagtttcgtgtgtcaaaagttgtacgcatatgtctcgtgcaataacgttgatgagggaaacaaaaaataaaatttgaatgccgttgtcgtattaaggaaaaaaaagtcaatgtgtttcaaccaccctgcatgaaaaatatcataaagtgccgcatagacgaaagtaacaacgagaagatggaccatgacgacattaaataaatgatacacaatacaaaataataggaaccgccgaatccaattattgttggtaaaaaaaaaaaaaactaaacgttaattaattcggaagtaattattacgatcaatcttcagaaaaatctttgataagaccattatataaacgagaagaagtctcactataatcatatcatcaccttccccactaatactctatagtttgtttttgttcttcttataatctttatattttcagcaaacgaaagggaagtgtgtcagaaatctcagagggtgagaatcccaatgaggatcttacccgaacctcgaggttcggttccgtgtcttctccttcttgtgtcggttctcttatcagcgactctctcactcgctcgtgtcgtcgaagttgtcggttacgccgagagcaagatcaaaaccccccatgcattttcaggtatctcataacttacattaatatcttatgtactatatagtttatttttttgtgaatatatatttgatcaatgtgtgatattatttgttataggacttcgagtgacgatcgactgtaaggtgaataaaggccattttgttacaaaaggttcgggaaacattgacgacaaaggaaagtttggtcttaatattcctcatgacattgtctccgacaacggagcgttaaaggaggagtgttacgctcagcttcacagcgcggcgggaacaccttgtccggctcacgacggccttgagtccaccaagatcgtgtttttatccaaatccggggataaacacattttgggtctcaaacaaaatctgaaattttcaccggagatttgcgtttccaaattcttctggcctatgcctaagttgcctccttttaagggctttgatcatcctttccctttacctccacctttggaacttccaccgtttctcaagaagccatgtccacctaaatacagtcctcctgtggaggttccacccccggtaccagtttacgagccgccgccaaagaaagagattcccccgccggttccggtttacgatccaccgcctaagaaagaggttccaccacctgtcccagtttacaagccaccaccaaaggtggagcttccaccgcctattcctaagaagccttgtccacctaaaccgccgaagatagagcacccacctccggttccggtttacaagccaccgccaaagatagagaagccacctccggttccggtttacaagcccccgccaaagatagagcacccacctcccgttccggtacacaagctaccgaagaagccatgtccgcctaagaaagttgatccaccgccggtgccagtccacaaaccaccaacgaagaagccttgtccgcctaagaaagttgatccaccgccggttccagtccacaagccgccgccaaagatagtcattccaccgccgaagatagagcacccacctccagttccggtttacaagccgccgccgaagatagagcatccaccaatctacataccaccaattgtgaagaagccgtgtcctccgccggtaccaatatacaaaccaccggttgtgatccccaagaagccatgccctccgccggtaccagtatacaaaccaccggtagtggtgattccaaagaagccatgtccgccacttccacagctcccaccacttccaaagtttccacctcttcctcctaaatacattcaccaccccaagttcgggaaatggcctccgttgcctccacacccttgagaaacattaaatacgtatatatagatatacgtatactcatgtataatcaacgtgtttgcctttttttaatattttatctttgcatatgttttatatcttgtttcttttgttggctttgagttctctttgtgtagactggttgtttatattcccgcaatcttccaacaataatatggtaatgatacgtttctcttttatcatgagatgatcaacaagaattttgcgttaaagagtcctcgggagaaaaaacttgcttgcgttttcgcgcgcataaacgtttttgaccatatttttgtcactaagcgacaacatatgggagattaatatatacgtacattttttgtaaaaaaggtgaaaaaatgggagatggtaaaagaaaggcagatctttcataagatattcgcataagcctagttttatttgctccctactggtgaatcaatcacctatccatacgttgtcgacagtccactgagactaataatatatctgacgaataaattcaatcttctaaacaatatgaaaaatacatacagaaaaatattttacatgtcggctacaatagtgggaaaacgtagatgggtttttaggccctttagtgataaactgataggataaaattcagggcccattaaacccaaaaagagagaagaattcagggcccaatatgaattactaattggtattttattttcctgaagaaataatttactcaaaagcgcgaaaaaacaaaaaaatccaaaaagctccaatttcatctctctctctctctctctctctctctctctctctctctctctctctctctctctcactggtgtctgtctcactaacttctttcaatg

SEQ ID NO: 4826 - DNA, 3000 bp, Unknown
  misc_feature (1)..( 3000): cDNA_ID_2156991_gDNA_ID_1620734_Annot_ID_166196 3000 nt of promoter + ATG
ttgggcgtgtggataacttctccaaagacttgaaaaaactagtgaaaggtaacaagtgtttcttccatagtaatattgacaagactattttgggatttggtgccttttttaaaatacgatttagttgcaaggaaaaagtgaaaacggtttcgtaacattgctgcttcttttgttttgtctcgatcagctgctgaggtgcatacctacttagaaccgtccatagattcactgaagaaaatagctgcgtttctgtatcctggatcactttagaaacaaaacaaacatgaggaccatgcttgaatgtggtacgtatgtattagattccttccttgatgagtgattaaaccggctattgtaccattggtatatgttagtcatataatagtattattctctttatttcatatcatagctttaaaaaaatgttcggctcatgctgtccactccttttgggccgctcgttgctttcatttttttaaattgcttacctctcaacaaattcttttgattggttctctctctgactctaggccgcagaaagtgcagttccgaataattctcactcaactaacttttgataatcacttattctagattattctgatttttgaattccctctactcttgaacacgtttacttactatgaggaaaaatttaaccctaaaaagaaaaccactcattacagctaacatttatgaggggtggactattgcgcaaagcattgatagtgttaattgaaagtcatgcatatagtatgcgttactactaaagtttaacggttcaatttttttgaatttgaactgacagtaaataaaattaatttttaagattaaaagacgttgtttttagcaagttgtttagaaattgtgggacacgtgtggcacgttgctccaggaggggcatatgccaagtctgagatactccaacgcactgactgactgacccctacttaaccggtggtcaaactcttaacctaaccacggttaagatcttaaagccgttgagattttcccacatgtaataatcttgtttatctgtgagatattcgccgcttccccttggccggctataaatcgataacctcaccgataaatcctctattcatcatccacaacaaacctcttcttcagtctgatagagatctcacgtttcaaacaacaagaatggcgttccctaaggtatacttcgacatgaccatcgacggccagcccgcgggaaggatcgtgatggagctgtacaccgataagactcccaggactgccgagaatttcagagctctctgcaccggagagaaaggtgttggcggtaccggaaaaccccttcacttcaagggatctaagtttcaccgtgtgatccctaacttcatgtgccagggaggagatttcaccgccgggaacggaacaggcggtgagtcgatctacgggagcaagttcgaggacgagaatttcgagaggaagcacaccggaccggggatcctgtcgatggcgaacgccggtgcaaacacgaacggatctcagttcttcatctgcaccgtgaagaccgattggcttgatgggaagcacgtggtgtttgggcaggtcgtggaaggcttagacgtggtaaaggccatcgagaaggttggatcatcatctggaaagccgacgaagcctgtggttgttgccgattgtggtcagctctcttaggatcttcctatcatcatccttaatttagcatcatcgtcgtcattgtggtgtctctttatgcttttgcttttgttatggagtctttttaaaatttgtagtcataagtttggtgtgtgttctcatgggaacatatataaacttgcccctttaatattaactaccagaaataaggaatgagcactcttttatcatatctaatttacgttaccaaatttcatctttgttatctgcatttccgttggaacagataaaaatacttggtcgagtttttgttcacctatctaattaatggtggacgacgttatgatccacgttgacgcagaggggctacaccaccacaaggtcttggtctaaaaaagtaacacacgtgattctgcagagaagcaaattagaaaacccaattaatggcaataataataaacaataccagtgggcctatttttttgtttaaatcacgggtttgtcgataagatcaactttagtgggccttcaaatataattgccttcgtactcactattatatgaaaacgaaaattttccacctgaaggccggcccatcaaatcaggccccaaaccagttttaaaatccacacgatttttctggagactgtgatgaatgattgatgacataccaattaccaaatcaaataaatgtttcagagaagactgaatctcatatttatatgcagccagcagggacgcatatgcctttaattacgatttcagaataaaataattgtgagggaagccaatacgtgtgaaagccaaaaatgaaaatagtatagctgctgtgatttatttgcttgctaacacaaatttcattttttggaagatttcacgtttgtgtactcagttttcgtagaatataaaaaactcatcttacaactataaataaacaaggattaaagatttgattaacaacagaaatgaagaagcggacggatggctactggctaatataagaaggtggtccgcgaagcagcagatttatattatattttaatagtttccgacaaaagacgacgaaatctctcatgagctgtcgtctctggagaggaggaatgggggctttctctttctctctctctctctccccccatttgaattatttcaccacgactccaaaaatcctgcgattctcattccttcttcctgtttccgtagcggggattttgtgatcatcaatatcaaaaacaatcagatttcttctaccaaacgattaattgccttttgggatacgattcagggcttcttttggggcctctgtttgatttaacaccttgtttgctgcaaaccaagatagcaaaggaaacgatg

SEQ ID NO: 4827 - DNA, 3000 bp, Unknown
  misc_feature (1)..( 3000): cDNA_ID_1820987_gDNA_ID_1620734_Annot_ID_166195 3000 nt of promoter + ATG
ttgatgacataccaattaccaaatcaaataaatgtttcagagaagactgaatctcatatttatatgcagccagcagggacgcatatgcctttaattacgatttcagaataaaataattgtgagggaagccaatacgtgtgaaagccaaaaatgaaaatagtatagctgctgtgatttatttgcttgctaacacaaatttcattttttggaagatttcacgtttgtgtactcagttttcgtagaatataaaaaactcatcttacaactataaataaacaaggattaaagatttgattaacaacagaaatgaagaagcggacggatggctactggctaatataagaaggtggtccgcgaagcagcagatttatattatattttaatagtttccgacaaaagacgacgaaatctctcatgagctgtcgtctctggagaggaggaatgggggctttctctttctctctctctctctccccccatttgaattatttcaccacgactccaaaaatcctgcgattctcattccttcttcctgtttccgtagcggggattttgtgatcatcaatatcaaaaacaatcagatttcttctaccaaacgattaattgccttttgggatacgattcagggcttcttttggggcctctgtttgatttaacaccttgtttgctgcaaaccaagatagcaaaggaaacgatggtgtcggacaatgagatgggtctggtattagctgtgtcgtcgagcgtcttcataggttccagcttcattttgaagaagaaaggtctcaagcgcgctgctgctaatggcacccgcgctggttcgtttccccgcttgctttttttttagaatccaattccatgctcctaaatttactttctgctttaattattagatagatattgaacaacccatctgctcgatcagggtttagctgtctgaattggaagaattcattttctatagacattgaaatgaatccatgttgacacattttcttaatagcagatgatccatcagcaatagatttcttatccactatgttttgtttcaccttttggttctgtgcctttctgctatcatttgtttgagaatatttgcatgtcaagaaatgggagtatgacttgcttgatgaatggtgcaggtttcggaggttatacatatttgttagagccactttggtgggtaggcttggtaacaagtgagttcaaaaaaaccatcttttattttccatatgactcttcccatcttaaaaaccatcgttctaaatgtgagattttgtaactcagtgacttttggagaaattgctaactttgtggcttacgtttatgcacctgctgtactagtcactcctcttggcgcattaagtataatcatcaggtttgtactgtattggcatctttttgagtggtatttcaccttttctctgactaaccttttcatcttttgccctgattgctccctcctagtgctgttttggcacatttcttgttagacgaaaaacttaggaaaatgggagtttggggatgtgtttgttgcattgtgggctcagttatgatcgtcatacacgcacctcaggagcagactcccaattctgtagaagaaatctggaaactagcaatgcaaccaggttttgctttttctacctctctctctctctgtgtttatgttactgatatagacaataacgtatatcccttctcttttttgtgtgagacagcttttctaatttacgtagccatatcaatgtcgatagtccttgctttgattctctactgtgaacctctctgcggccaaaccaacattcttgtgtatatcggaatttgttcattgatgggttctctcacagtaagcatctcggaatttagtgctgagctctatatcttttcccattttttgttctctaaaggttttaatttcaaataggttatgagcatcaaggctgtagggattgccataaagttaacatttgaagggataaaccagatctggtatccagagacttggttttttgccatggttgcagcaatctgtgttgttatgcaaatgatttacctcaacaaggtaagaagaacctgtgcatgtgtctgtgtgatgtagtgttgagcacactttggccaatggttaatagtagtcatatgttttgttttgtcaggcgctggacacattcaacgcagcaattgtttctccaatctattatgtgatgttcacaacactcacaattgtcgctagtgcaatcatgttcaaggtagagagatttcaacaaacattaaagagtaatgatcctcgtgtttcaagattgtcaaatgaatcacctttttcttaacaggactggaatgggcaaaacacagacagcatagcctctgagatttgtggattcatcacagtgcttacaggaacggttatactccattccacgagagaagaggaacaagcttcgccacgacgaatgagatggcaggattcagggaagagctttgacgaagaacatttgacaagtttgtacagtcctgaatattaggaaggtaacaaagatttaaaccttgtgctgaacggaaggatgttgggatccgaatcagaagatcatctaattaatctcttagtggggaaaagaatgtaaactagctttctgtatatacttgatagttttgtaacagtcttttgtatacaaatttgtccactgtttgttcatattcatttctttttgagctcttaggacagatttgttaccatatatagatcatataacattgactattattattttgatccaacaacactgtttccttctccttgtaggtgaaggaatggaaaatatactaaataataaaaccctattgatatgatgaattcataaccgtccgatcaaaacccaaaaagatctaactataaaaaggaaatcgagattcggtgagccattcattgtttttgattcacacgaagagaagagaagaagaagaagaagaagcagaagaagagaagaagagaagaagaatccaatcatg

SEQ ID NO: 4828 - DNA, 3000 bp, Unknown
  misc_feature (1)..( 3000): cDNA_ID_3074301_gDNA_ID_1620734_Annot_ID_166186 3000 nt of promoter + ATG
atgcacatgaagataataatactcctttggacggtataatacctgtatacgtgactaatcaacgaattaaatttgagcattgtggtggcgagatcttggatcatcttcgcttggccgcttgggcggtggtcgtcggcatcgtcactaattaattattgtgattaagaaaaaatgctaaattgagtttcgtcgtcttctgcttctgcttaagcttcttcatcatttagctccagaggcggagctttcttctctctctgtggacgaccatggcggcggacgacggcgaccccactaaattcgctgcaatctacgactcatcctctccgtcacaccctcttctctctaaaccctccacgtccgctctcgattctccgcgtcgaagtgatcccgaatccgacccaactcagtttcttcagatctcctacaattttggcccaagaactttcaaggacatccctttcctacttctcttcgatcttctcgtactctccacctttggttttggaatcttctccatttttcatagaaataacgattacgggaactcctcttccttcacctacgatttcacctctagctcctgcgtcaaaaattctacctttacgaaaatttcggatgggtactactgggcttcttcgagtgtcatgtacggcatggtttcttcgtctgatccagtctttgagaaggatttgatctggacacttgttgtaacgcttattttaagcgtgcccttctgttttagcgtcctgcttttgctcaaacactacactaagcagattgtttatgcttgtttacctctctttgtcctttttcccatctttttcaatgtctattggtttgtcgcctgtactcttagctcttcttgtagcgatgccctccctctagcttacagaatacttgtcctagtctttgttttcttgatcatcgggatcattgtctggatcatagtagctaattggcacagaattgatcttactatccaaatcatcagtgttgcatctgatgccttgtccaaaaatttgaaactttttgttgtgctgccgctgctgactctcgggttagtggtgtactatgcgccgattgtggtgttcttggtgtttgcaaggtttaatgggaagtttgtgccgcgagagttggatggtcagtacttttgtgagtggaaagaagattcttgggttcctgcgtattacgctcttgccattttaacgatgatctggtctcttgctgtaatggtggaaatgcaagtgtatgtgataagtggagctattgctcagtggtatttctccaaggaagactcaatccctaaaaaatgcatccggagttctttgaggtgactcgctgccacatctttctctattttattcttgttatcaatgaatttgctgtgcagtttctcttacaatcaatggtgctcttagttctaatatatgttttgtgtgatcgcgggagtttttgctttgagttctcttagttttgtttcctcataaaatataatctatggtcattcgaagtatcccttgcttggcttcgttctggagtattcagtgattctaggtcatggtattcatagtcttggccttatagattggatattgtattggaatccatcatctgaacttgtttggtactttaaatgtgaaaagagacaacagacagtggtatttttgaaaggagattatagctttgaggatccaaatttgcattagtcttcaaatctgttgttggtttatgtcaaagcatgtgtgaatcttattattttttgtatctgtctcttcaggaatgcatttggtcaatcctttggtacgatatgtgtatcaggacttctcatatgcattgttcgtgtggtccgggcaattgtggacaatgcaagagaagagaacacacaaggaatagtgaacatggttctccgttgctgtgcaaacgccttacttggtgcccttgactatctcaacaagttcaccatcaactttgctgcaataacaggggaagcgtattgcacctctgcgaaaatgacttacgagctgttaagacgcaacctactgtcagctgtatttgtcgaaacggtttccaccagaatcctaaccggaatagtctttgtcctgtcagccgcatatgcagtcgcggtaagtattatcttctgcttgtctcaccaaccaagcatttaataattgccataatgactaattccggggtttgatgatgcgcaaaagcagacatgggctgttctgagaggagtgagcaacctgggtatagattcgtacgtggtggctgtactggcgtgggtgttactgattgtgatattggctttctttgtacatgttcttgacgatgtgattgacacaatctatgtctgttacgcgattgatagagacaaaggggatgtatgtaagcaggaagttcacgaggtttatgttcacttgcctatcagcagaagcacaagatcttctctcatcccaaatgctcttaatgcatagcagaagatgatccaacgtctctgcttgttgtatctttttttgtttgttagcaccgttgtaaattcctctctggtgaactgtggtttgtcttcttggggtttatattgatgttttgtagagttatggggtaacaatgttgaataaaagaaagactttagttataggaattactgtaatgtggtctgtgtttcttttattcattaataaatcaactttgttttgctttttatcaaaaacaaccattggggctaaattgaaataaacgtaaaacattagggtctaaaaggagaaagtaaaaaagtaaaggggatatttaaagaagaacaatgttattattatcggtctaaactaaaatctaaatcttgccttcctgactttctctctacgacagaatttttgaagcttctctctgcttatcgacacgatggttctcgaggtgattttccaattacttgtgcttatcttcgttgatgatccacgttgaatgctttttctcatcgatgatttcttgttgtaggcgactatg

SEQ ID NO: 4829 - DNA, 2495 bp, Unknown; identical to SEQ ID NO: 4820
  misc_feature (1)..( 2495): cDNA_ID_3071116_gDNA_ID_1620734_Annot_ID_49457 3000 nt of promoter + ATG

SEQ ID NO: 4830 - DNA, 75 bp, Unknown; identical to SEQ ID NO: 4819
  misc_feature (1)..( 75): cDNA_ID_1825731_gDNA_ID_1620734_Annot_ID_49458 3000 nt of promoter + ATG

SEQ ID NO: 4831 - DNA, 3000 bp, Unknown
  misc_feature (1)..( 3000): cDNA_ID_1825820_gDNA_ID_1620735_Annot_ID_49462 3000 nt of promoter + ATG
aacggtttgatttcttgcgtttcaagcgttgggagtttagggagatatccaaatgagaaagatgttaatggactggtggtgaaggattgcaagataagcggtacgacgaatgggataaggatcaaaacttgggctaattctcctggtctaagtgctgctaccaacatgacttttgagaatattattatgaacaatgtgactaatccaatcatcattgatcagtcttattgtcctttctcttcttgcatttcaaatgtgagtcttctttaacactcaaataagatttttttactgaaatgggtatgagagatttgtttttgatatattttgttgttgtaggtaccttcaaaggttgagctgagtgagatatacttcaagaatataagagggacatcatcttcactggtcgcggtgcagctgcattgtagcagaggaatgccatgtaaaaaagtgtacttagagaatgttcatcttgatctttcttcgtctgatggaggaagaaaacagagtagtaacagaggaaatgaagctgtctcttcttcttgtagaaacgttagagctaattacattgggactcaaatcccacctccatgtcactaatcatcatcatcatcattactatcgtcaattcatcattttgaagtttatctagtacttaaacttttgtgctttctttttggacacgttatcttcatatggtcatattaagtttgctacttttgttgtctatagataaagtgctactacgctaaggaatatttttggctaaataataaaagaaatatgacaagaaaaaactggttggtaataaaaatttaaatttggttcgtgtttaacggttgataatactggttggtaagtttgatacttttgtctatagataacttgctagtaccctaaggatttgttttggctaaatataaaatatggcaagaaaattctggttggtaataaaatttggttcgtttaaagataggatcctacaaaaatggaggagatgattcattccaagagtgccatttaacaattcacgggaaatggttagtaggacaaattataacgatatatgtagtacttataattttaaaaactgaaatcttaatgtaaactaatactaactttatttattaaagaataatatatgcatacgcatttgcctgttatataagtaagcaacaccatctttatttgttccctgacatatttctccttcaggtttctatgatggaactagaatcagaaactcaagaactccatcttcacgtaaatggcggtaagtattgtaacagaaattccggcgtagagattcttgtgttcttcttcttttacttatgttcttgttctgtttcatgtgttgatggtagaacctgaagggaaattttcaacagaagagagaagtcacaagtactcttggaggttaagagtgtctctctatgtcactctcctcttagctggagagacaatagccactctcttaggtagactttactacgaaaaaggcggtaaaagcacatggctcgaaaccttggttcagcttgtagggtttcctttaacccttccttgctattattacttaaagcctgagccgtccaagactaaaaccattaccaaaaaaactacttcttccttcttgacactatctttagtgtatattggacttggcttgcttgttgctggacattgtattttgtactcatttgggctactttaccttcctgtctcaactttctctttgatctctgcgtcgcaattggcttttaacgccgtcttctcttacttcctaaactcacaaaaaatcacaccatttatactcaattcacttgttctcttaaccatatcttctacacttcttgttatccaacatgaaccagaatctccctcttctacttcaaagtccgcagccaagtccaagtatgtgattggatacatctgcgcggtcggtagctcagctggttattctctggtgctttctttaacagattacgcgttcgaaaagattctaaagaaatacacattcaaggctattttagacatggccacatatccgtctatggtagctacttgtgtagttgtggtaggactttttggaagtggtgggtggaaaaagctgagtacagaaatggaagagtttcaactagggaaaagctcatacattttgataaacatcggttcaacgatatcatggcaagcttgtttgattggaagtgttggtttgattatcgaagtttcatcgcttttttccaatgtcataagcactctttgtttaccagttgtgcctgttcttgctgttgtcttcttccgtgatgagatgagtggaatcaagttggttgcaatgtttttggccatctggggatttgtttcttatggttatcagcattatgtcaatgatagaaagccagaagaagaccaagagcttcctcagtctaaagaagaagaagaacaaaaacaagtagataccattcatgtccaagcttaggcaaagatccaagaaaaccaaaagcttttgtaatttgaaccagtttaatctaaaataaaaatgagttatatatattgtaggcactacaaataaaattggtaagtgtctcaaggtctcacagtcttcatgtatctttgttgacttctgaatccaagtcaagtgtacttatggccttcccgtcttgttgtatcgttgttgacttccaaatccacaaaatagattactaacataacaaaaacaagtaataatttttttttttcaagtggacggacacttgagccaataagattagaataagatacaacaatatcaagcgtctatatatctgttttcaccaaactcagcctactttaacaacgttgtgtataagaagttttcttaaaaccgccaattaaaaggtttcaataattcaaagtcaacggtaaacatctttacagaaatatgatgcacttgttcccaccaaccttcatatatataaaagctttaccaaaactctgtttgtgggaagtcctcttagagtggtc

SEQ ID NO: 4832 - DNA, 3000 bp, Unknown
  misc_feature (1)..( 3000): cDNA_ID_1825818_gDNA_ID_1620735_Annot_ID_49463 3000 nt of promoter + ATG
tggaagccactgacataacagataaacaatgtagtgacttgcaacaaaactccttaaaataccaaaaacgtatactctaggagcttggcttcttgtatctttgttgacttctgatttaacgtcaatagacactgaggaaaaagagttctcttagagccgccattcaaaagttttaagaattttaagtcaagtgtaagcaaataagaaaggtcaatggtcagcatgagactactaaattatgatactgctgtcatctatcacctgacccatctttattattatacacaaattagtaaaagtctgccaagtttgattagtgcaacttgtatctggggtatttagttactataataaatatcattttgtgtataaagaaaggtctcttctgtatctaaaagacatatcaaacgaaagaaatcaataaacacaatattctttcttccaaattttctcatttctcatgggcatatctcaagtacactattgcaatggtaagcaaaaggtacctgatgacgttagatcatttgatcctctttcgatgaaatataataaccacgagtgttaatttttcaggtgaccagaacttagaagcaaaccttctagatcatgaggaaactgaatcattttcagtacctcaaacgaagaactgtaagaggtggctccgtgtctccatatacgcaatctttgtcatcttctgccaaccacttgctacagttctgggtagactgtactatgaaaatggagggaaaagcacatatgtggtaacacttcttcaactcattggcttccctgtactgattctcttccgcttcttttctcgaatcaggcaacccaaatcaacagatacaaatttcagtcagtccccttccttcaccacccttgcatcggtttacttgtgcactggactgctagtgtctgcttatgcttatttgtctgcagttgggttgctttacttaccagtctctactttctccctcatcttggcctcacagttggccttcactgcctttttctcatatttccttaactcgcaaaagttcactcctttgatagtcaattctttgtttctccttacggtttcctctgccctcctcgtggtcaacactgattcagaaaacacaacaaatgtatctagagtacaatatgtgattgggttcatctgtaccattggtgcttccgctgggattggattggtactatctctgatacaactgctcttcaggaaagttttcacgaagcatacatcctcagcagtcctggacttggccaattaccagtctctagttgcaacttgtgtggtactcataggactgtttgcaagtggagagtggagaactctgccaagtgagatgagaaactacaaactggggaaagtgtcatatatcttgactttggcctcagcagctattttctggcaagtatacactgttggttgtgtgggattaatcttcgagtcttcttctgtgttctccaattccataactgctgtgggactgcctatagttccagttgtagcagtgatagttttccatgataagatggatgcatcaaagattttctccatcattttagctatctggggcttcctttcatttgtctatcagcactacctcgacgaaaagaagttgaagacttgccagacaaaacctgttgaggaagaaacacaaactttatgaaacaagttgtatcgaaggtctcagaaacaaacatacatagttgtacacagtcatgtaaataacctatataaagcttgtatgtgtaatatccgtaatggtccatgcaaatgggatatgtatgtcgctcatatttcaggtatttagaacttttattcaaaagagtattgtgtaatacgagcagagtgataaaagcagtcatttatttaacagaaaaaccatgtcaattttgtgatactttcattgtgtgagtgtgaaacccgataaaaattgaccagttagcataacttacagatatgtcaatgcaatattctcctttctagttttgaaatgcacctaaatcttgggaaacaagaacaaacagcaaatcatgtataatgagagatagaagataatttgtcagattggtccaacatccttggggaaacagagctttgaacaaaaagtaaatgaccagaaataataccattttatatagcgacttcctctgccgtccagtattaagttgttgcgaatgtcttctcttgaaaagataggcgagacataatctttagctaacgtcagcatcatcttgatggcaaaaacttcatgactagccatggaaaccgaagtgtgtacccaatccaaataaatttaaaaagacaaataacttttagaaatgtcgtcctcatcaagatcacagaatactacaacttgtgtacacgttcatacatatgcgtatgcgtgttaagtttctatttgtctatgcgtatggggttcatgtcctccacatagttgcagaagaaagtctgaatgaatattgcctacacataatttcctcctagacttaactcatctcttggtcaacaatagaggcatctttgcatgtagaaagactacagatactaaattcatggaaagagaagagatatggttggcatttactgaatgtggggccaagaacaaagaaaacttagacggtgaccgattcctaatcccagaatatataacttagcatatctcacccatatcaaaggagcaatcacttggtagcattatcaaccaagagaattgataataagatacgttagttcctccttgtccatctccaaggtggtgattccacatccaccatgacggcggatcaagaactacaaatcattggtgagtaagcataaaccagtttgtggtgaacgtcctattctttcatcttcaaaaaaaaaaaagatggttatgatattttataattcaatatatgaaacgatcgacaacaaataaactaatttttgcgttattttcactcacttaccagttcggcagggaaaagaaccaaatccaacagttcaag

SEQ ID NO: 4833 - DNA, 3000 bp, Unknown
  misc_feature (1)..( 3000): cDNA_ID_1825816_gDNA_ID_1620735_Annot_ID_49464 3000 nt of promoter + ATG
tcatacatatgcgtatgcgtgttaagtttctatttgtctatgcgtatggggttcatgtcctccacatagttgcagaagaaagtctgaatgaatattgcctacacataatttcctcctagacttaactcatctcttggtcaacaatagaggcatctttgcatgtagaaagactacagatactaaattcatggaaagagaagagatatggttggcatttactgaatgtggggccaagaacaaagaaaacttagacggtgaccgattcctaatcccagaatatataacttagcatatctcacccatatcaaaggagcaatcacttggtagcattatcaaccaagagaattgataataagatacgttagttcctccttgtccatctccaaggtggtgattccacatccaccatgacggcggatcaagaactacaaatcattggtgagtaagcataaaccagtttgtggtgaacgtcctattctttcatcttcaaaaaaaaaaaagatggttatgatattttataattcaatatatgaaacgatcgacaacaaataaactaatttttgcgttattttcactcacttaccagttcggcagggaaaagaaccaaatccaacagttcaagatgaaagaaattcagtcagtagcagccaagcagaagtatctcactctaacacatacaaacggtggctcagggtgactttatatacattctttgtcatttcaggccaaacagttgctacaattttgggcagagtatactatgacaacggaggaaacagtaaatggctagcaacggtagttcaacttgttggctttcctgtgctacttccatattatatcttgtcatttaaaacacatgcaacaactgatagagatggaaaaagaacctcacctaggaaccgtgtattggtttacgtagtgcttggacttcttgtaggagcagattgctatctgtactccattggacttctttacttacccgtttctacctattccctgatctgtgcatctcagttagccttcaatgctttcttctcttattttcttaactcacaaaaacttacccctatcattttaaattctcttttcctcctaactatatcttccaccctacttgcattcaataatgaggagacagactccacaaaagttacaaaaggagagtatgtcaaaggtttcatatgcaccgttgctgcgtctgctggttatggtctagtcttatccctacaacagctagcctttctaaaagtcctaaagaagcaaaatttctcagaagttatggatatgataatctacgtgagtctagtggccagttgtgttagcgtggtggggctttttgctagcagtgagtggaaaactttgagcagtgaaatggataactacaaacatgggaaggtatcctacattatgaacctagtgtggacagctgttacctggcaggtattctccatcggtggcacaggactgatcttcgagctctcctctctattctcaaatgcaataagcgttttgggactcccagtggttcctatcttggctgtaatcattttccatgacaaaatgaatgggttaaaggtgatttctatgatcctagctatttggggtttcacttcctatgtctaccaacaatatcttgatgacaaaaacttgaagaaaaatcatgaaatcacaacaacagaatcccctgacccaccagaagcagaagagtcaacttggcaatcaaaataagctgatattttgaaagatgctgtcccgcagtttacagactcaatcaatctagttaagtaaacttactttacttatcggcctggaggcatcctacattgaagaatacacaatacatttttgatgcaactaatgtaaagtctcagcttgaaattttttgcatcattgtaacaggaagtagatttcatttaaataagtagtgaatgactttggtttagtttcaattacgattacccaaattacattgtaatctcagtgaaccaacaatcttaagtttagaacagctgattacaaaagttcatcgtttaaacttgggttcatagcagctaaagattaaatgtaactcaaccctgtatgtaacaagaacctgtaggcagattgataaaagtagatatttatttaataaaaaaccatgtcaattttgtgagtgtgacacctgataaaaattaacccttagccataacttaaaaagatttcaatgcactattccactttctagttttacctgaaacattgtgaaacaaggacacacagaaaatcatttctaatgaagaaagaagaaatattaatcagacaggtccaaacatccttggtgaaacagagctttgtacaaaaagtaaatgaccagaaataataccatttggcagtctccatcttagcagttaataaagtgacttcctctgccatccaatattgtggtgcaaatgtcttcttttgaaaagagaagcgagacatcatctccataaatgtgtttctaatccacatgcctgatctcataagagaaagatagtcagacggaacaagccaaagaaattaaagaagacgaataactttcaaaatagacatcctgacggtcatacaatcttacaacttgtgtgcatgcgtgttaagtttgtgtctatgcatatggctgatgtgtcacacaggtataaaatactgagtgactaatggctacacatcatttccttcttgatttgactcgactcatctctagatcaacaatagtgacaaaagaaattaaattcacagcaagagaagatatacagttggcatttactgaatgtggggacaagtacaatcaaaacatagacgatgaccgattcctaatctctaaatatatagctacagcgtgtctcacccatatcacagaagcaatcacttggtagcactagtaaccaagcaatttgataataagatacctaatacttagaatctattcagaacattgttagtacctccttgtccatctcgaaggagggggattccacatctact

SEQ ID NO: 4834 - DNA, 3000 bp, Unknown
  misc_feature (1)..( 3000): cDNA_ID_1825808_gDNA_ID_1620735_Annot_ID_49466 3000 nt of promoter + ATG
cttgtcagtcaaaacacatacaacaactcagagagatggcaaattaacctcacttaggaaccgtgcattagtttacatagtgcttggacttcttgtaggagcagcttgctacctatattccattggactgctttacctacctgtttctaccctttccctgatctgtgcatcacagttagccttcaccgctttcttctcttatttactcaactcacaaaaacttactcctatcattttgaattctcttttcctcctcactatatcttccaccctccttgcatttaataacgaggaatcagattccaaaaaagttacaaaaggagagtatgtcaaaggtttcgtatgcaccgttggtgcatctgctgggtttggtctactcttatccctacaacagctagcctttcgtaaagttttaaagaagcaaactttctcagaagttataaatatgataatctacatgagtctagtggccagttgtgttagcgtggtggggctttttgctagtagcgagtggaaaactttgagcagtgaaatggaaaactacaaacttgggaaggtatcctatgtcatgaacctagtgtggacagctgttacctggcaggtattctccatcggttgcacaggactgatcttcgagctttcctccctattctcaaatgcaataagcgctttgggactccccgtggttcctatcctggctgtcatcattttccatgacaaaatgaacggcttaaaggtgatttctatgattctagctatttggggtttcgtatcctatgtctaccaacaatatcttgatgaaacaaacttgaagaaaagtaatgaaataccaacaacagaatcccctgaccgaccagaagcagaagggtcaagtgagcaatcaaaataagctgttacttcaaagattgtggcacacacagtttacagactaaagcgagctgatcaagtaaacttacttttctttattggtatgaaggcagcctacaatgaaaaataaacataatagatttgtgatgcgactcaagtgaagtcacagcctgaaaatgtgtgcatcattgtaacatgaagtatattttatttaaatatatgttgtgcacgattctggtttagtttggaataagatgaccaaaatcacattataagctcactgaaatagcattaagtcattaacaaagtcaaaacagctgattacaaaaattcattgtttaaaactcaatcctgcatataaagagaaggtgtacactatgtagctttctaagtttttgtaatatatctaggtgtaagtagagttccaatcagcttacatcaggcacccaacatagtgagcccgaggatacttcttatgcagttgtggccattgaacaaagaattgatcagctattctcaacttgtaaagcaacaatccacttaatgagagctttttcactcttgctacactctcaacataaaagattgatgaccatctaattcccagcacctgtaacccaagatgaaacaagcacttatgggaattctagatgtaatggagaaaccatgactaagaataaacaaaacacatcctctgtttttggtcacaagtccattcaaggtcatccaaaatgtagaggaaagaactgcaaagaatcttgataaaatatttccgaagtgtgtataccttgaataaaaaggcgatcacacacagaggaatacaggtcccaggaccattgcaaagaatctgaaaaacttcaaccaaatctaatcaataacctgattcaaatggtttaataaagaacccttgaagaaagtctaaaaagcattcagataaaaatcataccacttgtggtctgatccggatcattagccacagagcgtgaagaatagcaacaatggtagtccaaacagaagtcacataagactgaccaacttcacgactccggtaaatttgcatgaactgtgatgatgcttccttaacagcaggctatgccacagtcataccaagcaaaaaacacacaagaaataagtaataagcaatagcaaaattcaaagaggagggacaaaactcaaacgaaattgaatttaaggatttttaactaaaccttctcagctagagaatcttcaaaactacgagctttctggagactcatgttatctgtagcagcagcaatgtaaaaccttggtgtaaatctatccttccgcaaaacagagaggagactcaacatctctgctgtgtgtccccctggtgattaacaaaaaccccacaataacatatcataatatgcagcacattacttagatccaattgaagaagacactgcattaactcttcttaccagaaccaagaacaataagagtagtaaaagactgtgaagctccttttggaagtggtttgccacatcggtatataacatacagtacacgaaccattagaagaacgatcgccaaaataatcaataaaccaatgctgaattttgaggccatccttgagtaaacacagttgcaaccttcctccatgatcgtacttccttttgagatctaaaacgtcaaaatccaagcgtaatggagaaacaactcaaaatcagatcacaaacaaaacgaatcgtcaaaatcgagctcgaaattagacaaaaaaacgaaattgaagattcaacacggcgattataaggtgggaagaaacaaaataaaaaactcaccggcgacggagaatcccggcggtgacgggaacgtaaaggattagagaattgaattttattggttacggtgtgtcttctttttaccaccgttcgatttggatattgcttagaatacacgtggcgtaaccacgtgacttttatctttgggtggacctgcaaacatgtaattccttcccaattttttattttaaaatcttaaaaagatactaagaactgatgaagaagatattgtacaccagtcggtacttagaaaaaaaaaaatgagattttttcacaaaacctccattgaagcaacttttgtagctttcttcgtttaggtatctaattaaac

SEQ ID NO: 4835 - DNA, 3000 bp, Unknown
  misc_feature (1)..( 3000): cDNA_ID_1825774_gDNA_ID_1620735_Annot_ID_49476 3000 nt of promoter + ATG
gatggtttggcctgatccatttgttaaacagtaggtaaaatttgcaatctttttttttttttgtttttttttgattttgcaatcttctcccttatctacactgttctctttaagaaacccgctataacacttcccgaatcattcatgcgggagaattcaaaggtaccttaatattaccaccttcaaaccaattcgcacatggtccaagttggaaatggttaaccaatttagttacctatcactatcaaattcccacagttgggtgtgatgcatcatacatttgcaaatgtccaacatggaaatccgaatcaagtaaaccctatatatactctatttttcatgcgttaaaagggttaaaccctttctttgaagaaacttaacctttgttcaaaaacattgatatcgttgagtacttgtgttgctttaaaaagctttcatgtcattttatttgcatattcgatattgtaaataaattgcagattaaatggcatattctttcaatccgagctaaaacaaaatcattctctttttctgtctgctgtttcaaacttgctggacaattatatgatctttctgatttggacattaaaatatccacagataacgtaaacttgaaatattctgcaaccaaaaatatgtccattcagtaaataattaacaaactagatcatattcatgaagaactaaaccagaatcattaaatttaaacattagaaataaattaaaacttgtgtcatatactcgataataaatcaaattatctttaactttacacatataggcctatataaaacaatctgttcggccgtgtatggtatatagttacgtcattatcaaattaatctatatggaactgccataagtcgaccggtggtcaatcctaagccacgaaatcaaacttttaaacgacgaactaaaagttttcagccaactataaacaggccactctgaataattgactgattttgactcctttccacatatttaattccaacatcgaacgattacatttttaattgcaacaagttcaatagcttgagacgggtatatttcttataagttgtatacatgtgttcaaataaaatggctcttggtgtcgtgaaaaagagagaagatttaatattatagaatcgaaaagaagacactagggtattttggattagatcaatacagccaaaagttccactttaaattaatgtaattttctggctagccaacctttcgagaaaacgaattgactatcgtctacgtgatcaagtttaaccctttatattttaccatttaaaaatatagtaagtagaaattaattgattaacaaatcaatagccaaccaagcgaaagcacttactatttcttaaataagttttgttggggtttattatgtcaggtgattaaaaaacaaccgatggttgaaattgaccgacggctccaagtgtgtgacactgccccgccaacttgtctaattcccctcgaaagcatattagcaacattatcccaattgaccattttattttacttttgttatgctaatgcttttagttatttgtcaatttatacattatcatatttgtcttgttttattttacaagtgcctcaaaattaagcatgatccttttgtctaaaggaaagtaagtatatcccttctctatcatcttaatccgaataacaatatatttgagattttttcttgacaattaatggcaaattatattacgacttatatatctttcacgaatacaattttggatatcccgttcttgataactttcgaggacttgtatgaatttccgtccaaaagcctcggattacaaaaagaaaataaatatgtgatatatgtttatttgtatgtattatatttcccgggagatttgaaaatattaaactttaaaggagaaacggaggaggcttcctcagtgtactattgaatcctttgacacgtcaagtcaaatcggatctccaattagcttttgtctaaagaaatatagtaaggtttgtttgtcatattaattaggctaggatacacttgcggtcaagattcatgcgaaaatgtaatcattattcttcgaatttgaattagcattaaattaatcataattaacacgtgattagtaaaatcaatgattcagataaattagataataatattaatagtagtaaaagttaataagaaaaataaagaccatttttgtgggactaataacccattataaaatttcttttgtcatgaagttttagctgaaaatttgatattttacctttcatgattattctacaagacatgattatctattaaaatttcattgtgttaatattaatttttataccacgtctttttctccatgattatcgtagaataaacttttggtgtatagtacaagtttgttttaagtcacgactcacctacttaattgaaacgaatattttaatattttccggtgctttatgaaacttcttcaatattctatacacgtccacttatgtgtatcccaatctcttcttaatttaataacattgctcactttttttaccaacccaacagttaacaccacttgtatagtacatgtaattaaacgaaacacacaaacaacgtatttccttccatacatgtgcatgcaaattgtcttgtcatagagtctgcattaatctagctatatgataaataactacatacaaatattttaaaacctaataattttctttaataagaaatccttcgttgtggtttatagaaagccgtcagtggataaaaaaggcataaatgagaaaagcaatatagggaggcaaagctaaacaatttaaaaacactttttttaaaaaacataaacttcaacactaaaccttttcacaacaaaaaacacggaaaaaaaacaaacaagcgaagaaaagtattcttcaccttggttggcttattgtgtatgtctataaatattccattaaacacttctcttaaaacccaaaaccttcacaatctctttccctccctctctcttcctcaacatg

SEQ ID NO: 4836 - DNA, 3000 bp, Unknown
  misc_feature (1)..( 3000): cDNA_ID_1822243_gDNA_ID_1620735_Annot_ID_49477 3000 nt of promoter + ATG
taatctctttcatgcattgtactcaacaaaggtataattataaatagatgatcatgaaaagagactgcaaagtattacaactcctacaggaccactattagaatgctaaattgctaacatgcatatatcacatgattgtgttgacatcaaattttggtctgataggtccgcatcggttagttttgtacaaagatgaaggtttattcgtcccgttgcaaatttaataaatttgcaattgttttcgaaatgtattaatttttcatagagaaaaacaaatagatgtattgttaatatatagatgaagatctcaaagtcgtcatttctgaaacaaatattgcaaacaggaaagttgttatatttaacaagtttttttttaacaagcttatttcttgctaccatgaaaaagtatttagtatttattgacgaatccggtgataaataaaagttgtaaatcgacaaataaaacgattcaatggatttctcaaattaatcagtgcttaatatatatatatatatatatataagctttattaaataaaaattttactttttttagtggtctttgaattgtgcgagtgtgaatgggttggtcattgacgtaaaagaatggtcatgatcaaatgttgataatggctaggatggtcaacatatttttatttcttgatttgcttgtatcttacctgccttagttctattattaaccactctcgaatttgttttcgatcttaccaatcaaaatactttgtactcatctttatctcataggtagatagcaaagtctaaatattgacaggttaaaataacattacttttcttggcataaccaaattcattatttaattcatagaaatgaccacctcaacgtgtttaaaatacctgtttatttaagattttggacacgtactaacaattggatctagctagcagcaagcattcaaaaactttcgacgactagattagcaatcgtcatgtttctgcctaatttgaatcgcttttattgcagttttctagtcgaattcgattatggactacggttttagagttgcaagatttttcctaacaataataaattgacactaaaaatctttcgatagtaaatatatattcaatacttgcaaccattcgagaaaaatgaacatagtctaaaatacatgatcaactctcatcaaatataacatattacattattactatattagattacgacgttataaaaacaattggattagcatcatatttagtagcattcatataaaattattgtgacataaattttcatgcaatatttgtatagaataattccaatattatattgtcatacatttagctaaactattgtcggggtaaataattgattctaggctttggtcctaggtttatctacaaatatattaatactactaaattaaaaaattcagttagtgtatttagtctggtgtgatgggtacatcagtctcagcattttcatgtgcattgaatgtgaacacccttacatcaaatcttgacttctttttcccgctttttgggattgtaatcagatgtcaatatttagtatttacacaaaaacatttgatttgtgtaacaaagaagaacatgaatgaactatatcaaagcaaggcccaaaaatatgaagcctaaatattaaaattatttaacaaattcccatatctatgtctacatatgtggtagaatttaaacgtaatatttgtttggctgtcaaaaaaaaaaaaaaaaaaacgtaatatttgtttggaactgtttgtatttcttttttttcttaacgtttgtatgtctatctcatttataactccgaaagttgatcgcagtaactaatgataggtatttttcgaaactgctgaccatatttcactgttgatggcgtcatggtccgtatgtcaacaaaatctagtattatgtacgtactacatttagttatgttattttcttgagttcacgtgttggcttggttgataatacacggggtatcctcgtccacgcattatgaggtagagttcctcctgcttcattctcacttcattcttccctcgaaatattcaaattaatttattacaaatctcttcgtgtttttaatttttgacgaagtttcttgaaagtttaggatatttatatttaggtttttaattcgttaacgaatttcttagatctgaaacttttacagatttccaagagcaagtttcttatctatagtcatcctttatttatccttagaatatgaagttatcaaatgaaatatttctatctactattttaattggatttataatatatatagtgacgaatgtacaattatatcaattaatctcaattttccgaataatatttgctaactaatatacatcatgttttagctagtcaaaatttcacctgggattttatatgttacaattttggtaaaacatttactgactatcatttctaaaacatgaactgtggtcatttggaggattattcttaaacctaaactttgatttatgagtatataaatctaaattaaatcacccttatatcaattaatgaatcattaatatatatgatatatccattacccaaagatatttgtatctttcgcttactttaaaatgttgaagctataaaattttacatatttgaaaaatgagttattagtatttcatcaacaaaatgcattctactgtatattggattccaacgcaaacaataacatagctacaaagctatcacaaagcactatcattagtttattacactaaaatttcgaatattttcatgtacgacttcaaatatttttcattttctgccgcattctcatgtcattagtcatcattactccctctctcgcgtacccaactctatataagatttctccttcttctttttctcttctcatcgaactttcctctttcttctctcatctcctctctttcactcttcacaccagaagatacaaaaaacaatcactgtctcaagcctctctataccgaagataagaaaacaaaagcc

SEQ ID NO: 4837 - DNA, 3000 bp, Unknown
  misc_feature (1)..( 3000): cDNA_ID_1822243_gDNA_ID_1620735_Annot_ID_166246 3000 nt of promoter + ATG
gtactcaacaaaggtataattataaatagatgatcatgaaaagagactgcaaagtattacaactcctacaggaccactattagaatgctaaattgctaacatgcatatatcacatgattgtgttgacatcaaattttggtctgataggtccgcatcggttagttttgtacaaagatgaaggtttattcgtcccgttgcaaatttaataaatttgcaattgttttcgaaatgtattaatttttcatagagaaaaacaaatagatgtattgttaatatatagatgaagatctcaaagtcgtcatttctgaaacaaatattgcaaacaggaaagttgttatatttaacaagtttttttttaacaagcttatttcttgctaccatgaaaaagtatttagtatttattgacgaatccggtgataaataaaagttgtaaatcgacaaataaaacgattcaatggatttctcaaattaatcagtgcttaatatatatatatatatatatataagctttattaaataaaaattttactttttttagtggtctttgaattgtgcgagtgtgaatgggttggtcattgacgtaaaagaatggtcatgatcaaatgttgataatggctaggatggtcaacatatttttatttcttgatttgcttgtatcttacctgccttagttctattattaaccactctcgaatttgttttcgatcttaccaatcaaaatactttgtactcatctttatctcataggtagatagcaaagtctaaatattgacaggttaaaataacattacttttcttggcataaccaaattcattatttaattcatagaaatgaccacctcaacgtgtttaaaatacctgtttatttaagattttggacacgtactaacaattggatctagctagcagcaagcattcaaaaactttcgacgactagattagcaatcgtcatgtttctgcctaatttgaatcgcttttattgcagttttctagtcgaattcgattatggactacggttttagagttgcaagatttttcctaacaataataaattgacactaaaaatctttcgatagtaaatatatattcaatacttgcaaccattcgagaaaaatgaacatagtctaaaatacatgatcaactctcatcaaatataacatattacattattactatattagattacgacgttataaaaacaattggattagcatcatatttagtagcattcatataaaattattgtgacataaattttcatgcaatatttgtatagaataattccaatattatattgtcatacatttagctaaactattgtcggggtaaataattgattctaggctttggtcctaggtttatctacaaatatattaatactactaaattaaaaaattcagttagtgtatttagtctggtgtgatgggtacatcagtctcagcattttcatgtgcattgaatgtgaacacccttacatcaaatcttgacttctttttcccgctttttgggattgtaatcagatgtcaatatttagtatttacacaaaaacatttgatttgtgtaacaaagaagaacatgaatgaactatatcaaagcaaggcccaaaaatatgaagcctaaatattaaaattatttaacaaattcccatatctatgtctacatatgtggtagaatttaaacgtaatatttgtttggctgtcaaaaaaaaaaaaaaaaaaacgtaatatttgtttggaactgtttgtatttcttttttttcttaacgtttgtatgtctatctcatttataactccgaaagttgatcgcagtaactaatgataggtatttttcgaaactgctgaccatatttcactgttgatggcgtcatggtccgtatgtcaacaaaatctagtattatgtacgtactacatttagttatgttattttcttgagttcacgtgttggcttggttgataatacacggggtatcctcgtccacgcattatgaggtagagttcctcctgcttcattctcacttcattcttccctcgaaatattcaaattaatttattacaaatctcttcgtgtttttaatttttgacgaagtttcttgaaagtttaggatatttatatttaggtttttaattcgttaacgaatttcttagatctgaaacttttacagatttccaagagcaagtttcttatctatagtcatcctttatttatccttagaatatgaagttatcaaatgaaatatttctatctactattttaattggatttataatatatatagtgacgaatgtacaattatatcaattaatctcaattttccgaataatatttgctaactaatatacatcatgttttagctagtcaaaatttcacctgggattttatatgttacaattttggtaaaacatttactgactatcatttctaaaacatgaactgtggtcatttggaggattattcttaaacctaaactttgatttatgagtatataaatctaaattaaatcacccttatatcaattaatgaatcattaatatatatgatatatccattacccaaagatatttgtatctttcgcttactttaaaatgttgaagctataaaattttacatatttgaaaaatgagttattagtatttcatcaacaaaatgcattctactgtatattggattccaacgcaaacaataacatagctacaaagctatcacaaagcactatcattagtttattacactaaaatttcgaatattttcatgtacgacttcaaatatttttcattttctgccgcattctcatgtcattagtcatcattactccctctctcgcgtacccaactctatataagatttctccttcttctttttctcttctcatcgaactttcctctttcttctctcatctcctctctttcactcttcacaccagaagatacaaaaaacaatcactgtctcaagcctctctataccgaagataagaaaacaaaagccatggtttctcttcttaca

SEQ ID NO: 4838 - DNA, 3000 bp, Unknown; identical to SEQ ID NO: 4835
  misc_feature (1)..( 3000): cDNA_ID_1825774_gDNA_ID_1620735_Annot_ID_166244 3000 nt of promoter + ATG

SEQ ID NO: 4839 - DNA, 3000 bp, Unknown; identical to SEQ ID NO: 4834
  misc_feature (1)..( 3000): cDNA_ID_1825808_gDNA_ID_1620735_Annot_ID_166232 3000 nt of promoter + ATG

SEQ ID NO: 4840 - DNA, 3000 bp, Unknown; identical to SEQ ID NO: 4833
  misc_feature (1)..( 3000): cDNA_ID_2132471_gDNA_ID_1620735_Annot_ID_166230 3000 nt of promoter + ATG

SEQ ID NO: 4841 - DNA, 3000 bp, Unknown
  misc_feature (1)..( 3000): cDNA_ID_3090839_gDNA_ID_1620735_Annot_ID_166229 3000 nt of promoter + ATG
tgtacatatgataccaataatttcagaatatttttcttctatatataccaataagttttcttaaagatgcaaatgcaatactctgctttgtaattttgcaatgcatttgaaacaccgaatcaagagcaaacaacgaagtcagagagacaaataggctaaaacagagctttgagcaaaaaaaaaaaacaagtgaacagatataatacccacttacttggaagccactgacataacagataaacaatgtagtgacttgcaacaaaactccttaaaataccaaaaacgtatactctaggagcttggcttcttgtatctttgttgacttctgatttaacgtcaatagacactgaggaaaaagagttctcttagagccgccattcaaaagttttaagaattttaagtcaagtgtaagcaaataagaaaggtcaatggtcagcatgagactactaaattatgatactgctgtcatctatcacctgacccatctttattattatacacaaattagtaaaagtctgccaagtttgattagtgcaacttgtatctggggtatttagttactataataaatatcattttgtgtataaagaaaggtctcttctgtatctaaaagacatatcaaacgaaagaaatcaataaacacaatattctttcttccaaattttctcatttctcatgggcatatctcaagtacactattgcaatggtaagcaaaaggtacctgatgacgttagatcatttgatcctctttcgatgaaatataataaccacgagtgttaatttttcaggtgaccagaacttagaagcaaaccttctagatcatgaggaaactgaatcattttcagtacctcaaacgaagaactgtaagaggtggctccgtgtctccatatacgcaatctttgtcatcttctgccaaccacttgctacagttctgggtagactgtactatgaaaatggagggaaaagcacatatgtggtaacacttcttcaactcattggcttccctgtactgattctcttccgcttcttttctcgaatcaggcaacccaaatcaacagatacaaatttcagtcagtccccttccttcaccacccttgcatcggtttacttgtgcactggactgctagtgtctgcttatgcttatttgtctgcagttgggttgctttacttaccagtctctactttctccctcatcttggcctcacagttggccttcactgcctttttctcatatttccttaactcgcaaaagttcactcctttgatagtcaattctttgtttctccttacggtttcctctgccctcctcgtggtcaacactgattcagaaaacacaacaaatgtatctagagtacaatatgtgattgggttcatctgtaccattggtgcttccgctgggattggattggtactatctctgatacaactgctcttcaggaaagttttcacgaagcatacatcctcagcagtcctggacttggccaattaccagtctctagttgcaacttgtgtggtactcataggactgtttgcaagtggagagtggagaactctgccaagtgagatgagaaactacaaactggggaaagtgtcatatatcttgactttggcctcagcagctattttctggcaagtatacactgttggttgtgtgggattaatcttcgagtcttcttctgtgttctccaattccataactgctgtgggactgcctatagttccagttgtagcagtgatagttttccatgataagatggatgcatcaaagattttctccatcattttagctatctggggcttcctttcatttgtctatcagcactacctcgacgaaaagaagttgaagacttgccagacaaaacctgttgaggaagaaacacaaactttatgaaacaagttgtatcgaaggtctcagaaacaaacatacatagttgtacacagtcatgtaaataacctatataaagcttgtatgtgtaatatccgtaatggtccatgcaaatgggatatgtatgtcgctcatatttcaggtatttagaacttttattcaaaagagtattgtgtaatacgagcagagtgataaaagcagtcatttatttaacagaaaaaccatgtcaattttgtgatactttcattgtgtgagtgtgaaacccgataaaaattgaccagttagcataacttacagatatgtcaatgcaatattctcctttctagttttgaaatgcacctaaatcttgggaaacaagaacaaacagcaaatcatgtataatgagagatagaagataatttgtcagattggtccaacatccttggggaaacagagctttgaacaaaaagtaaatgaccagaaataataccattttatatagcgacttcctctgccgtccagtattaagttgttgcgaatgtcttctcttgaaaagataggcgagacataatctttagctaacgtcagcatcatcttgatggcaaaaacttcatgactagccatggaaaccgaagtgtgtacccaatccaaataaatttaaaaagacaaataacttttagaaatgtcgtcctcatcaagatcacagaatactacaacttgtgtacacgttcatacatatgcgtatgcgtgttaagtttctatttgtctatgcgtatggggttcatgtcctccacatagttgcagaagaaagtctgaatgaatattgcctacacataatttcctcctagacttaactcatctcttggtcaacaatagaggcatctttgcatgtagaaagactacagatactaaattcatggaaagagaagagatatggttggcatttactgaatgtggggccaagaacaaagaaaacttagacggtgaccgattcctaatcccagaatatataacttagcatatctcacccatatcaaaggagcaatcacttggtagcattatcaaccaagagaattgataataagatacgttagttcctccttgtccatctccaaggtggtgattccacatccacc

SEQ ID NO: 4842 - DNA, 3000 bp, Unknown; identical to SEQ ID NO: 4831
  misc_feature (1)..( 3000): cDNA_ID_3074332_gDNA_ID_1620735_Annot_ID_166228 3000 nt of promoter + ATG

SEQ ID NO: 4843 - DNA, 404 bp, Unknown
  misc_feature (1)..( 404): cDNA_ID_2178054_gDNA_ID_1620735_Annot_ID_166225 3000 nt of promoter + ATG
aacatataaattaatttgcataggaaaaaattacacaacttaaattgagattagttaagaaacaagaaaaaacaaagttgatagaaaaataaaagtattaacacgactttggattcacacacgtaccattgaattatatctcaatacacttttacttaattaacttatttccaaaccaagtagccaaaatcatattattcttctctctcttccttttttgagtttcaaaatgcataaatacgagaacgagagacgaagaccaaattaaagtccaagcaccaatctagacctcttaggaaaaaaacctaaaaacctaatccccaaacctaaaaggcttatctcatctcttcttctttgtcttctttactctttttttacctctctcttcattgttcttcaccatg

SEQ ID NO: 4844 - DNA, 3000 bp, Unknown
  misc_feature (1)..( 3000): cDNA_ID_1825886_gDNA_ID_1620736_Annot_ID_49479 3000 nt of promoter + ATG
atcgtaatgcacgtgtttgttaaagagatagaaaaccactatgtgcttgatgtattgtgacctttaccacgtaaaccatgctataatttagctgagatgttgcaggtttgtattattagattgaaattcaatgattgaattatatagtattaatattttatgacaaaaagggtaataataagtttttggtggaagtattaaagtgtatgattcgacaccatttggtatagttaactatctgtcaaagagatttgtatgtggaaaaactattttcattttaaagtgatttgcaaagcaagaaataacaggatctacgaaaacgtggatatagacccactagaagtactgtgcttagcggcaaataacgcacaaatgtagcagttagctaagtcgaattttatattagaaatcatatgatttttagatttagaaactcgaattagagtttgagatattacacatgactcaatttattcgggatatcgatatttcgtgtatgattcatgaaaaagaagtgataagtttacaagaatatgatagttttgtacgttatcatcttaaatgtattttgaggaaattcgaagtgacaaaatatgcctttttttttatcacagaaataatatctatggtttaaacaaatcctaggttataaaactaggttataaataaaacaattaaaattttcaaaatcacaaatgtattaaacgtataaagaaagttgatatgatcaaaatttgctttactccttttgcttctttgcattaatcaaaaatatcaaagagagtatacaagatttgtagcatggaaagttttctcacaaaactgcaaaagttttttattttatatttttaactcctacaaaaaaaaaaagatggcatttttatggaaacttctttcacttgattaacactacatactattctcgtaagatgatacacgttttggctaagagaccaaccatgtgccacatcatagacacattgcgaacgtaaatatttataatcatatacatataaaattacagcaatagaatgctaattttcgggcgtataaacaaagttattaagaacatgtactcgtgcttaatccatgatgatatatttttcttgagattgtaatgaaggtcttgtctttttgcgcagattttatctcttcagtgttgatcatatcaaacaggacatgttgagtgatctctttattattttcatcattttgaagtggtagaatctgtctttttttgtttaataatcttctgttttgtgacatctattctctttgatgtcttcatatcgtgagtcggtcagtgaacctttgtctttttttttttcttagttaacgccatttggtaacgtattggtttatcgagatatatattatgttccttgttcttctttcttattcttacttttatatttttttttattatttttactttttaatttatttattattatctttcatctttattttgttcacatatacatacatttcatttatttaattgtggtcgaacatacaaattttcgctttatggattggatcattaataatatcgttttcactaatcttgtaataatcctgactctgatctaaatatcaaagcgaaggatgtcaatacagcataccgttagttagagtaggtactaaagataaagatttagattagtgaggatcatctatcaaaaatcagaaactttgtgaagaacaactaatgaatgaccgaaccgttggtacgagaactaaaagaaaacggaagaaagatcaagcagagctattgtagggaatcattttaaagtgtactataatacacaaatatcgataactcaattggtaagactctcaccagttcgagtgatacttgagaaggtcgatataaaatgttatagtcctgacctaatgtgggcatagatctacaacctattagtcattcacaaaaaaaaaaaggccaaaagaaaagagttatcaaggtagtgaaattttgtaaggagagacttattgcatgccaacgatatatattagtcattactaaaataaaaagtgatctgactaatcaaccttgagctggaaaagtcagaatgagataagaaaggataaaggaagttggtcatcacaataattagaatttactcgatggaatttgaatttgggacataacacgagggattggccgaggaaaactacattttatcgagacatcaacgttgattttgtacgctacgatcatttaccatgaagtatgcaaaatgtggccgagaaattctcgagtaagctgtctgatcaatcgctgagaggttggtccatcgcttcatgtaagctgtcttgctggtttatccgcattttatggttggttcatccgcatttaatggctagaaagctgcctcgctcgaccaagcaggtgggtaaggcggacagtttcctacttatgattgtggtaaacttacctggcagcatatatatgcttcctcgtaaattaactgatgttagtcgcattgttaagcaactatatatagtgatgaatcgctgccatttgcaaactagccaggaatctattgtgtccaagctattgtcttagcagtttctcattttctagattcactagaaatcttttggcctacaattttggtttgcttctagaagttataatataaatatagatttttcaaaatttcaaaaactaaactgttatacgaaaacgttattctttccgactaatttcaatgtattcaaaaaccagaaaaacaatttgtagtggttggtatctttatgaacaaagaaatattcaaattaactctaataagcttatgaaaaatcatagatacgaaaagcattctgtcaattattaatcattccgtattattatagtaatgattccatattataatattctaattattatctctatatattattcatttatttattttatattttaggtttacccacacttctcctcaccttcaactctctaactctctttctctccctctctcaaacactatg

SEQ ID NO: 4845 - DNA, 3000 bp, Unknown
  misc_feature (1)..( 3000): cDNA_ID_1825882_gDNA_ID_1620736_Annot_ID_49480 3000 nt of promoter + ATG
gctcaaggttgattagtcagatcactttttattttagtaatgactaatatatatcgttggcatgcaataagtctctccttacaaaatttcactaccttgataactcttttcttttggcctttttttttttgtgaatgactaataggttgtagatctatgcccacattaggtcaggactataacattttatatcgaccttctcaagtatcactcgaactggtgagagtcttaccaattgagttatcgatatttgtgtattatagtacactttaaaatgattccctacaatagctctgcttgatctttcttccgttttcttttagttctcgtaccaacggttcggtcattcattagttgttcttcacaaagtttctgatttttgatagatgatcctcactaatctaaatctttatctttagtacctactctaactaacggtatgctgtattgacatccttcgctttgatatttagatcagagtcaggattattacaagattagtgaaaacgatattattaatgatccaatccataaagcgaaaatttgtatgttcgaccacaattaaataaatgaaatgtatgtatatgtgaacaaaataaagatgaaagataataataaataaattaaaaagtaaaaataataaaaaaaaatataaaagtaagaataagaaagaagaacaaggaacataatatatatctcgataaaccaatacgttaccaaatggcgttaactaagaaaaaaaaaaagacaaaggttcactgaccgactcacgatatgaagacatcaaagagaatagatgtcacaaaacagaagattattaaacaaaaaaagacagattctaccacttcaaaatgatgaaaataataaagagatcactcaacatgtcctgtttgatatgatcaacactgaagagataaaatctgcgcaaaaagacaagaccttcattacaatctcaagaaaaatatatcatcatggattaagcacgagtacatgttcttaataactttgtttatacgcccgaaaattagcattctattgctgtaattttatatgtatatgattataaatatttacgttcgcaatgtgtctatgatgtggcacatggttggtctcttagccaaaacgtgtatcatcttacgagaatagtatgtagtgttaatcaagtgaaagaagtttccataaaaatgccatctttttttttttgtaggagttaaaaatataaaataaaaaacttttgcagttttgtgagaaaactttccatgctacaaatcttgtatactctctttgatatttttgattaatgcaaagaagcaaaaggagtaaagcaaattttgatcatatcaactttctttatacgtttaatacatttgtgattttgaaaattttaattgttttatttataacctagttttataacctaggatttgtttaaaccatagatattatttctgtgataaaaaaaaaggcatattttgtcacttcgaatttcctcaaaatacatttaagatgataacgtacaaaactatcatattcttgtaaacttatcacttctttttcatgaatcatacacgaaatatcgatatcccgaataaattgagtcatgtgtaatatctcaaactctaattcgagtttctaaatctaaaaatcatatgatttctaatataaaattcgacttagctaactgctacatttgtgcgttatttgccgctaagcacagtacttctagtgggtctatatccacgttttcgtagatcctgttatttcttgctttgcaaatcactttaaaatgaaaatagtttttccacatacaaatctctttgacagatagttaactataccaaatggtgtcgaatcatacactttaatacttccaccaaaaacttattattaccctttttgtcataaaatattaatactatataattcaatcattgaatttcaatctaataatacaaacctgcaacatctcagctaaattatagcatggtttacgtggtaaaggtcacaatacatcaagcacatagtggttttctatctctttaacaaacacgtgcattacgattaatggatatatatctgagttattggttgattgtacctgcctccacttccatttctacctgataattgaatattagtggattcttttgaaaattcagtgatacgcatagggtagaaaccaatcaaagtcatcttttgctagagtgttccgtgttagctagagacttaacacgagatatacttatcatcaactatttttaagaatcaaataaacatgttatttcatagttgaatattgtgaagatatccaacccggattttggttgggtttggattcacattttcgagttttaggacttgtcggtttatgtataaaagtatccaatacaaaacgtacttaaatatgcatgttttggtataatgtcggttttatttcatagttgagagttcttcgtcaaatttatcgttagttcatatttggcatgtatctttagattgttattctcctcacacttggaacaaataaataattaccgttgcaagacttttaacacattttgaatcatgtttatcaaaatcttaattcaaaacatatgacactgtgaaaactggatcaaaaagacttctcatcagggaggttattggcgacggcgacgtcaacaatcgacctaatggcttgctcgccgactttggataatatgtaatcatcagtgaacgattcttgatctagtaatagtaaacccttttggtgatttatttatctatgctatcaatttttatgcaagtctttctatagaatatttctctctcgtcatgattaatgctaattttcagtttttcacctccacaaacaaaagacggttctactcgcacgtgttaaaagacggttctgctcataagcatacaaaaatagaaggctaggatcataaatcttataagttacaaatcaaaataacatatatattcactaaatactttacatgagagattgaattagaa

SEQ ID NO: 4846 - DNA, 3000 bp, Unknown
  misc_feature (1)..( 3000): cDNA_ID_3074378_gDNA_ID_1620736_Annot_ID_49482 3000 nt of promoter + ATG
cacgactatcaatatgttatttgacacatctcgttcatcttaaccctcaaaccatgggttaagacatcatagtcatcatgacctatcacaatgacataatgatattagcataatgttacattttctcaattagtgtcaaaaccatatttaaatatatatacattcataatcgttgtatataatgtgtctaatataggaaaattagtaatattaaatatcatatataacgaaaatggaatttgtgaacaatatatatatgaaaatgatttcactggtcaattctcgtttttcattttctaactggcctattatttctccttaagaaggctaacatcatcatatatactatatgcatatacgtagtagagtcaatataaggtctgtatttttaacttcttatataactcatatttttttcatctagttggaacaccgtaaattttattctaaaataaaacaaaattcttacgggttcatttattaatcaaattgatacattttcttcccacacacatttttacagttagagtcatgtaagacttatcgattcctatgctagaaaaaaacgtgcgactataccaaattatatggagaaaaatatgtggtcaacttaaaaaagtattccctagtttagtggtgattaaatattaccaatactttagcaaaggatataatagtgctttataagtcattattaatagtataatagagtgatgccaaatcaattaacatacctactagataacgatgacaactcattttttattttattttcaattgaaacatgcattaacattagacagataaatgatatatttaacataatttacttaatgactcgaattgggaaatttttcttctaaaatacagattttaacatatagagtgatgttagatttagctctttaaaatcatcaacacgttggaaaacaaataagctattataccaatttatatggagactaatatcatgaacggtacttcgttatcactcgtgcccgtcaacagtgccattggatatatgatgtattacatatcatggtattatgtaaaatgatcgagatcaaatatcatggacattctataagtgcatcgaggtcagttagacttagtatcgtggagcatacttcttgaccaccttactgtcggctaaaatttatatgtaaatattctcttgatacctcataatgatgtgacgtacgattctatttatgatgttgcactgttatttgttagatacacagtcattattttcctttgatatggttgtgaattcctctaatatgattatgtttttcttatatgacttggtctgaggtaactgatttgaacaagctgctgttagatttatcaccaactttatagaagaaaagattctgccactatgagaaattggcaaataatatagagaaaaatgtagtcaatttaaaataattattcctttatgagtgcttacaaattaatgatattttggcaaaacaattattagtattttataagtcaatgtttattagcaaagtattgtaaagccacgtcaattaagattatctaaatcaagtagcatgttcattaccattagatggattaaaaatatatttaagtttattttgttgggttgtgcataacttccacttccaatattgttccattttaaaaagtataatatgcatatagtagaacatacatcacaattacctagagaaattgttcagaaatgaatatttattcaatacatttttaagaatatttcaacaggaaaacaaaaaaaattgcagtacgaatttcattggttaattagaaatatctccttttttgtcttcatctagaaggaatacctaaacttgatctgaaaataattattttttactttaattttaaaaaaaaattagaagtcaaactgaaaacatttgagtacaaagttttttatttagagtgatggtaaattttctcaagcaactatatcatagaagataatctgcggcttgtcagaaaaaataataataatctgccactatgccaaattaccgaattatatagagaaagaattagttagtattaagaaacttgttccttagataagtagtgcttacataatatcagtattggcagaaaaagagaattagtgacataatattaatattttttcaaaaagaatattagagttctaaaagtcattgtttaatagtatataaatcaattaacacgtgcattatcattagatagataaataatatatttaagcttgttttatgtggttatgcgtattatttcacttcgaacattgttccatttaaacgaaaatatgatatacatataagaaatacatcacaattacctaaggaaattttgggcatatttttaaaaactatttgttatttaatttttttttccaaaatttgtcatagacccttggtttttgcccatgctgccaccccctagagacgggcctggttctatggtataatagagagtaaacatttgatttatgcttcaaactccttctatttcctttcaaaaaggtaaacaatagctgatgtagttttacattcaactaaaaaaaaaaactacttcaagcgaaaaatattataacttggttttaaattttgttcatcgagcagtatgtggagggctcgtaggacgttggcttgattgttaagtgttgtgattgttggtcaaaaaaagatatagaaaaaaagtcttatcaaattagccaccagacgaaagtgaaatttacggtccgagaacatgcgtttaccacaaatggttgtagtcagggtgtcatatcataagaaccacaacatgaggatccatagtgatgtgaattgttgactttgcctggctacatggtttttttctgtctgaaaaaaaaaaggccaaggaaaaaacaaatgtatccaaaaccctataaattacaaagtagagaggaagaagaaatgcacaaatttcagaataacatatattcactaaatacttacatgagagattgaataagaaatggaa

SEQ ID NO: 4847 - DNA, 3000 bp, Unknown
  misc_feature (1)..( 3000): cDNA_ID_3000065_gDNA_ID_1620736_Annot_ID_49486 3000 nt of promoter + ATG
aaccgtcctctggaatagaacaaaaaatatgaaagagagtcaagagagtaataccaattattacctacataataagtacagaacaaggtttcttttgtttttgtacctctgttatcacacggtagcgaccatgtccagaaagaccaagaccaaatcccattgttataccatccatcaatgaaatatatggctttttgtacgcagcaattgcacatatcagtgtatactctgctgtaaatacctaaggaagcaaaatatcgaagttaaaaaactacattttggaggctatactcttaaaaatgctaagagcaaaccattcaagagacaaacgtaaggaagtataaatcaaaccattctagagagctcttggaaagaccaaattgaaagagatcacacacatgcatgttcatcaaattagtacaccatttaatcttaacaagtttgaaataatgctaaatcatcttttgaagtttgacaaagcataatttattttataaaccttttgcacaagaggtgtgtttttgtccttttggatttctgcagcaactcctttaatatccatccctgcacaccattcatatagatagtcactccaaaacacacttcccaaacgaacaaacaatttcaatttaaatgaaacaatctacataacatagcttccacataaaaagaacaaaacttgcaattacctgcacaaaaggccctagatgtgcttccttcaacgataacacatttcactctcggatcagattcccattcatcaagaaagcttttatactttatatccatatctgtaacatcataatgaagcttcttataattatatctgagcctagcaatcatttgttacatccaactatttcaaagccaattccttttaaaaaaatgattttgaattcagtaaacactaaaaggttcttactttatcaaacccaagaaacaaaaattcaaaagggtcacctaaattcatggcgttgagagctttggttcgatcgagagtgatgagagcgacaccattcggaaaaacatttcctttaacgaaatcatcgacgccagctccggccatcgctgagaatttccgacgatcggagattgagaatctgagggtttggtggaattgagaagagaaggtttgtgagaatttggggaaaaagatgcgatgagacaaagttttgatgatgatcatagtggtgaagaagatacagtcatcagcgacggagatagagatggtaagtgaaacactctttctgcttcagaggtttctttagaccgtaaagtcacttttgttgcctttgtctcggtccatttgattcgagcggttgagtccatgtaattgattttaaattatttttatttgacagaaaaaaaaaaaacatgttcgaaaatcagcattaaaataagaagattttaagatgatttatttaatagtgaaaatcctgaattaatagccaattggaaactaattataataaccaatctaacaaatggcttattccttacaacaatattaaatcgcaattaacacatatgcggtttacaatattactttagacaatatatatgtctaactagataaggattcgcatatatgtgagtttttggtttaaaattttcataatcggtgaaaaagtaaaaactaaaattatatgaaccacgaatacaaaatcacatcatcaatctccaaagtattaaatagtgcacaaaatcttgaataatatttttctaatctattctccatcctggagattataggtgaggagattcagtggggtgaagagattgagttagtctttgttcgtcgacactggatctcgtaatgattgttgcgagatcacaagttcacaactaccttcaaaaatatttgtttatttcaaaatttggtaactacttctcatcgatatttttaaatattttcagttatcaaatttgttttgagtttttttaaaactacccaattatgtgataaaaataaattaaaaaattataagtaacacttagtcgttgtcttctataataatcaattataatatagaataccccacaattgtataaatcatcttacaattcgacttaaattttatatcaaatttttaactatttaaaattaaatttaattatccaaattttaaattcatatggcttaataaaaacaaagatcttcatttacaaaatatctattaaacatattaaatgaactaataaacaaatatcataaatttggacgtgtcttcattcgatttttaatcaaattaatcttatttacctaaaatcgtataaaaaaggttcttaatgtttactcaaatcatttatttttagttaaatactaattaatctatttttcgtaatacaaatcaatataaaaaaatatctacctactatgtattaaattttgttttagtttactaatatttttttatttgtttaaaagaaaaaataattataaaattataaataggcaaatagcgtagataagtaagtcgactattgtctcattttgccgtcaacgagacagaccacagccgtcgacgtcgtcaacaccggtcacaaacttagattccacaaaaatctaacgccgtcaattatttccgtccatctccttcctcaaatctctctctctactcttttaaccccacagaccattcttagctgtacaaagtctctctctctctctctctgcaaacactgattcaacaaagaagaatcaaaatctccagaaattcgatcgtcgttgaagattcgtctcaggttcgtctactttgctccgtttctcttctaaatctcctatagtttctggatctgtatgttattagtcatgatcgatctcaactctgtgaaccgaactagaatttgttgtcaaatctcgtgtttacgttagactaagcgaacaaatctgtaattcgtattgttcagaacttgatttcgccattattgattcagaaaactgatcctgagttctaaagtttgtgtagtttctagcttagtgttttggaatcgaaaatg

SEQ ID NO: 4848 - DNA, 3000 bp, Unknown
  misc_feature (1)..( 3000): cDNA_ID_1375709_gDNA_ID_1620736_Annot_ID_49487 3000 nt of promoter + ATG
ggaggctctcccacacgaagaggaataacactgtcacccaaaatttccctaacaggtcgagctacaggagggctagctgaacccaagtcttttacttgctcaggtgactgggagccctcttctgatgtttttctacccccaaacctatcctctctgcgccaatcattcaggatctcaggacgagcagggctttttctgttattaacagcattcctactacccgtctcgaaccctggacttctcccaccaggacttgatctgtcgccgtaacgacggtcatatccatcttcataaggtggactccgagaaccactagaactacgtgtctcacttggagacttatcatcattcttctcattcgtataccttttatttacatacacatgtctgatgaagtcccttaaccgctcaacattactgacagattaaaaaaacacaatcaatcaatgtaacacatccatctccacaacaagaagacagatttgtaactgtaataccttccgtcaggcactgattgccgctgttgatccaatcctttaaaataaatatccttagcatgctgttacaaaaacaaaagatactaaatcacaaatgccaagagaaaaaactcatcaaaagaagagagatttagcgtgtttacctgatttccaccttctttcaaagcagtaacttcttgtgaggtaaatttcgccattgatatcgatttaacacgatgtgtaaactcacgactgttcaaaaatacatatgcatatctcaaacaacatttccaatgaacaccatctacacaagaatatgagaagataaagtacactcactgtattccactgcagttggtacaaacaaaagtccagaaagtagtgcaaacatattgtggtccctaagtaaatgatatcgaagaagaaacgttaacgttaagttctctcaaaatttttatcggaaatgatcaaatgaagagcaaaaaaaaacttacaaggctgttacagtttatacacctcttattctcaggaagtttaagaagactcctaataatcttctcgttcttctcgtcttctttaactcgacccgccattttcgattccaaaacactaagctagaaactacacaaactttagaactcaggatcagttttctgaatcaataatggcgaaatcaagttctgaacaatacgaattacagatttgttcgcttagtctaacgtaaacacgagatttgacaacaaattctagttcggttcacagagttgagatcgatcatgactaataacatacagatccagaaactataggagatttagaagagaaacggagcaaagtagacgaacctgagacgaatcttcaacgacgatcgaatttctggagattttgattcttctttgttgaatcagtgtttgcagagagagagagagagagactttgtacagctaagaatggtctgtggggttaaaagagtagagagagagatttgaggaaggagatggacggaaataattgacggcgttagatttttgtggaatctaagtttgtgaccggtgttgacgacgtcgacggctgtggtctgtctcgttgacggcaaaatgagacaatagtcgacttacttatctacgctatttgcctatttataattttataattattttttcttttaaacaaataaaaaaatattagtaaactaaaacaaaatttaatacatagtaggtagatatttttttatattgatttgtattacgaaaaatagattaattagtatttaactaaaaataaatgatttgagtaaacattaagaaccttttttatacgattttaggtaaataagattaatttgattaaaaatcgaatgaagacacgtccaaatttatgatatttgtttattagttcatttaatatgtttaatagatattttgtaaatgaagatctttgtttttattaagccatatgaatttaaaatttggataattaaatttaattttaaatagttaaaaatttgatataaaatttaagtcgaattgtaagatgatttatacaattgtggggtattctatattataattgattattatagaagacaacgactaagtgttacttataattttttaatttatttttatcacataattgggtagttttaaaaaaactcaaaacaaatttgataactgaaaatatttaaaaatatcgatgagaagtagttaccaaattttgaaataaacaaatatttttgaaggtagttgtgaacttgtgatctcgcaacaatcattacgagatccagtgtcgacgaacaaagactaactcaatctcttcaccccactgaatctcctcacctataatctccaggatggagaatagattagaaaaatattattcaagattttgtgcactatttaatactttggagattgatgatgtgattttgtattcgtggttcatataattttagtttttactttttcaccgattatgaaaattttaaaccaaaaactcacatatatgcgaatccttatctagttagacatatatattgtctaaagtaatattgtaaaccgcatatgtgttaattgcgatttaatattgttgtaaggaataagccatttgttagattggttattataattagtttccaattggctattaattcaggattttcactattaaataaatcatcttaaaatcttcttattttaatgctgattttcgaacatgttttttttttttctgtcaaataaaaataatttaaaatcaattacatggactcaaccgctcgaatcaaatggaccgagacaaaggcaacaaaagtgactttacggtctaaagaaacctctgaagcagaaagagtgtttcacttaccatctctatctccgtcgctgatgactgtatcttcttcaccactatgatcatcatcaaaactttgtctcatcgcatctttttccccaaattctcacaaaccttctcttctcaattccaccaaaccctcagattctcaatctccgatcgtcggaaattctcagcg

SEQ ID NO: 4849 - DNA, 3000 bp, Unknown
  misc_feature (1)..( 3000): cDNA_ID_1825858_gDNA_ID_1620736_Annot_ID_49488 3000 nt of promoter + ATG
aaaagtgtgaaggctgcacggattaggttttgggttatatcccaaattatctcatactaatatgagtttcagttgaacgggatttttatgtgagtcagtcttcgtctaactcaggtcattctcaatttatgggaggactctcgacaaaaccaataagaaaataaagtctcttactaaacttcaaaaaaaaataaaaattaggctccttttatattagaaagaattttaaaattgatgtttggactcatagcaaagacttatattgcatttgcatacccctagagaggagactggtctagttgaaacttggattgatatctcaacaaagcgttacattctaaaaaacttagttgtccaagtacttgtcatacatatgttagacacaaatcaatatgtccatggtttaaatacatcatcactattactctatataaggtttatttgcatttttttaataactttttaatacaaggaaggttttgttaccttacctacgatggcagaaaaacattgatcttttgagtttctctctaaaatcgaattctaggacgtaacatcgaaaaaaaaatagattattttataatatggagtaatatgattttatccattaaaataattaactgaaaagatgatatcaatttatccattcagctctaaaaaaaatattgaaaccaaacttattaatttctcaattatatagtatcaaaatatgtccaatagataaagtcgatctattactatgccaagctttccagatactagtttcgacaatgttcaattacgaaatagaacatgcattaggattttcatcactaaacatcatccatctagccatttctttctcatcatcactactagggttcatataaacacctctatcaatttcattttcttcatctttcgttataggttcatcgtcctttttttccttttccattttgactatccttttacgcattttttcctcaagttctttccacaatttctcttcatcaaaatcgccagtgatgacaacttttttgttttctacatcgaccttacatgttttgacccctattcatacaccattcaatataaatgattaaaataacacatatttcaaatatatatgaataatagtattatttttattatataccttcgaatttagaaataacttttccgatgtctgcctcatacttctcacttagaaatgctatatgtatttcaagttttcttgtactacaaaaaaaaaaaaaagagagttaaaacacatgtaccatctcaagaaagtacacttgaacaaatgtaataaaaattattaagttagaagtgatctaccttgtttcaggtttgtcaattttttcttctacttcaggagtctcatcttttttgtcgactatatcaccttcttcattcttctttgtaactgtctcttgttcattagcttcattttgaacaacatcttctttctcaactttctcattcatcgtcaagatttctgcctttttaccagtttttttcttgagatttttcaataatttttccaaattaaaattaccagtaaccataactttttgattttccatatctgttttacatgcttcaactcctagcaatcacatatcatttaaaatggttatcctcaataatatatatgatcagttcaaacaatataaatttccaaagctgtgtgataaatgttcacatcataatattatatttttgcatataaactccactaaacacacaaattttaaaaacaaagaatatataaaacaaaattttttaaaattttgcaactataatgtaaaacttgagatagtaaaaccatacatataattttatatagtgtcaattacaccaaaaatatgaaatataaatatggattcaaaaaaaataattctaagtataagtgttaagctattgtaccaactaccatgaatgagatcgatatagtgttatcataaatgtggactataatatacgtttaccttcaaatttggacatagcttttttgacatctttaacacaattttcacaatgcatccaaatcttcaactcgacttcaattgaattgctagaaaaattttcaaaatagaaaacacgtatatagtatcgtaagaacatagaaaacacataactcttatttaattaacaaaaaaaaacttatttcgtcactctacttttcaggaatatttcgtcgtgaccgctttgaccaacaacccatcgcgaacttattctaaataaaatatactacttgtttaagaatcttctcaccacaaaaccttttcagaaacctaacactttaaatagaaaataagagtacaaaattttagacatacaaccataatttgtttatatggaagttatatagagaatattttctttaaaacattagcacagatttttttttatcttaatacagatgtcaatatctaaacattatgtattatcttaactttttttttgtatatctaaacatttaatcacaatttagagaaataatcacctatggtactttattattttactattaaatcttaaattttctcatttaatttttcttttctactaatatatcttattatatttatttttattttaatggtgttcttttatatcattaaagacataaaatctgtgaaagtataagatatgtgttaaaataaactatatataggaaatggagaaacattaataacacataagattacaagttaattatcctttttcaataaacaacattttaaagtgtttttttccagtcatattattttagaaaatgtttacttaaatattaatatttttttctttattattgtttacttatgttaaaaaaaactccgatattaaaccgttaccgtaggtactaattctggataaaaagttaaaaaccaaaataaagtttgatttcaaattttgaatcttgtaacggccaaagcttcttcaataaacttctcctatattcttcttcttcttctctgtgtttctcaaactcacaaagctcaaacaaaaatg

SEQ ID NO: 4850 - DNA, 3000 bp, Unknown
  misc_feature (1)..( 3000): cDNA_ID_1825845_gDNA_ID_1620736_Annot_ID_49492 3000 nt of promoter + ATG
atatattgcgggcaggctgcgtacctaactaaacatacttacaatgtgtcaaatactttctacgactcaatccctggttagtttaactcaagtactatcatttcaaaataaaaatgaaaaaaatgacgtgcaataatgtgatataacacataatgctttttaacagatccgttatactggccaacatttgtggtagcggtggcagcatcaatcatcgcgagccaagctatgatatcgggcgccttttcagtcatctcgcaatctctacgtatgggttgtttccctcgagtgaaggtggttcacacctcggctaagtacgagggacaagtctatatcccggagatcaactacttgctcatgcttgcatgcatcgctgttacccttgcctttagaactactgagaagattggtcacgcttatgggatcgccgttgtaaccgtcatggtcatcacaaccttaatggtgactctcataatgttggttatctggaagaccaatatagtgtggattgctatcttcttggtcgtctttggctccatagagatgttatacctatcttcggtcatgtacaagtttacaagcggtgggtatttaccacttacgataacggtcgttttgatggcgatgatggcgatttggcaatatgttcatgtcctcaaataccggtacgagctgagggagaagatctctcgtgaaaatgctatacaaatggctacaagtcctgacgtaaaccgggttccagggattggtcttttctacacggagcttgttaacggtataactccattgttctctcactatatatcaaatctttcgtccgtccactcggtgtttgtattgatatcgatcaagacacttcccgtgaaccgagtgacgtcatcagagcggttctttttccgttacgtggggccaaaggattccgggatgtttaggtgtgttgtgagatatggttacaaggaagacattgaggagcctgatgagttcgagcgtcattttgtttattacttaaaggaattcattcatcacgagcacttcatgtctggaggaggaggggaggtggacgagacggacaaagaagaggaaccaaatgctgagacaacagttgtgccttcgtctaattatgtcccttcatcggggcggatcgggtccgcccattcatcttcgtcagacaagattaggtcgggaagggtcgtgcaggttcaatccgtggaggatcaaacagagttggtggagaaagcgagagagaaagggatggtttatctaatgggagagaccgagattacggcagagaaagagtcttctttgtttaagaagtttatagtgaaccatgcttacaatttcttgaagaagaattgtcgggaaggagacaaagcacttgcgattcctaggtcgaagcttctcaaggttggcatgacctatgagttataagattctctatttcgtctttgtgtttcatcatggtttaaaatcattgtgacctaaataaagtgtctccatgtttaggggacccttgtttttgtttgtttgttgtcataaatagttggtaaatgtgtaagtcattattacctttttttttgtgattgccagtttgtcgattttattgaaaaataaaagttacagaagcccatatttttaatgtaagagactaagagtatatggaacaaagatgtaggactggtttattgtttttttttttttttgtgtgcccatattttaatgtaagagtatatatatattttaataatattatgtgatattttcatccaatatttcactggtatctttttttttttaagtaacagctttaacatttgtcatttatctaaataaatatatattgtcatttaccaatgttttgtattgttttggttaattatgatggttttgttcttgccatttcgtgtggttcaagtgaaaacagcaacacacgcacttgtacgacagataatgccaacgttgtgaatctttgttagttactttagatattatactattcccacgttatattttttattttttcgaagggatttaattggtttcatagagcaactacaaagtatacaggattttcgaaatagaaatattgcataagcaaaatatggtcatatattgaagatttatagaagtatagaacaatagaagtgaaatatgatatgattatttaaaaattaaaatattacaaaagccatattttttaaatcggcctaggcctacacgaatctaaggacgacattgagatgaggtatctaaggacaaaaatttgtagacgttccaggttcaattctatttcgaacaaagtcgtgtgtgtgtggccactttaacttgagctttagactatatattttaccccagatgagtttgctaaaaaaaactcataccaaagagtcttctcatgaatctcatcactatattagtcgaattaccggcagcaataggtgtctatataggaaaaataattttatataatgtcttggtacacaagcttgttttttcttctgcatcattgttagttacttaggtattaggctaattagttccacgttgtaatattctaataaaaaaaatagctataaaacaaagaaagaaaaagaaagaaggcagtacaactaaaaaatcagtcactgaacaaaaaagaaaagacatgtttttgcttctgaagcctctcctttctctacacgatttatctcttaacctcctctcggtaatggtaagacatcgtctttctttctctatatctctcgctctctgttttttcattacaatgtatatataatatatttcttacaattttttttcactgggataactttttattcttttgtccaccattatgagaagttccatggagaaactcttaaagcatccgtggatggtgtggggataaacatgagcactatgtggagagaaacaaggaatgtattcatagttccattgttcaagtgtatagtggttatgtgtttgatcatctcgctcttagttttcgttgagagtgtttacatg

SEQ ID NO: 4851 - DNA, 3000 bp, Unknown
  misc_feature (1)..( 3000): cDNA_ID_2990835_gDNA_ID_1620736_Annot_ID_166275 3000 nt of promoter + ATG
cctaaactaccaatgaaccgcgacacgtcaacaaacgcgatttatgtctatagctattggaaacgcctaaatccaaaacttaaaaaaaaaaaaaacgattgatggagtcaacataccgaaggatggtggatacgtcttgatcgtaataagacataactatccaaaaagagacgatgcggatgacaatacgtccgacgcatataacacttgacgcaaagatcaaacgtgttgccacatgaagattcaaagcatgtgacacacgtgaagtatagaccattgagaatccggaggcatgtgcggcagttaatggtccgggtccgagccacgtagtaaagcgtcaagacctcccaaaagtcaagctgaccatctccatttcggtcgagctcccgaaacatctcgggatggatccaagctaaaccagcggtttgacgcaagaagtcggtgtattcttgaaggctgacacggccgtctccgttaacatccattgcccggaaaaactgccacgacaaattttgttgttccatggagccattgttgtaataagcaatcgcggcttcgtggagctcatccattatttgttgtagaattttgaaaagctaggaagggaatctatggtttctggtatatatatacatgtgtttgcgaatgttatgaagagaggagactttgtttaagtcgaatgtcaatgtctagttgtagtgttagtttagtgcgtaaatcacaactttttccatgtgatatacaagcctgtaaatagaaatccaagaaacagaacttaagattatatgtgtattaaattatataaccttgctgtatatttggtttcttctttataaaccgccattttccaacactacaaattacaaataaaatttcaacacatttgtttttatataactcaaatcgcacgttcgttcataggagttgtataaggattggacaatatgtgagaaggcttttatggacttctacagaaatatgcatatgacccaacaaacaattattcgcttccatctattctggtggttgctaacttggcatgacgtttttttttctccttattcacccttatccatttttttttttttttgctatgaatgttaatatcatatgatatgaacagtttggtttttacatggacctcaacctaataaaagctaaaaacaagaaatcaatagatttcagagttgggaaagtgtcaatcttcagtgcaccaaagactcataagcaccgtgaaccgcttgtttgatctttctggcattgattaaaattcttgatctatctttctggcattgattaaaattcttgatctctctatcaatttttttgaagataattgatggccaaatgagaatctggttgggtaggacgttttaacgctgcttccatatagcataaatcacaaattgggcaacaagcttcctctgagtgcgtggggacctgtttgttcttccttcttgtccaagaaacaacgcaaaccaagaaatcgatcgattgcatcgcaacaacttgaaatggtagctcataatcatgtgttgcattaaagaacgcttaaaaatattgtttatctaaagttacaccgcctagattaaaagatcctatataaattaatggcttttttttttgtacaaatgtaaatttcatcaaaaagaaaatgagaaagtatgtaatagttataaattagcttaaccagtaaaacattactcaccagaaaaacaaaaactagaaaccaggaaaaacttaggaaaatcatagagttaagcaaagttaatcaacgtcattaagttattatatataactacattctatataatctctgtttcgtcattgtacattttggtgactggaagtttttgtcacgtggtaaacaagaacgtattcgccaacctaaagactcaatcctctttgtctacaaattaaatacattatcacgaaaaaagctttatgtattataaccaaactactttattctctcaaaactattgcattggtgtgcaaatacgttttctcgagatgatatcatcaatcttaatatcaacttcaacttttaaagtaaagcaaacgtaaattaacacggtcgttctagctttgtagcatcgaaatagttttaaatgtcaaaaaaatgagcgaaataatttattcttaattatctttgccagatttttaaaaacctttaagcatatataattcaactaaaagaattttaactatttgtgactatctagacttgaagcaaaaagtcaaaaatgagtagacataactcaattcctgctgttgatccataactcaacaaatatgtgtttaacaatttttttttttggtcaaacaattctttcagtcgtaagctagaatattacaagatagatgagattaaagaaatagtcccaaatagcaagcaacaaaactaaaacattaacacaaacaaattctaaaatagagacacaaacttaacaaagcttgatacaatgaaacctcaatgaattaatactcgatatactaataccttaaaatattttttctagttctaaattaataatttaacctaaaaatatcacttctataaattaataattacgataatttaatgaaatttagtaaaccattaatctcaatattcttaatttatagaggttttactaaattgtagaaacaactaattcgagtacatccctgaattaataaattttagaaatgtgaattaacgaatacttttgttcttgtgaatggttaaaaaaagttacttatcaagacaagtatgaagtatcacgtgattaaacgtttaatgacaccaacctaatgacaatttgtttgatttatttgtcacctaactagagactctctcacagtcaacgcagcttatgtgtcatagtaagactttttgtctactatagtagaaagacgaatttataacccctttaggttttttctaacacacgcctctaatctccgcgcacacacacacaccctcacgaagaagaagaagacgaagaagaatcaatg

SEQ ID NO: 4852 - DNA, 3000 bp, Unknown
  misc_feature (1)..( 3000): cDNA_ID_3074356_gDNA_ID_1620736_Annot_ID_166273 3000 nt of promoter + ATG
attgacagagtatacatcggttcttgtactggtgggaagacagaggattttatggctgcagctaaacttttccacgcagcagtaagttccacttcttgtctgtatcttagtactcatgcttagctctgttgtacttgattttgcggaagaaactacaatcgtcaatcttgcaaaaggatctgttatcttgtattagtatatgatctgaagctaagacttcatcaaattgaaattgttccattcagtgatagttttctttattattttctatgtcatgcatagttatgtgttttgtttgtctggttgagtcagttttgctggcatgttgttgatattaggaaaaagttattgattctttctctaaggttcttttcttttctctatcaccacaatttgtttgcgttagtctcatgaaaatctacttgtgttttatcagggaagaaaggtcaaagttccaactttccttgtcccggctactcagaaggttagctctacatttcgacattgttactatctcaagtggtttaatcaaagaatacaaataccaaatgcattgtatctatctggtcatcttatcaggtgtggatggatgtgtatgctctcccggtacctggagcaggtggaaagacatgtgcgcagatctttgaagaagctggctgtgacacaccagccagccctagctgtggtgcttgccttggtggcccagcagacacctacgctcgcttgaatgaacctcaagtacgtacccattacttaccctacttatccaattatctgcacttcacctattcttgaaagtgagactaacaaagacgtgttttaaaatgtttgttacaggtgtgtgtctcaacgacaaacaggaacttccccggtcggatgggacacaaagaagggcaaatttacttagcgtctccttacactgctgcagcctcggctttaaccggccgtgtcgctgacccaagggagttcttgcagtaggctaatgtaatggcttcgtgtgaaaaatcatatgctatgcatcgacgaaatattgctaaatgatggggcattgtgaactatatgtatgtattttccttatttcgctgttggacttgatagtttcaagcactatgtcaaactttgatgttttgagtttgaaataataaaagagagaaaaagagtgagttagataagtcaaaagcttacattctaatatctccatgaccccattagtgatttgatcgcaaaagttaattattgaaaacttggtgaaattttgctatcgaagataaatcatgcggtatcttcctttctggtttgcaaaagctagatatgcgtcatataacattgttattcacttattctgaaaatttctaaaatatattataatcaaataatgtaagctagtaagtcaatatattcattctctatgaacttaaatactgttgtatacttgtatatagaagattagtacagttgaaacatttgtagagaaagggaatatatttggtataacaattcattgaactagcaaagctgacaaaagagaaatatacaagtttaattaacccttaataatgctaataaataaataaccctcaataatacgtatttgtttatatagataaattagagaggtaacaatacaattggtgaggagccattgactcgagaaaagagtcgatagagatgtttgaagagtgactatttgcaagagacaatagaatagacgatgcaaaacaatcgactcattagccgcaagtagaacaagattagctaattggtacaaaatcgacgaaacaagtctatcaatacaaagcgagtacaataaaaacccaaataatatatttttctcaaataaaattatatgatcttttgttatttttgttttttttcttttgtttaaaaaacataaaaaaatagagtattttacatcatttatttaatacgtaaaaatattggatatgtatgaaccctctcataaagcatacattattttattttaaattaagtaaaaactcactaatgcacacaatgacaaaaactcatctaattgtttgaatggtgacctaaatacggttgatgaaggtccagaaagaacccgcaccggtatgaccagcacatgtagccgttcacagacatatttgaatgtcttgaatttcaaatacttaaaccacatatccagactttgatggtccattctatgttttaactggtagaattttccaccaactcgtcatgttacccaatcgtcctgtatttgtttgagaatgttgtgtaattattttcaaaattcaaattatccgttatccacccttaccaatattgttttgtccagatatcttaaatagacaatcctatcgaaaacttatagtcaattgcagactaatgttttggaaatattcaggatacatttttatttttgagaaatactctaaaatatcaaactattaagtttttgtttcaaaagtaccatcattagtttactttgcccataataccaaacttttttgtataaaaatatttgttcaaccaaaatgaattacaattaaaagagagtttttacttcattttaatctaaatactgtagactaacctttagaattcttcaggatatctacttcataaatctattagttttgtaatcattctcagactatacgtcggaaaaaagattcggaagatgttctacgtactaaccaatgaatattcctactctttagctagttcattaatttcccaaaacatttagcattgaaattgtatgtagattgaatagtttaaaagtttcaacagccggcaatacgtgtttgagacgcgtccctaccacattaaaaaactctattccacaaacttgttgagttttttggttgtttgtttaaccacaagtcagcttactattacgcctataaaagccactggcaaaagaagagttaaaaacgcatctaattagcccatctctctcaattgtcacaatatcacaacacaaaaaaaaaaaaaaaaaaaacacagcaaaaaatg

SEQ ID NO: 4853 - DNA, 3000 bp, Unknown
  misc_feature (1)..( 3000): cDNA_ID_2051898_gDNA_ID_1620736_Annot_ID_166272 3000 nt of promoter + ATG
taaacacacacacatataaataattttattattaattcactaacacaattttgcaaacaataaatgtcgcagattagtttctcatgtgtcgcatatcctgctttagtaacgatatattgcgggcaggctgcgtacctaactaaacatacttacaatgtgtcaaatactttctacgactcaatccctggttagtttaactcaagtactatcatttcaaaataaaaatgaaaaaaatgacgtgcaataatgtgatataacacataatgctttttaacagatccgttatactggccaacatttgtggtagcggtggcagcatcaatcatcgcgagccaagctatgatatcgggcgccttttcagtcatctcgcaatctctacgtatgggttgtttccctcgagtgaaggtggttcacacctcggctaagtacgagggacaagtctatatcccggagatcaactacttgctcatgcttgcatgcatcgctgttacccttgcctttagaactactgagaagattggtcacgcttatgggatcgccgttgtaaccgtcatggtcatcacaaccttaatggtgactctcataatgttggttatctggaagaccaatatagtgtggattgctatcttcttggtcgtctttggctccatagagatgttatacctatcttcggtcatgtacaagtttacaagcggtgggtatttaccacttacgataacggtcgttttgatggcgatgatggcgatttggcaatatgttcatgtcctcaaataccggtacgagctgagggagaagatctctcgtgaaaatgctatacaaatggctacaagtcctgacgtaaaccgggttccagggattggtcttttctacacggagcttgttaacggtataactccattgttctctcactatatatcaaatctttcgtccgtccactcggtgtttgtattgatatcgatcaagacacttcccgtgaaccgagtgacgtcatcagagcggttctttttccgttacgtggggccaaaggattccgggatgtttaggtgtgttgtgagatatggttacaaggaagacattgaggagcctgatgagttcgagcgtcattttgtttattacttaaaggaattcattcatcacgagcacttcatgtctggaggaggaggggaggtggacgagacggacaaagaagaggaaccaaatgctgagacaacagttgtgccttcgtctaattatgtcccttcatcggggcggatcgggtccgcccattcatcttcgtcagacaagattaggtcgggaagggtcgtgcaggttcaatccgtggaggatcaaacagagttggtggagaaagcgagagagaaagggatggtttatctaatgggagagaccgagattacggcagagaaagagtcttctttgtttaagaagtttatagtgaaccatgcttacaatttcttgaagaagaattgtcgggaaggagacaaagcacttgcgattcctaggtcgaagcttctcaaggttggcatgacctatgagttataagattctctatttcgtctttgtgtttcatcatggtttaaaatcattgtgacctaaataaagtgtctccatgtttaggggacccttgtttttgtttgtttgttgtcataaatagttggtaaatgtgtaagtcattattacctttttttttgtgattgccagtttgtcgattttattgaaaaataaaagttacagaagcccatatttttaatgtaagagactaagagtatatggaacaaagatgtaggactggtttattgtttttttttttttttgtgtgcccatattttaatgtaagagtatatatatattttaataatattatgtgatattttcatccaatatttcactggtatctttttttttttaagtaacagctttaacatttgtcatttatctaaataaatatatattgtcatttaccaatgttttgtattgttttggttaattatgatggttttgttcttgccatttcgtgtggttcaagtgaaaacagcaacacacgcacttgtacgacagataatgccaacgttgtgaatctttgttagttactttagatattatactattcccacgttatattttttattttttcgaagggatttaattggtttcatagagcaactacaaagtatacaggattttcgaaatagaaatattgcataagcaaaatatggtcatatattgaagatttatagaagtatagaacaatagaagtgaaatatgatatgattatttaaaaattaaaatattacaaaagccatattttttaaatcggcctaggcctacacgaatctaaggacgacattgagatgaggtatctaaggacaaaaatttgtagacgttccaggttcaattctatttcgaacaaagtcgtgtgtgtgtggccactttaacttgagctttagactatatattttaccccagatgagtttgctaaaaaaaactcataccaaagagtcttctcatgaatctcatcactatattagtcgaattaccggcagcaataggtgtctatataggaaaaataattttatataatgtcttggtacacaagcttgttttttcttctgcatcattgttagttacttaggtattaggctaattagttccacgttgtaatattctaataaaaaaaatagctataaaacaaagaaagaaaaagaaagaaggcagtacaactaaaaaatcagtcactgaacaaaaaagaaaagacatgtttttgcttctgaagcctctcctttctctacacgatttatctcttaacctcctctcggtaatggtaagacatcgtctttctttctctatatctctcgctctctgttttttcattacaatgtatatataatatatttcttacaattttttttcactgggataactttttattcttttgtccaccattatgagaagttccatggagaaactcttaaagcatccgtggatggtgtggggataaacatg

SEQ ID NO: 4854 - DNA, 3000 bp, Unknown
  misc_feature (1)..( 3000): cDNA_ID_2051902_gDNA_ID_1620736_Annot_ID_166271 3000 nt of promoter + ATG
atctggatccacaagacatgctttctttggctttaatggtaaataaagcattacattaattaacaaaagattaaaaattcatattatgggattttatgtatatatgcaggaactgcgggagtatggagaatggtggcgatggaagaagctggaggatggaaggaccggacgacggtagaggacatggacttggccgttcgtgttggtcttctcggttggaaatttatcttcgtcaatgacctcgaggtaattttagtccttttcttttaatttgtaatttatatggatttcttgttgtataagttaacatataataaacaaattagtttcgatttctagtgtttcttttttggtaaaatgtaacggcaaaggctaaccacaaccatatattatgtgcatttgcatgtggctatctaaatacaaatgcttataatcattgtaaaacaagaataattgtggttgtaggttaaaagcgagctaccaagccaatttaaggcctttcgattccaacagcatcggtggtcttgtggtccagccaatcttattaggaaaatgacgatggaaattattcacaataaggtctttttaccatttactatatttcattttcagacacacatttcccacgtgccaactacatttttgtttggctcatccttagcgacaattttaagaggggcaagtttctaaccattggcaaccaaacaaaatacataacgacatttgtttttggctcatttatcaataactaccttgaaaaaaatcttataaatcacttataattaactcatattaatccagaattcaggttggttgaaccaagtgacattgaaattttattttatatctaaacgcacataagatgcgtatgatatatatatagtaaccataaactaattaaaaacttatgataagcagagagtgaagatttggaagaagttttacgtgatctacagcttctttttcctacggaagatcgtagtccacttcttcacttatttcttttactgtgtcattcttcctacaagtgtcttccttcccgaagtaaatataccgaactggtcaactatatatgttccttctgtcatcaccctcttgagtgccattgccactccaaggttagtactatacatcctataacgacctcatttattcactctatatattaccttacttacatttttactattattggcagatcattctacctcgtgattttttgggtcttattcgaaaatgtaatggctatgcaccggaccaagggaactttgattggcttatttgaaggaggaagagtcaatgaatgggttgtcacagagaaattaggagatactcttaacactaagctacttccccagaatggacgacttccgaaaaggtaaattaatcaaattaaacgaaagaaagaaaattgaaacatctttgacaaaaaaaaaaaaagtgaaaaaaaaaattgaaacatttgaaaagaaagaatatcaattacttaacataaaatttgacgtaatccggacttagaagactcaaactagttaatagcatttgttatttgttaaattttaaattcttaaaatgatatttgttttttaatctattttacattattcaaaatatatatttgtgattattcagtcatgtgttatgaacttctgatatagtgatatattcgcaatagactagcaaaactctttttttttttgtgtgtaaaaaggttagaatgagggataaataaaacaatatttctggatactaatgagtgaaagaaaatgttttgttgcagagtaaatttgaaggagatgatgatgggtatatacatattatgttgtgcttgctacgactttgcatttggaaatgcatttttatatttgtatctcttcatgcaagccactgcttttctcatctccggagttggctttgttggaacttaacacgacgacttatatgaaaatcttctatttgtaatcaagtatatgtgcaataaacatacccatgtgaatccatttgtttagcatgatgtaatttgatatgtataagtgctttgtccgaatacattatttgttagtccagatattattgttatgggtaggttgtttgacaacatatatttagttgtctgactcattatatgttgaggtgttgatatgcacaaaacaatggatttaagtctttgtatcacttaggggaaataggagaggaaaacttgccacatatgattactgatattgaagatcaaaaaaaacaaaacttaagaaaggttattgtttccttttttgatttatcagttttttgttttgtaaatctaactatttctctattttctaatcttctttacattttgagaatgataattaaacttaatcatgggtttctttactggtgctggccttcttttcaattatttctttggttttaatatcattctcagcgaatcatgtaggtttagggactaatggatattccctgtaaataaagtttccggatgactaatgtaaattattatttacttgggtgatcaccttgagtaattcagtttaagttttatggtcttcactcttaagctcaattcgtctctatattcatttactcttgtcttttatcatacactcataggtttaaggtcttgttttgaggatgatgtctttgtagacaagaagaagcagaatattgttaagacttatcacttacttaagactcttgtaaaactcttgaagtctccttaatttcacttttggaaaatggtgatgtgacaagctggagatacgacgtggcaaattggaaagctgatgtgtaatatttttgattggaataatattgtttttttggttaaaaataaaacctacctgtaaagtaagaaagcaaactaaaataaataaaaatagtcaattgcttccagttctaagaactccggtctgccgccgatttcgtttctctttcaccggttctcgcctaccgacgtcttccttccattctttctctcatctgataaccaacctccacatg

SEQ ID NO: 4855 - DNA, 3000 bp, Unknown; identical to SEQ ID NO: 4849
  misc_feature (1)..( 3000): cDNA_ID_1825858_gDNA_ID_1620736_Annot_ID_166266 3000 nt of promoter + ATG

SEQ ID NO: 4856 - DNA, 3000 bp, Unknown; identical to SEQ ID NO: 4848
  misc_feature (1)..( 3000): cDNA_ID_1375709_gDNA_ID_1620736_Annot_ID_166265 3000 nt of promoter + ATG

SEQ ID NO: 4857 - DNA, 3000 bp, Unknown; identical to SEQ ID NO: 4847
  misc_feature (1)..( 3000): cDNA_ID_2051917_gDNA_ID_1620736_Annot_ID_166264 3000 nt of promoter + ATG

SEQ ID NO: 4858 - DNA, 3000 bp, Unknown
  misc_feature (1)..( 3000): cDNA_ID_3074378_gDNA_ID_1620736_Annot_ID_166256 3000 nt of promoter + ATG
tctcaccacgactatcaatatgttatttgacacatctcgttcatcttaaccctcaaaccatgggttaagacatcatagtcatcatgacctatcacaatgacataatgatattagcataatgttacattttctcaattagtgtcaaaaccatatttaaatatatatacattcataatcgttgtatataatgtgtctaatataggaaaattagtaatattaaatatcatatataacgaaaatggaatttgtgaacaatatatatatgaaaatgatttcactggtcaattctcgtttttcattttctaactggcctattatttctccttaagaaggctaacatcatcatatatactatatgcatatacgtagtagagtcaatataaggtctgtatttttaacttcttatataactcatatttttttcatctagttggaacaccgtaaattttattctaaaataaaacaaaattcttacgggttcatttattaatcaaattgatacattttcttcccacacacatttttacagttagagtcatgtaagacttatcgattcctatgctagaaaaaaacgtgcgactataccaaattatatggagaaaaatatgtggtcaacttaaaaaagtattccctagtttagtggtgattaaatattaccaatactttagcaaaggatataatagtgctttataagtcattattaatagtataatagagtgatgccaaatcaattaacatacctactagataacgatgacaactcattttttattttattttcaattgaaacatgcattaacattagacagataaatgatatatttaacataatttacttaatgactcgaattgggaaatttttcttctaaaatacagattttaacatatagagtgatgttagatttagctctttaaaatcatcaacacgttggaaaacaaataagctattataccaatttatatggagactaatatcatgaacggtacttcgttatcactcgtgcccgtcaacagtgccattggatatatgatgtattacatatcatggtattatgtaaaatgatcgagatcaaatatcatggacattctataagtgcatcgaggtcagttagacttagtatcgtggagcatacttcttgaccaccttactgtcggctaaaatttatatgtaaatattctcttgatacctcataatgatgtgacgtacgattctatttatgatgttgcactgttatttgttagatacacagtcattattttcctttgatatggttgtgaattcctctaatatgattatgtttttcttatatgacttggtctgaggtaactgatttgaacaagctgctgttagatttatcaccaactttatagaagaaaagattctgccactatgagaaattggcaaataatatagagaaaaatgtagtcaatttaaaataattattcctttatgagtgcttacaaattaatgatattttggcaaaacaattattagtattttataagtcaatgtttattagcaaagtattgtaaagccacgtcaattaagattatctaaatcaagtagcatgttcattaccattagatggattaaaaatatatttaagtttattttgttgggttgtgcataacttccacttccaatattgttccattttaaaaagtataatatgcatatagtagaacatacatcacaattacctagagaaattgttcagaaatgaatatttattcaatacatttttaagaatatttcaacaggaaaacaaaaaaaattgcagtacgaatttcattggttaattagaaatatctccttttttgtcttcatctagaaggaatacctaaacttgatctgaaaataattattttttactttaattttaaaaaaaaattagaagtcaaactgaaaacatttgagtacaaagttttttatttagagtgatggtaaattttctcaagcaactatatcatagaagataatctgcggcttgtcagaaaaaataataataatctgccactatgccaaattaccgaattatatagagaaagaattagttagtattaagaaacttgttccttagataagtagtgcttacataatatcagtattggcagaaaaagagaattagtgacataatattaatattttttcaaaaagaatattagagttctaaaagtcattgtttaatagtatataaatcaattaacacgtgcattatcattagatagataaataatatatttaagcttgttttatgtggttatgcgtattatttcacttcgaacattgttccatttaaacgaaaatatgatatacatataagaaatacatcacaattacctaaggaaattttgggcatatttttaaaaactatttgttatttaatttttttttccaaaatttgtcatagacccttggtttttgcccatgctgccaccccctagagacgggcctggttctatggtataatagagagtaaacatttgatttatgcttcaaactccttctatttcctttcaaaaaggtaaacaatagctgatgtagttttacattcaactaaaaaaaaaaactacttcaagcgaaaaatattataacttggttttaaattttgttcatcgagcagtatgtggagggctcgtaggacgttggcttgattgttaagtgttgtgattgttggtcaaaaaaagatatagaaaaaaagtcttatcaaattagccaccagacgaaagtgaaatttacggtccgagaacatgcgtttaccacaaatggttgtagtcagggtgtcatatcataagaaccacaacatgaggatccatagtgatgtgaattgttgactttgcctggctacatggtttttttctgtctgaaaaaaaaaaggccaaggaaaaaacaaatgtatccaaaaccctataaattacaaagtagagaggaagaagaaatgcacaaatttcagaataacatatattcactaaatacttacatgagagattgaataagaa

SEQ ID NO: 4859 - DNA, 3000 bp, Unknown
  misc_feature (1)..( 3000): cDNA_ID_1825833_gDNA_ID_1620736_Annot_ID_166279 3000 nt of promoter + ATG
attctcaatactttcacatcatcattaaaccaggatgaccaatccggttaagccaaatatactcttgaaacttttaattcttttgaaacttctagttctttcaaaacttctaatttacttttcattgcttatcagttactcccttaatgagatcttataatccaaaattacttccatgtattttaataatcaatcatatgttaataaaacaataacgagataataattaaaattttatattctagtataaacgatattaaatttgactaactatgtaagatcttatattcacttcagaatatgagtattacttatcatagataactcatatgttttcttagcctttgaaaaacactcgatttaagtttataatagttctcaaaatttctttcaaaatattgtgtctacaagacaacaatacttgcgtaaaagttgaagtgtctgttttaccatctccgcatcaaagatattctcttaacaatgtgagttatattcacaaagagacttcaagtcttgaagttttagtaataactaattataacttattttatctaataacacattcgtataagaattgctttatacaacttttagatctttagtagtcaaagattgaacataatcttctggatatgtcacttattatccatgtgagattcattacttctcctcctcgaaatgatgaaacttcaagttcatccatctcgtattgaattccactctagaatcataatgtatttatatctcatcatattaactttgagatttggagaactataccgcatcgatgattttaattttgtattcccatagaaaacaatgtatatgctcttctagagtcttttaataagattttatactacttaaaaaactttgaccatcaaaaatatgatatcttcttaagatacattaaactagtcattcatgaaaatttctataagtgattatacctttaaattaagttatttatcaatcaatttatttcataaaataatcaagtattatatactaatacaattttaatgcaatattgtaaaaccaatcagaataaaactattttgtgcaaaattagggcaaaaccatgaacaattttttttttttatatattttttatttagatactacaaagatttagagaaaaaaatcttataaaaagaaaaattatcttgcaacgtttttagtaaaaataataataacacaatcaaatatatggaaatcttataaaaagatttagataataataacacaaagatttagatatatggaatcttataaaaagaaaaattatcttgcaacgtttttagtaaaaataataataacacaatcaaatatatggaaatcaaatatttaatatggaaaagtcaatatctaaaagtgataagatatgtataacgttttaatcaaaggagttaaataagggatatcatatcaatcataaatggattttagacaatataatatttataaaatgatattgaatatagatgcaactattcaaaactggaatgctaaaacattaatacatgcttgcatcacccaccaccgggctatgaatagttacaaaattagttatataattataaaattggtaatttatatattcaatattgtaatagtaaatcacaaaaattaacaattaacaagcatgattctcttctttaacgattttctttgtagaatcattgaatcatgcgatagtaattatagaaacaaatgataagcatgattctcttctttattgaatcattgaaaacatgcttttaccgatctatagtataatcatcgatcggttcatattgttttgtttcaataatagaaaataagtactatgaaccatgagtcgataagtaaacatggttcttaaaaaaaaatgtaagaatctctatatctaccttttagagcgtgctgataacgtgttataaacagagaaagagatagaggaaatgagtgtgttattccattgagataaagggttctttatataggagtacaaggaaagggtaaaaccctataaacatctagatgatgggcttaaatgatgggccttataacgggcatccatctttattcataacagatttatatgaaaaaggtaattttcttctcctttatagaacaaaagatagttcctaaattattatttttttatacatcctctattactaattaatttgatgtaaagacaataaaaaaaattaagctttgaaagtgctagctaatcacctccataatgattggttaagaattaactatgatggctttcaaatcatgcgttcaattggtcattttgaaatagaataaagattgagaagaatgtttgaattctttatctgtcaaaaaatgccaaacaaaaaactcccaatttgttttattgatttttcattttaattggtaactttgattgaattctcattttaattgctaactttatttacttttacaaaaataatcacttcgttaaattgactgacggaacaaataaacaaggttaactctctatttagaatttctgttaaaacaaaatttgcatgcagtttctgttttgtcaaatagtttcttcatcatctttcaaaacagtcaaaaaattataagaagtcagggaaattttttttaacagaaacacacaaaggccaaagccatagaaataattggtgattttgatatgttgttgttgtgttggaagttggtgacacctaaaattaaccaaaacaaaagtgacgtattcctcaaaaatagcaacactaaccaccaccacaacaattatcctttttttctaaacgtagaacacacaaaccggttaagtggctttaatttttcccaactgttttttcagagataaacatgaacacaaaccgtgacaacaaatcgtgagtttttgataccgtaatttatctgatcaaaagtaaaacaaacccataggaaaacaatgtatcaaaaatggtaatgatataagcaaagggaagaaacaataagaagaagaagaagaagaagaagggtatg

SEQ ID NO: 4860 - DNA, 3000 bp, Unknown; identical to SEQ ID NO: 4852
  misc_feature (1)..( 3000): cDNA_ID_1825841_gDNA_ID_1620736_Annot_ID_49493 3000 nt of promoter + ATG

SEQ ID NO: 4861 - DNA, 3000 bp, Unknown; identical to SEQ ID NO: 4851
  misc_feature (1)..( 3000): cDNA_ID_3100820_gDNA_ID_1620736_Annot_ID_49494 3000 nt of promoter + ATG

SEQ ID NO: 4862 - DNA, 3000 bp, Unknown; identical to SEQ ID NO: 4859
  misc_feature (1)..( 3000): cDNA_ID_1825833_gDNA_ID_1620736_Annot_ID_49496 3000 nt of promoter + ATG

SEQ ID NO: 4863 - DNA, 2327 bp, Unknown
  misc_feature (1)..( 2327): cDNA_ID_1825906_gDNA_ID_1620737_Annot_ID_49498 3000 nt of promoter + ATG
gatccaacaagctgcttcgatgctgatttaagtgagtacaaaaagaaggccacagtaatcgttgaggaatactttggcaccaatgatgttgtctctgttgttaatgaactaaaggagcttggaatggctgagtaccgttattattttgtcaagaagttagtctccatggctatggatagacatgacaaagagaaagaaatggctgcttttctcctctctaccctttatgccgacgtcattgatcccccagaagtttacagaggtttcaacaaactggtcgcttctgctgatgatttatctgttgatattcccgatgcagttgatgttcttgctgtctttgtggctcgggcaattgttgacgacattcttcctcctgcgtttctcaagaagcaaatgaaattgctgccagataactccaaaggtgttgaggttttgagaaaggctgagaagagctatctagcgactccgcttcatgctgaagttgttgagaagagatggggagggactgataattggactgctgaggatgtgaaagctagaattaacgacttgttgaaagagtatgtcatgagtggagacaaaaaagaagcttttagatgcatcaaaggattgaaagttcctttctttcatcatgagattgtcaaacgagcactgatcatggcaatggaaaggcgaaaagctcaagtcaggctgctagatctgttgaaagaaacgattgaggttggtctcataaactccactcaggtgacaaaagggtttagcagaatcattgattcaatcgaagatttgtctcttgacataccagacgcacgccgtattttacagtctttcatctctaaagcggcttctgaaggatggttatgtgcttcttctctgaaatcactctctgctgatgcaggagaaaagttacttgaaaactccagcgccaatgtttttaaagacaaggcgaagtcgatcatccgagagtatttcctttcaggtgacacttcagaggtcgtacattgtctagacaccgaattgaatgcatcttcgagtcagctacgcgcaatctttgtcaaatatctgataactctagcaatggacaggaagaaaagagagaaggagatggcttgtgtgctcgtctctactcttggtttccctcccaaagatgtcagaagcgcattctcgatgctcatagaatctgcagacgacactgctttggacaacccagtggttgttgaagaccttgccatgttcttagcaagagctgtggttgacgaggtgttagctccacgggatttggaagaagtgttaaatcagactcccgaggcaggctcaagtgtgggcgagaaagtgattcaaatggcgaaaacattgctgaaagcacgtctttccggtgaaaggatcttacgttgctggggaggaggaggaattgagacaaactcgccgggatccacagtgaaggaagtgaaagagaagatccagattcttctagaagagtatgtctctggtggagacctcagagaagctagtaggtgcgtaaaggaactaggaatgccgttttttcaccacgaagtagtgaagaagtcagtagtgaggatcatagaagagaaggagaacgaggaacggttatggaagctactaaaagtgtgttttgattcaggactagtgacgatatatcagatgactaaagggtttaaaagagttgatgaatcacttgaagatctgtctttggatgtccctgatgctgccaaaaagttttcaattgcgttgaaagaggcaagcttgaagggttcttggacgaatcattcgcttctgaggattcgcaaagtaagaaacagaacggctcgtcttcttcctctggatgataacatttgagcaccatacctcaaacctcgagacgttggtttcacgcaaaatcaccttttggagttttttttttttttttcttataaacaaactaaaaaagttttggatactttttgatgacgtttcttacagaaaacaaatttatctttatcttagtgacgttttgttatagcacattattactttatgacctgttttttttgttcctttgtcaatgattacattgtcttgctaatattttcatacagaaattttattttatattctatgatattatcctctcttaaaagctggacaaaccccacggaccacgagtcttccagctaagactttttttagttcccaaaagatcgaacttggcgctactttcattttctcatctctgtttttccaacatcctaagaacagagttcgttgctccttttgttttctttaaagaaaaagtcagattcagatacatacatactctgaagaacatg

SEQ ID NO: 4864 - DNA, 3000 bp, Unknown
  misc_feature (1)..( 3000): cDNA_ID_3074402_gDNA_ID_1620737_Annot_ID_166292 3000 nt of promoter + ATG
agtatccgaggctttggatgttctcaggctatctgttgatccaactgatcatgatcttggtttctctaccaccgactgaaatttgcaatgcgtttgctcaactctgttttcttcttttagttttgatatcgactccttttcttttcttttttgggttttagtcttcctttactattttagcagtttttttttgtttacttagtttatggtttttgtgtctttaacttagtttatggtgtttttctttttctttggacaatgatgatttcttaataatctgagtagacttcttcttccgaatccccaaataatccatctctacttgaaatttaagttgttcggtattcatggtcagcaacaagggacaatccttctattatggtagcagccttctattatgaatttattcgaatgtgtctactcataatttgtggtttgtatttcaacttgtagttgatatcaattatatgcacacagactttttctttttgaggggttggaagcaagcgattcaatgattgtaccactcatttcataatagtgtttgatatgacgttaatttgaatggtttatgttgatcgaaaatactctcagtcacaacaagaatctaattcgattaatttatttgaaaaacatatgttggcatggtacatgaaccagctcgttcatatgaaaatattttaaaaagtcaacatcagtgctaatttcaaattgaccatacattagcacacaagaagactaacaaaaaaaatgagtgaataaagaagagagtgagtggggttgatacatgtcaccgtccaaaatgtgtctgacccttctcattggagctacaagagccgaccctttgcctcatcatttgttgacttcactctccttttacatatttaaattataacttgctcatatttccattcattgtgttcggttctagattgttccatccactttcttttttctcttactttgaaatttagaaatatatgaatacttgacaaatatttgaatattgtaactgatttgtttgttcgtaatacttgacaaacttttttgaatatacacctttacatatattttgagttgagataaaaagggaattatgttagtttatggattatattatgtaaataccacatctaactatgatcggatgaaaactaaaccagcatatctctaatcagtaatatttactaaatttatatatcattaaagattttttgaatttagcaaaaaaagaagaagatatcattaaagatttttaaatttaaagtataacataatgaataaatcaagtgttgagcttagtttcgcgttgcaaagatgttcatttgatttttttttttttttttccatttgatttttcttatactaaattgattgatgtcacggtccttctgtgaaaaaagtatattgtactgtataaatttataatagtcatacttgaagataactaatatcattttctaaaggttttgttgacatgaaatgggtgaatgatgaacatctcgtttgctaaaccacaaaagaaataattcgttggactataacttaaacttataatatatcaactgaaatgcctacaatttgagaatacgccttttcaaaaagttttagaattttataaaaatttctccaccataatattactttaataaaagcttgttattaaaatgatatattaacaaaaaaaaaagaggtaggcaaagtagcttttattaaaattaatgttttccctaattggtaaatcataaaccaaaaaattgaggtaattcttaatatatttactatgattagaatgatacattaatgtaacattttatcatcttcattaataatagtaagttctcctcaaaattacaatttgatatcaaaaaatatatttgtattacaagcaattactgaaaaattaaaattacaatttagcccagttacataactccacgtaaggtttgagcccatcacatcacatggtacatgaccaaagcccagttatgttaccatggagtattcttcagacaagagccatccagacagaagtggaccacacaatcacgaatcgtatggagatcattacaatatattgctcacatcttattgcgccacgtctcttatttggcgagtgatcaacgtccacagatctcttgctccactctgattggtacacgtcatcattttattgtgctacttgtttatgtggtacagtagagacaagtggtaagattttaaaatatcttaaaagatgtgtgaggcccatttagatattttctcaacgggctgttcctcaaaagctgcccgtttatctacaaccatcgaacggctcgaaactattctgggctagctgcccgaaatctcttaaaggaatttgttgagtgggcttgaatcaacggtggataattcgaaggtgtacgtaacatctcgtagcatctgaacttagctcccctcaaaatatctgtggacatatgtcactagctttttttttgtgtaatgaaactattaattaattaggcaatcacatgagagatgttatatacttaaattaataactcaataatacaatcatgaccaccaaaccttgaaataaaataatctctctgattacttgtacaaattctttaccaatatatgccatactgtgaatgtaatggtttattttaaaacagccaaatattattgatataattatatgtttaagtagattttaaacttagctcatggttaaaaatagacagaattttggagtaaatctgagtttacaaaatttatttattaggattaaaattaattacttaaattggcaaacatttttcttggtgattgtaacatacaatatacgaatttgaattcgcattgtgattccaaaacaacactaacataaactaccagtaaaattttttaaaataaaatttcatatatatatgcttaaaaaatgtaacaaaaatatggtaaattttttaaccatggtatgggtggagatgtatgtgggatgatgatggttatatggta

SEQ ID NO: 4865 - DNA, 3000 bp, Unknown
  misc_feature (1)..( 3000): cDNA_ID_3074395_gDNA_ID_1620737_Annot_ID_166294 3000 nt of promoter + ATG
aacggaatgaatagtccgtcctatcgattcttcaacgccgcctcaatagactggaaagccgatatccaaaactgtttaaactgggaagctcacagcttgctctccacaactatgcctactcagtttctcgacactgcggctcgggaactcggctgtactatatccttgtcccaataacgagcacccacttttgtttttggtaaattttagttctctagacaaaacatttggacgtagaccaagaagaatatatatatagtttgttgtatgtaatgttgtaatgatgagtgactgacgcaatcactcccaccggcgttggatttgctctcgctcggtgtcttatataactcaacctcttctctgtacattttaaatgacgaagtagctcaatctttttttttgtgcgtctggtgtttagtcttcagtggattctaaatcgtaatgtatagaagtgaaaaatttacaaatttacttatttccgaatactcttaaaacagcaaaaattaatattgcaaaagataatttatagtattttaatctttttcctccaaaaaaaacattaaagggtaaattagtaattaactacaggagcttcatattaggttggaaaaccctaaatatgccgcttataacagacctgagcttaagctgtggtggcgcctccagagtctggtaaaagagcttaatcctcctctcgcgatctttctcggcatccaaaaatggtacgattatcgttcttcaactcttgtctggttctccaattgctcgtgcttcattttgcgtatcgctcgtttttcattgctggttttgggattggagttttaagctcaaatgttttttgtattcccttacacgatttgcgactgacggatctgttttttttttttcgtattcgtgtgtgtgtagtctctagttgcgaacgaggagtttcagcatattctgcgtgtgctcaatactaatgtcgatgggaagcaaaaaattatgtttgctttgacctcaatcaagggtattggaaggcgattggctaacattgtgtgcaagaaggctgatgttgacatgaacaagaggtttgtttcttagcttggttcttaatactttcagttacttaggaattctatggataaggattatgaatcttgcgaggttttggatgttagtagaaaatgtagctctttgactagaattgtacctgctcgatctggtttgattgatttctaggaaatcagatatttaggttttctttgcacatagaacttctctagattgatattcttgaagaagtttggtctagtgtgtgtttttaaatgttttttcctttgctggtatattcagggctggagaactaagtgctgctgagattgataacctcatgacaatcgttgctaaccctcgccagttcaagatcccagactggtttcttaacagacaaaaggattacaaggatgggaaatactcccaagttgtttccaatgctcttgacatgaagttgagagatgatcttgagcgtctcaagaagatcaggtaacaaacaacacatacagacactctcctctgtagtttttagataccatgttaatagtataatgatgcccatcataactttctatatggaagaagctaagtacacaactcttgtgttaaatcatgtatacactcattttcggcaacaaaacctaatctgtagtgtaatgatttactgatgcatcctttgtttctctcttgttgttctgataatcgatatagaactttgtttgtactgactgagattgtcactgtaatgtaaacagaaaccatcgtggtctgaggcactactggggtctccgtgtacgtggacagcacaccaaaaccaccggacgccgtggaaagactgttggtgtttccaagaagcgttaaaaagagtttgagcttggttcaatggctttgttttgttttttttgtattgttgttttttgcagaagagatagtttaagagatgttgtttcatcaaaagacggtcttagcttttacaatatataattgaatccaaaaactagtctctatttattacattctcttctctcaaaatctgctttaaacaaagttaataatagcacactcctccatacgcaagaattatataattagagaaaacttttaagtgtcacaagcggctgtctctataatgcgcaaatacatcgttatcagttttaatcactatcagtaactttactgaacttaattgatcattttaatttttcatgttactctctccttcttcttcacttgttctctttctcatcgcctcttgattcacgcgaacgagaaagcgacgatcgtaaccaccggcgctgaccaaaaagtaatcgattctcttcccgagctgatctctcaggtgcgtgaattcacttttttttttttcgatttttcccgagaaaaaaatccagcaaagagtagtagcgatgaagaagacgaggtttgaattgagattcgtattctttcggtggcttgaagtagcttatgcatgtttaaactcttgttcagttgtttgctcatgattcgaaaatggctttgtagatcttctaatataatctcttctctttatcaattcactagtgttctatatctgaagaaatttacggctacagatccaatctcatttcgtttcgttacactatctctactaagattttgttttttgttttttttccctctttttttgcgttttagatctcctccatgattgaagttgatccatgcttttgagtttaagtgatttatttaagatcctctaaacttttttttcttcacttagtggtggttccagtcaatttagcaagtaagatgttgtatgtgtcaatgctataactgtgaattttcagctattgtagtttgatttttgtctttgttagcttcaggtgtcttgaatctgaatctgtggctatatttggtgctcggtggtgagcaggaagggagggggatattgtcagggttttaatgtacgtcagatgaatagagcaacta

SEQ ID NO: 4866 - DNA, 3000 bp, Unknown
  misc_feature (1)..( 3000): cDNA_ID_1825902_gDNA_ID_1620737_Annot_ID_166289 3000 nt of promoter + ATG
cagaggtcgtacattgtctagacaccgaattgaatgcatcttcgagtcagctacgcgcaatctttgtcaaatatctgataactctagcaatggacaggaagaaaagagagaaggagatggcttgtgtgctcgtctctactcttggtttccctcccaaagatgtcagaagcgcattctcgatgctcatagaatctgcagacgacactgctttggacaacccagtggttgttgaagaccttgccatgttcttagcaagagctgtggttgacgaggtgttagctccacgggatttggaagaagtgttaaatcagactcccgaggcaggctcaagtgtgggcgagaaagtgattcaaatggcgaaaacattgctgaaagcacgtctttccggtgaaaggatcttacgttgctggggaggaggaggaattgagacaaactcgccgggatccacagtgaaggaagtgaaagagaagatccagattcttctagaagagtatgtctctggtggagacctcagagaagctagtaggtgcgtaaaggaactaggaatgccgttttttcaccacgaagtagtgaagaagtcagtagtgaggatcatagaagagaaggagaacgaggaacggttatggaagctactaaaagtgtgttttgattcaggactagtgacgatatatcagatgactaaagggtttaaaagagttgatgaatcacttgaagatctgtctttggatgtccctgatgctgccaaaaagttttcaattgcgttgaaagaggcaagcttgaagggttcttggacgaatcattcgcttctgaggattcgcaaagtaagaaacagaacggctcgtcttcttcctctggatgataacatttgagcaccatacctcaaacctcgagacgttggtttcacgcaaaatcaccttttggagttttttttttttttttcttataaacaaactaaaaaagttttggatactttttgatgacgtttcttacagaaaacaaatttatctttatcttagtgacgttttgttatagcacattattactttatgacctgttttttttgttcctttgtcaatgattacattgtcttgctaatattttcatacagaaattttattttatattctatgatattatcctctcttaaaagctggacaaaccccacggaccacgagtcttccagctaagactttttttagttcccaaaagatcgaacttggcgctactttcattttctcatctctgtttttccaacatcctaagaacagagttcgttgctccttttgttttctttaaagaaaaagtcagattcagatacatacatactctgaagaacatgtcgacgcgaagacgaactttactcaaagttataattcttggagacagcgggttagcttatttttctacctaactgtgttttttttttaatgtttgatccgttaatcattctcttgttgttgtttttgtgtacaaatatcacagggttggcaaaacatcgttgatgaatcagtatcctaactaaactttttgatttttctttctttggattttcttcttttcgtaattttgatttttgtagctgacggtgagaaaaaaaaaacttagctttttttttttttcaatttgtagatatgtgaataacaagtttagtcaacagtacaaagctacgatcggagctgattttgtcactaaggagcttcaaattgatgacaggcttgtcacattgcaagtgagtttttttgtttgtttttttttggtttaaattgttgtcgatcttttaagagaagagtgtatatgaattattattattattgtaattgtgttaagatatgggacactgctgggcaagagaggtttcaaagtcttggtgttgctttctatagaggtgcagattgttgtgttcttgtctatgatgtgaatcacttgaagtcatttgaatctctcgacaattggcacaacgagtttcttacacgggttttttttttttgctttctccatcacattttctcttcatccaaagattctttcttttagtgactgatagttgttttttgtggatttttgggccaggctagtccacgtgacccaatggcattcccttttatacttcttggtaataaggttgatattgatggaggaaatagccgagtggtaagttactattagtcttaagcttttaaatctgaatagtccatttcctttgtttgctatatatttcctttctttgtgttcaggtatctgagaagaaggctagagaatggtgtgctgaaaagggaaacatagtctatttcgagacatcggctaaagaagattacaatgtcgatgactccttcttgtgcatcacaaaacttgcccttgcaaatgaacgcgaccaagatatgtaagtgttattagtctttctttatgtgatcctctcactttgtgaatctcctccatatgatggatccttattaaactcaagatgaaaaaccagaatctctcaattcaaattttcatataatctttttttgcaactcggtgctacagatatttccagccagatactggttcggtgcctgagcaaagaggaggttgtgcttgctgaatgctgaagaaacatttcttactctcttgatttatgcattacttgttgtgtgtgtctataatcttaatgctgagaaggaccaataaaacttgtattgttccctaagtaaggttttgttacctttctggttcttcatctttgacatttggtggttcacgatttgtatgtaacaacagttcaagtgtacatgtaatgggttggttctgtcttctttatgtaatgggaaactaatgatgagtccggttcagccgcgctaaaccgaatccggttcggtttgaaatatcagttagcaatttggcggtgacgtggcgcttccttccccacttgtttcgctccttagaattcagttgaatctctcgaatcgtcgtcgtcaatcttttcgatttctcttcctctcgtctctctctctgttaaca

SEQ ID NO: 4867 - DNA, 3000 bp, Unknown; identical to SEQ ID NO: 4866
  misc_feature (1)..( 3000): cDNA_ID_1825902_gDNA_ID_1620737_Annot_ID_49499 3000 nt of promoter + ATG

SEQ ID NO: 4868 - DNA, 3000 bp, Unknown
  misc_feature (1)..( 3000): cDNA_ID_1825890_gDNA_ID_1620737_Annot_ID_49502 3000 nt of promoter + ATG
attttaaaaagtcaacatcagtgctaatttcaaattgaccatacattagcacacaagaagactaacaaaaaaaatgagtgaataaagaagagagtgagtggggttgatacatgtcaccgtccaaaatgtgtctgacccttctcattggagctacaagagccgaccctttgcctcatcatttgttgacttcactctccttttacatatttaaattataacttgctcatatttccattcattgtgttcggttctagattgttccatccactttcttttttctcttactttgaaatttagaaatatatgaatacttgacaaatatttgaatattgtaactgatttgtttgttcgtaatacttgacaaacttttttgaatatacacctttacatatattttgagttgagataaaaagggaattatgttagtttatggattatattatgtaaataccacatctaactatgatcggatgaaaactaaaccagcatatctctaatcagtaatatttactaaatttatatatcattaaagattttttgaatttagcaaaaaaagaagaagatatcattaaagatttttaaatttaaagtataacataatgaataaatcaagtgttgagcttagtttcgcgttgcaaagatgttcatttgatttttttttttttttttccatttgatttttcttatactaaattgattgatgtcacggtccttctgtgaaaaaagtatattgtactgtataaatttataatagtcatacttgaagataactaatatcattttctaaaggttttgttgacatgaaatgggtgaatgatgaacatctcgtttgctaaaccacaaaagaaataattcgttggactataacttaaacttataatatatcaactgaaatgcctacaatttgagaatacgccttttcaaaaagttttagaattttataaaaatttctccaccataatattactttaataaaagcttgttattaaaatgatatattaacaaaaaaaaaagaggtaggcaaagtagcttttattaaaattaatgttttccctaattggtaaatcataaaccaaaaaattgaggtaattcttaatatatttactatgattagaatgatacattaatgtaacattttatcatcttcattaataatagtaagttctcctcaaaattacaatttgatatcaaaaaatatatttgtattacaagcaattactgaaaaattaaaattacaatttagcccagttacataactccacgtaaggtttgagcccatcacatcacatggtacatgaccaaagcccagttatgttaccatggagtattcttcagacaagagccatccagacagaagtggaccacacaatcacgaatcgtatggagatcattacaatatattgctcacatcttattgcgccacgtctcttatttggcgagtgatcaacgtccacagatctcttgctccactctgattggtacacgtcatcattttattgtgctacttgtttatgtggtacagtagagacaagtggtaagattttaaaatatcttaaaagatgtgtgaggcccatttagatattttctcaacgggctgttcctcaaaagctgcccgtttatctacaaccatcgaacggctcgaaactattctgggctagctgcccgaaatctcttaaaggaatttgttgagtgggcttgaatcaacggtggataattcgaaggtgtacgtaacatctcgtagcatctgaacttagctcccctcaaaatatctgtggacatatgtcactagctttttttttgtgtaatgaaactattaattaattaggcaatcacatgagagatgttatatacttaaattaataactcaataatacaatcatgaccaccaaaccttgaaataaaataatctctctgattacttgtacaaattctttaccaatatatgccatactgtgaatgtaatggtttattttaaaacagccaaatattattgatataattatatgtttaagtagattttaaacttagctcatggttaaaaatagacagaattttggagtaaatctgagtttacaaaatttatttattaggattaaaattaattacttaaattggcaaacatttttcttggtgattgtaacatacaatatacgaatttgaattcgcattgtgattccaaaacaacactaacataaactaccagtaaaattttttaaaataaaatttcatatatatatgcttaaaaaatgtaacaaaaatatggtaaattttttaaccatggtatgggtggagatgtatgtgggatgatgatggttatatggtaatggcgcataaaggtggtggcaaaggcaaggaaatatcgatgacacgtaagcagacgggaaatcttaaaccgagtggagaagcctccaaatctcttttttctctctctctctcctaaggccaccacaatctcttcttctgtgtatgtattctttttttctccgatattcgtcgatctctcaaaaatatcctcaaagccaaaaaaaagcaagagtagagataaccaaccaacaaactcataggaagacatatttactttcaggtctttcttctactacctttttcgtggtttttggttgattgattctcagatgagattttttcccgaatcatttgatgtcttttttttttaaataagttcttggtaaatcactgtttctactagcattttttgttttctcagcttagatttgttgtttgatttgacatcttatctgattgagattttgttcttctgaattgttgttacagggtttagctgtttgattcagcttcgatttagtgtacagtgtgttgattagtataaaaaggatttaaaagaatctgggagatgtgtatagtgattgttcttgctggcgaatgttaacactacgtcgtattgattctcgattgatagtagaagaaaggtgttagttagattgttcgttcatctagttggggtttagtttcggttcctgg

SEQ ID NO: 4869 - DNA, 2327 bp, Unknown; identical to SEQ ID NO: 4863
  misc_feature (1)..( 2327): cDNA_ID_1825906_gDNA_ID_1620737_Annot_ID_166288 3000 nt of promoter + ATG

SEQ ID NO: 4870 - DNA, 3000 bp, Unknown
  misc_feature (1)..( 3000): cDNA_ID_1825936_gDNA_ID_1620738_Annot_ID_49505 3000 nt of promoter + ATG
tccaccacttctcagcgtccttgttctctctttcattttggactattgactgcttggtctcttgttctttttctttttcagccatcacctaagataaaattgtattttaaacaattaatttcatgaataatgaatgtgtaaagaaaatccgtgaatccatgactatgacttaaacaaaaattgaacccaccaaaattttcattcttaatttactttgttgaggaaataaatatgcaaaggaggtttaccatttcttttacaaatcaaaaacaaattgtgaaacacttatataataattttttatctaaattgaaaaataaaagagagaagaaataaagattagataatgccaaaacttaaaacttacctcagttaaagactcattgagcatttgaatacggagctttgtgcggctttcagcaaagtttgtgttgttgtgtcttataacacgccctaaagagtggtcaagtaacttgttaacatttggatgaccaaaagagtatgcttttcccgagggtgaaaacacgattatcgcaatttccgcgtcacataaggtgcaaagttcactgccttttttgaaaagaccagatcttctttttgaaaacgtaacttgaaggtttgattcgttggtcatttttaccaactctatttttctacgaccaagattctttctcgccattttcgagatgttttgaacagaaaaagaaaagcgagttgattatattagagataataggtatttgtatttatagactaaattttacaaaatatgttttgagcattgaaagaaaatatttttttctatagtgatttataagaaacaaaattatgaattaccactctaggagtatatattggtttacaaatttcgtcaataaaaggtatacaatattctattttatctccaacattatcattttttaaagtttacagcctgtcaattttttaaaatatgggaaggatatccacaattttcttaaaaaatattttccatgtgtttattttccactatttttctataatcaatatcctttttgatcttttatatttattttaagtgttcaaattttttatataaaattcatatagtgtatatatgaaatattatgtccaacttacttttgtttttatagagcaaattgacaaaataatatgattgaaagttgataaatgacatgattgaaattttatgtccgactttccaagattttatttaagtaaatagttgttttgatattttaattgatcgctgacttttcaaaaaaaaagttgtgataattaaattagatttaatatgtgatacacaatttgttatatcatctctgaatatagtatacttttacacaatttgttttgggccgtgattaatatagcccatgatcgttacctaatgggctatgtttctctgcctctaattgcttgttatacatgatgatgatatattgataatctataacctatatacctctcctgaaaaacgaatttttaaaaatgtatacacttctcatgtttcttgttatatctttttccttcttgttacaatttatcggtgggaatcaaatctgattgggttcctttttttggtcggtaatggtattcaatagtcaagtatgtaaaagattctagcatatagattacaagtcttaagcccaacaaggaaccaaactaaaactgattagggaaaactaagtaagattctataagctagagtttgtacaaaaacaaattctagcccaggtaatgaaatatccaaatgcaaaagacaacatttattagctcagaatctacttttaaaaaagcccaaataccacatatcataagcttgcacttccaaacgactctaaagtctaaagtctaaaccaaccatcgccgctgatcattgacttattggcatactacaaaatttacttgtttggagcaataatgggttttctcttttagccccacctaaaccctttttaggaggaaacctagattatacgtggccacactaaatattattctctcattaattgctctacttttaagagccaaccaaactttttgaagacacaaatattatgaaatagtaatacatttgacctccgaagtttcaacgaatgatctacacaatccatcgtgtcaaagatacaatttttttatccaccattaaaactgtaacaatacaacattactcataacattgactttcaggataatcaggctcttcatcaccttgacttgcagtttcagtctttttatctacttactgcatatatgatatgagaaatccgatttgtgtgttaatgtgacataaacaaaaaaaaatgttcttcctatatatataacaaatattttttatgaacaaaccaataataatgtgtatcagaagcaaacaaatgattttttggtgcactcatgttcccataacaaaagtgattagtttctcataaagtaaactcaataattattccatgagtatgtttatatccatataaaatttgcaattaaataatcaaacgtcaaggttcaattatagtcaaaacaagaacgaaaaacctaaccaatgtgtaatccacagattggttaattgcactgaaccgtaccttatcataccaccccaacggctatcgacatcgatttattaccaaaaaactcctcaaaactatataaaagactctactatcttccactttccataaaagggtaaaatagacatttcgggtaaccttctctcaccgtcaccacacatgcaattacactcagacaggaactcaaaaagacagctcattcaattacatcaacacagatcactccaaagcctttctctttaaattcgttatcgttttttttattttatcaatttaatctttttatttgttttgttcttcctcgattcaacactcgatgctgtgacaaagcccagattttggccggaaagttttgtgtgtttccggcgaagaatgcgaagaaaccggaagaatctgtaacggaatctaagctaaaagttaaagtacgatg

SEQ ID NO: 4871 - DNA, 3000 bp, Unknown
  misc_feature (1)..( 3000): cDNA_ID_1825928_gDNA_ID_1620738_Annot_ID_49508 3000 nt of promoter + ATG
taagtgacataaaatcaactaagtaaacctccgacacggatcttgagttgcggacatacacatgaattgcaaaatctttatttcagctaaacgttaattaaatattgatgtcagattaatcttatatatgaatgttactttatgattatattcgcctacctaattaagtaattagaaagtgaaatgacaagccccaatcttttcggtgttaacaaaaagaggatgaagaagaaaacattatagccggcctataaatatatatccaaagttagtccaatttctccgacaagatctaaaatcgaacggtgaggaatcctccaaggataaaagttcaacagctgataaattttctcttaaaccattgagaaaaagaacatctactaaagaatgtaatagctatgattaaaattaataatttccgtacggtcaatgacccgaatgagtaaaatgatgttgctttctgaatcattatttactaagatctaaatgtggtctgctttttacaattatacaaaactatatatatccataacttttttgcaaagaaccatatgtagttgacgaaaaaaaaaagtggtctaacatgatttgtagcaattgagctgagtccatatgatttaagcccatttaacggactgtgtggaattgatggcccagttattaaaccttttttgtttgtgtggaaaaagccaaaaaaaactgtcacacgtgcgaatctcacaggtgaggagggtattttatcctgtcggtttcttcttctttgacccctccgtaattacctcgtcttcaatcaaattataattttttgacctttttttaccttcgaaaatatctgaaaccctcaaaaacctaaacacaacaaacaaacaaacaaacaaaaaagttcctgttcgattcctcctctcattcattctctgcttgttcctcaaatccttcaattttctcatcaaatccagatttgcgaatttaggttttcttgaatctaatcgttctcgatgatttcgaaagatcaccttcatcatctggatcctctgggtacaaccaaatcgtaccacatgaatacctccaccgtatcgccgccgtctccggcatcatcaatttcgttgtcgcaatcggcgtggctggaggttcgtttgttctacgtccgtatcgctccttgcgtcgttgagaacgtccctgacttcctcaccctccgtcaccctcgtcgcgaaaccggtgcttctcttgaggttaacggcgttcgcgttccttcgtcgcagacggcgtcgcttaaactccgccgtgacagagtcgaccgggaatcgtcggaggtgacttacgtgagcactgagaccgttcgcgttaccggatgcgttgatttcgaggtttatgataacgaggatatggtcttgtgtgggaacctagatagaatcgaaggtgcttggaacaatggaactgtgagtgatcccaagactggatggggcatggattgttacattgctatgggaaacggacacgtgtcaggtccttctgcctctgtgtttttccagccaaagtttggagtctcgtctccgtccgtcgaggtttatatagctggttgttgtggtggtgtcccggtgatattgaccaagacgattcaggcgagtccgaggaggaaggtggctaggcacgtgacactcgacgctatccctgaggatgaggaagttggcaaagagcaagacattggtaccattggtgatgaattggcccgtcaaagcaaagtacaggtatgattctgatttcacaattctctgtttggtgattgtccaagcccttaagttacgattcttaataacttgggattgagatttgaaaaggttgcttctttcgtctagttttgtgagttatgaatgctgtagcagatatttagttattaagatcactcgcaagtttctggtgaatttagctcctgcttgaatgttttctttgactctacagctgaatttgaaaattgtagaattgttgactgatcagaaattgagatatggatataggtcaatagactctctttgcactttttttggtgctttatcttgtttgtcgtttcgtttatgcagatgatggaatcagaagttgatgaatacgatgactcagatatgaaaatggcacagagatattaccctgaaggaatgtacgttgatgaggatggtcagctctcatggttcaatgcaggagtcagagtcggagttgggataggccttgggatgtgtcttggtgtaggcattggagttggattactcatgcgttcgtatcaagcaacaactagtaaccttcgtaggaggtttctctgatcatcacctaccataaactaaaaacccacttagacatttcgagatctactaagaatgtcggtaacgtagtgggttataaaagagatagaattttggtagatagatgtatagagcttttggttttcacctgtttgtgtccttttgaatatatatatatattcggctctgttcatatactttagtagcacaaaagagagttcccatcttgctccagtcatgttcttttgttctttcttttctcaagtctgtctatgtcgttgctcttgtgtagaaagagatttcgtgttattgttgttgttgtcaaacgctggagtttgtctttcggtttctggtcaggaaataatgtggaatagggaatgtacatgtttcacctgtattcagtatctgtttgcaattagtaaattaaattattacaacaagccaagtggaagacggcgtcgtttatcataaatgtcaaaccgatgacgtcttatcgggggagcatgagcattggactaaaaaattattgtcaatttgtttaaattgtattttgggccctgaaaattattataaatgaaatttagccccttaattttgtaagagtttacaacattgaaccctaaatcattatgttcccaaaatcaaaatttcactcctcgagagtagcgagaagaaggaggagatgagcaagatccgttcgtctgcgacaatg

SEQ ID NO: 4872 - DNA, 3000 bp, Unknown
  misc_feature (1)..( 3000): cDNA_ID_3098557_gDNA_ID_1620738_Annot_ID_166312 3000 nt of promoter + ATG
gcttcaaagagaagaacactaaatggaagatactagaacagcccttaagggagcttctatgggtggttagagaaggagaggcttatgttagaatgtctttagagcctaaacttgggttttgggctaaggctattgtgttgcatagcaatagagattgcacagagcttcacatacataacttgctctcttgtctaccgatcatcgtcgaggctattgagacagcgagtgaggtttcagggtgggatgaagaagagatgagcaagaagaggttggtgcattctaacaagtatatgaagcaatggaatgactctcagatgtttacctggaagtttgggagagagtatttggtgaccgaggatttctgcaaccggttcgagagtgcttggacagaggaccgttggattctgatcaaggagcttcaggagaaaaagcagtccggttcgagcaaacatgaacggaagatggctgatttccttttgaagcatttgggagatggaaatgagagccccaagctatttccttcttctcttctggataacacaaaagattaccaagtgaaaaaaagattagggaatggaagtcagtacaaggagattacctggttaggcgagagctttgcgcttaggcatttctttggggatattgatgctttgcttcctcagattactccattgctatctctttcacacccaaacattgtatattacctctgcggattcacggatgaggagaagaaagagtgtttcttggtcatggaactgatgaggaaaacccttggaatgcacatcaaagaggtatgtggtcctaggaagaagaacactctctccctcccggtcgcggttgatctgatgcttcagatagctttgggtatggaatatcttcactcgaagagaatataccacggagagttgaatccatcaaacattcttgtcaaaccaagaagtaaccaatccggagatgggtatctgcttgggaagatttttgggttcgggttgaattctgtcaagggattctctagtaaaagtgcttctttgacgagtcagaatgagaattttccattcatatggtattctccagaagttctagaggagcaagaacagagtggaactgcaggaagccttaagtatagtgataaatctgacgtgtatagctttgggatggttagctttgagcttctgacaggtaaagtaccatttgaagatagccacctgcaaggagataagatgagtagaaacattagggccggggagagaccgctttttccatttaattcaccaaagttcataacaaacctgacaaaacgatgctggcatgctgatcccaatcagcgtccaactttctcatcgataagcagaattctccggtatatcaaacggtttctagctttgaacccggaatgttacagtagtagccaacaagacccgtccattgcgcctactgtggattactgcgagatcgagacaaagctattgcagaagctttcttgggaatctacagagctaaccaaagtttcacaggttccttttcaaatgtttgcatatagggttgtggaacgggcaaaaacgtgtgaaaaggataatctccgggaaccatcggaatcaggaagtgaatgggcttcgtgtagcgaggatgagggtggggcaggatcagatgagcagttgtcatatgccaaggaaagaagattgtcatgctcctcaaatgatgttggtatgagcaagaagcaggtttcaaatcttctgaaaagagcttctagcctgaaaccaattcaaaaaccaggtgagattatcatcagccaatatatatatatatatataggctccctaacaaatatgaacttggttacttgtactaatttttttgttttgtgtcactagcctttggattctgttcagggacaactccgagaggacgatcaaggcatccgccactaagcccttgtggtgggcaaagcatgagagcaaactctgagagtcagctgatattgataagcccaaggatacgacgatcaaactctggacatgcctctgactctgagctttcctagtctgcagggaaaaagaataggttcataatagcaagttcaaaatgctgtacaagtcaaaagacatactaactcgtatgtggtgacacacactccactacatatctatcgaaaacgataaaattcttctttattcaaagtttcctacagatactactaggctcgtatattgttcaggctagtgactgattgattcagtagctactagctacaatattatcttaaaggaaacaaatcatatgaggcaaaattatgtgcctagactgtagaggctcaacgctgaagtgaagtaaactaggcctgctccactatttctacaatctatcaaacaccatcaaattacactaatcaaattttgggcttcgaatgtggataaaaacatcaaaaataaggaaccttgactaatctgcctgaaaattaccttaacaaaaaaggggaacagcgattccgccggggactagagacatggcgtggttcggagctttggctctgtctctcgtcaatttcaatatctccgccaccgccgactccgtcacatccatcctccgacgcttttattatgtcattgattgtgatatgaccaaaaagtccccactctagttttagatgaatgaagctatgatttcttttttttttttggtgataagtacgttattatgattttaataccaacagatttgtcaaatataacattataagcaagtggagtaaacaaactaagcagctgatttgtacaaaaaatactttacagctataacatttgtcattgtcaccctaatataaaatacaattccaacaactaaaatacatctctaaactttttaaagatgatgatgatgaaaagaattcaagttatgagcacgtctgggaacatggcacaccatctattttgacaagataatattatacaatacatgtataaaatacgtacacattcatcgttataaactaaacccacc

SEQ ID NO: 4873 - DNA, 3000 bp, Unknown
  misc_feature (1)..( 3000): cDNA_ID_1840058_gDNA_ID_1620738_Annot_ID_166308 3000 nt of promoter + ATG
ttttttttttttgggggtatcgatattgatcttatgacaagtttttgtggtgtgtactaattaacgtatgagttatttgcttttatataggagttgaaacagaaaccttgaggagaccaaataaagttgatgtggggtccaaaataaaaggagttaggatttgatgaaacaagtgaaaagtaacaagcgaaccaaggaaaaaatctccatccaaaacaatatttcaaaacgtacttttgttacgattgaattaccatttgggaagggaatttctaattaaaaaaaaaaaaaaaaaattaagatggttgtgttttgctagcatcaatctcccttgtattaaacatatcgtatccgaatttggtagattaagatgaataaattggtcttactccaatagtttcgcattgatttccgtttcagtattaaaatccattgggatttattggtggaaacgggaaaatcatgtgtattttatttgaacccaaggctatttctaagcaacttcttatgaaaaatgttgaccttaaactacttagtcatgcaaaaaaaaaaagaaggttggggatgtggagaatattatttgattgaattcaaataaaaaggaagaaagttatgagataaaatgtatcagattattcaaaagaatagaccaatttgcaacattgtaatttggtttaataaaacatttggtatgttgtagtctgcacatgtataaacgtacgtcctccacataattccaaaatttgactggcgttaagaaatatctaatctagtcattgataaactactactgaatattcatttgagtgttgaggaatttgatttcaaaatttccgtcttacgaaaaataaattttttgtttgtataaccacaacaattgttagtagatcatatatgaattgtaatgaaaaattatattagtgactagtgagagttagttatttatatcttgatttttttttgtagttggtgggtttggactctttggtcaagtcaatcacatgctctacgtgattttacttgcagttcacgccggaaactctcacgcgtcgaccacgtgactagacctagttcataatttttatcgtctgaatgtcaaaaactcaaatcctcctttttataaccgttttctttgaaaacaaggtattttcttaatcttgtttcatgtcttaagactaaagatattaaaatctgattttggctctacttatactaatgtcgtattacaataactaaagtctcaaacaatattctttaagcacgcattgctggaaaaattaattacaggggggacataagatctcaataatatagactgaagatatcaacttttggctatttggagtcgttacatctacactttcaaacaaaaccaacgaacccattgttttttgggatcctacgaatcccttgtgtaaacaataattaaagacagtcctaaactaatattctcttatcaagtttggaaacattgtagctttgtgaatatattattttgtctaagaagaactttttgtttgtaaatagtttttttttttggatgtgtttctcatgaaatgcaggtaagaaacatctaatgaattagaaatagattatgaataaaagaaaataatttgtaaaagaaacaccgaacaaggagttcgtattcgtatactaattggcccgccaactaccaacaccgacatatgtgctttcggcagttttgatatcattccaaaatttcaattattatttatcaaatttattttcttggtaaaagtttaattaatttcaattatttgaatgtcttaattcactgattacaaattatatatgtaatatatacataacaatttcgttcgtggagtgttattatactccttaagcgaatctgtatattttaaataaaattttgatttatgcacacgtacatgttcaattgaaacgttttccctaactatagatgccaataaataataagttgatttttaaaatgtacaaaacaaaaggtaccgttttgtaaaattttgcaaccaaaaagtacaatcggccgttgaaaatcgtggaaccaaacactaattaaagagaagtgtgaatataatctagtgtttgcggatttatattataaaatttgtgtatcactaaaatgtcaaagcatgctttgactggtcaataagtcaaattaactaacaaaccatgcgaggcgtaggtttgacttcttaacataaatgctgactcagtttttccattccgcagctgtcgactaattggacacgcttcttccaatccctttccactaatcatccatcaacacgtgacatgcctacagtgcacgacttcacagtgatcatgtcaaagttttgtttttaagagaagaagattcacgacttcacagtgatcatagtccagttacaaatttgaatgggcttatggcctgtggcccatttaagtttgaccttaatatccatcagaaacccataccaatacgggtcataagtgcattgtccatatagtgtaccgcaatgcatgggagtactactacattccaccgacgtgcatatggggggacatggtcggtccattaatcccttgcgcatcttattccttacgcgaatacttttccctcttttagttttgtataatactttccatttttttggtattaaatttatcgtgtgactatctaaaaaggtatttaattatctagtttagctataactgcaaacaaaatatctattttcatgaatgatatatttttgaaataaaatattgttgtcatgtaacgaaaaaatcaaaaatcaagcagaagacacgtataacccacgctttcactctcactcgtggaaaaccctcacacgtacacaaaccattataaaatttaatccatttacatcgaccgacttcataagaacatcgtaatcccatccgtttatatatatattccaagttaaacttcatatcatacacacaaacctaaaacaccgaaacaaaaacaaagagatttaaacaagaagagttatt

SEQ ID NO: 4874 - DNA, 3000 bp, Unknown
  misc_feature (1)..( 3000): cDNA_ID_1825917_gDNA_ID_1620738_Annot_ID_166307 3000 nt of promoter + ATG
ggtgttttaggtttgtgtgtatgatatgaagtttaacttggaatatatatataaacggatgggattacgatgttcttatgaagtcggtcgatgtaaatggattaaattttataatggtttgtgtacgtgtgagggttttccacgagtgagagtgaaagcgtgggttatacgtgtcttctgcttgatttttgattttttcgttacatgacaacaatattttatttcaaaaatatatcattcatgaaaatagatattttgtttgcagttatagctaaactagataattaaatacctttttagatagtcacacgataaatttaataccaaaaaaatggaaagtattatacaaaactaaaagagggaaaagtattcgcgtaaggaataagatgcgcaagggattaatggaccgaccatgtccccccatatgcacgtcggtggaatgtagtagtactcccatgcattgcggtacactatatggacaatgcacttatgacccgtattggtatgggtttctgatggatattaaggtcaaacttaaatgggccacaggccataagcccattcaaatttgtaactggactatgatcactgtgaagtcgtgaatcttcttctcttaaaaacaaaactttgacatgatcactgtgaagtcgtgcactgtaggcatgtcacgtgttgatggatgattagtggaaagggattggaagaagcgtgtccaattagtcgacagctgcggaatggaaaaactgagtcagcatttatgttaagaagtcaaacctacgcctcgcatggtttgttagttaatttgacttattgaccagtcaaagcatgctttgacattttagtgatacacaaattttataatataaatccgcaaacactagattatattcacacttctctttaattagtgtttggttccacgattttcaacggccgattgtactttttggttgcaaaattttacaaaacggtaccttttgttttgtacattttaaaaatcaacttattatttattggcatctatagttagggaaaacgtttcaattgaacatgtacgtgtgcataaatcaaaattttatttaaaatatacagattcgcttaaggagtataataacactccacgaacgaaattgttatgtatatattacatatataatttgtaatcagtgaattaagacattcaaataattgaaattaattaaacttttaccaagaaaataaatttgataaataataattgaaattttggaatgatatcaaaactgccgaaagcacatatgtcggtgttggtagttggcgggccaattagtatacgaatacgaactccttgttcggtgtttcttttacaaattattttcttttattcataatctatttctaattcattagatgtttcttacctgcatttcatgagaaacacatccaaaaaaaaaaactatttacaaacaaaaagttcttcttagacaaaataatatattcacaaagctacaatgtttccaaacttgataagagaatattagtttaggactgtctttaattattgtttacacaagggattcgtaggatcccaaaaaacaatgggttcgttggttttgtttgaaagtgtagatgtaacgactccaaatagccaaaagttgatatcttcagtctatattattgagatcttatgtcccccctgtaattaatttttccagcaatgcgtgcttaaagaatattgtttgagactttagttattgtaatacgacattagtataagtagagccaaaatcagattttaatatctttagtcttaagacatgaaacaagattaagaaaataccttgttttcaaagaaaacggttataaaaaggaggatttgagtttttgacattcagacgataaaaattatgaactaggtctagtcacgtggtcgacgcgtgagagtttccggcgtgaactgcaagtaaaatcacgtagagcatgtgattgacttgaccaaagagtccaaacccaccaactacaaaaaaaaatcaagatataaataactaactctcactagtcactaatataatttttcattacaattcatatatgatctactaacaattgttgtggttatacaaacaaaaaatttatttttcgtaagacggaaattttgaaatcaaattcctcaacactcaaatgaatattcagtagtagtttatcaatgactagattagatatttcttaacgccagtcaaattttggaattatgtggaggacgtacgtttatacatgtgcagactacaacataccaaatgttttattaaaccaaattacaatgttgcaaattggtctattcttttgaataatctgatacattttatctcataactttcttcctttttatttgaattcaatcaaataatattctccacatccccaaccttctttttttttttgcatgactaagtagtttaaggtcaacatttttcataagaagttgcttagaaatagccttgggttcaaataaaatacacatgattttcccgtttccaccaataaatcccaatggattttaatactgaaacggaaatcaatgcgaaactattggagtaagaccaatttattcatcttaatctaccaaattcggatacgatatgtttaatacaagggagattgatgctagcaaaacacaaccatcttaattttttttttttttttttaattagaaattcccttcccaaatggtaattcaatcgtaacaaaagtacgttttgaaatattgttttggatggagattttttccttggttcgcttgttacttttcacttgtttcatcaaatcctaactccttttattttggaccccacatcaactttatttggtctcctcaaggtttctgtttcaactcctatataaaagcaaataactcatacgttaattagtacacaccacaaaaacttgtcataagatcaatatcgatacccccaaaaaaaaaaaaaaacagctacaaagaagtgagaattgacacagcaaatg

SEQ ID NO: 4875 - DNA, 3000 bp, Unknown; identical to SEQ ID NO: 4870
  misc_feature (1)..( 3000): cDNA_ID_1825936_gDNA_ID_1620738_Annot_ID_166299 3000 nt of promoter + ATG

SEQ ID NO: 4876 - DNA, 3000 bp, Unknown
  misc_feature (1)..( 3000): cDNA_ID_1825928_gDNA_ID_1620738_Annot_ID_49509 3000 nt of promoter + ATG
gatcaatatcatgctacgtggtgcaattaagtgacataaaatcaactaagtaaacctccgacacggatcttgagttgcggacatacacatgaattgcaaaatctttatttcagctaaacgttaattaaatattgatgtcagattaatcttatatatgaatgttactttatgattatattcgcctacctaattaagtaattagaaagtgaaatgacaagccccaatcttttcggtgttaacaaaaagaggatgaagaagaaaacattatagccggcctataaatatatatccaaagttagtccaatttctccgacaagatctaaaatcgaacggtgaggaatcctccaaggataaaagttcaacagctgataaattttctcttaaaccattgagaaaaagaacatctactaaagaatgtaatagctatgattaaaattaataatttccgtacggtcaatgacccgaatgagtaaaatgatgttgctttctgaatcattatttactaagatctaaatgtggtctgctttttacaattatacaaaactatatatatccataacttttttgcaaagaaccatatgtagttgacgaaaaaaaaaagtggtctaacatgatttgtagcaattgagctgagtccatatgatttaagcccatttaacggactgtgtggaattgatggcccagttattaaaccttttttgtttgtgtggaaaaagccaaaaaaaactgtcacacgtgcgaatctcacaggtgaggagggtattttatcctgtcggtttcttcttctttgacccctccgtaattacctcgtcttcaatcaaattataattttttgacctttttttaccttcgaaaatatctgaaaccctcaaaaacctaaacacaacaaacaaacaaacaaacaaaaaagttcctgttcgattcctcctctcattcattctctgcttgttcctcaaatccttcaattttctcatcaaatccagatttgcgaatttaggttttcttgaatctaatcgttctcgatgatttcgaaagatcaccttcatcatctggatcctctgggtacaaccaaatcgtaccacatgaatacctccaccgtatcgccgccgtctccggcatcatcaatttcgttgtcgcaatcggcgtggctggaggttcgtttgttctacgtccgtatcgctccttgcgtcgttgagaacgtccctgacttcctcaccctccgtcaccctcgtcgcgaaaccggtgcttctcttgaggttaacggcgttcgcgttccttcgtcgcagacggcgtcgcttaaactccgccgtgacagagtcgaccgggaatcgtcggaggtgacttacgtgagcactgagaccgttcgcgttaccggatgcgttgatttcgaggtttatgataacgaggatatggtcttgtgtgggaacctagatagaatcgaaggtgcttggaacaatggaactgtgagtgatcccaagactggatggggcatggattgttacattgctatgggaaacggacacgtgtcaggtccttctgcctctgtgtttttccagccaaagtttggagtctcgtctccgtccgtcgaggtttatatagctggttgttgtggtggtgtcccggtgatattgaccaagacgattcaggcgagtccgaggaggaaggtggctaggcacgtgacactcgacgctatccctgaggatgaggaagttggcaaagagcaagacattggtaccattggtgatgaattggcccgtcaaagcaaagtacaggtatgattctgatttcacaattctctgtttggtgattgtccaagcccttaagttacgattcttaataacttgggattgagatttgaaaaggttgcttctttcgtctagttttgtgagttatgaatgctgtagcagatatttagttattaagatcactcgcaagtttctggtgaatttagctcctgcttgaatgttttctttgactctacagctgaatttgaaaattgtagaattgttgactgatcagaaattgagatatggatataggtcaatagactctctttgcactttttttggtgctttatcttgtttgtcgtttcgtttatgcagatgatggaatcagaagttgatgaatacgatgactcagatatgaaaatggcacagagatattaccctgaaggaatgtacgttgatgaggatggtcagctctcatggttcaatgcaggagtcagagtcggagttgggataggccttgggatgtgtcttggtgtaggcattggagttggattactcatgcgttcgtatcaagcaacaactagtaaccttcgtaggaggtttctctgatcatcacctaccataaactaaaaacccacttagacatttcgagatctactaagaatgtcggtaacgtagtgggttataaaagagatagaattttggtagatagatgtatagagcttttggttttcacctgtttgtgtccttttgaatatatatatatattcggctctgttcatatactttagtagcacaaaagagagttcccatcttgctccagtcatgttcttttgttctttcttttctcaagtctgtctatgtcgttgctcttgtgtagaaagagatttcgtgttattgttgttgttgtcaaacgctggagtttgtctttcggtttctggtcaggaaataatgtggaatagggaatgtacatgtttcacctgtattcagtatctgtttgcaattagtaaattaaattattacaacaagccaagtggaagacggcgtcgtttatcataaatgtcaaaccgatgacgtcttatcgggggagcatgagcattggactaaaaaattattgtcaatttgtttaaattgtattttgggccctgaaaattattataaatgaaatttagccccttaattttgtaagagtttacaacattgaaccctaaatcattatgttcccaaaatcaaaatttcactcctcgagagtagcgagaagaaggaggagatg

SEQ ID NO: 4877 - DNA, 3000 bp, Unknown; identical to SEQ ID NO: 4874
  misc_feature (1)..( 3000): cDNA_ID_1825917_gDNA_ID_1620738_Annot_ID_49512 3000 nt of promoter + ATG

SEQ ID NO: 4878 - DNA, 3000 bp, Unknown; identical to SEQ ID NO: 4873
  misc_feature (1)..( 3000): cDNA_ID_1840058_gDNA_ID_1620738_Annot_ID_49513 3000 nt of promoter + ATG

SEQ ID NO: 4879 - DNA, 3000 bp, Unknown
  misc_feature (1)..( 3000): cDNA_ID_1826067_gDNA_ID_1620739_Annot_ID_49529 3000 nt of promoter + ATG
gctgctcgcgctaaagcaattgtagcagctacagtaggagaagaatgccgacggctttcgttgtttatccagtagttgaactttcggaatagaataggctcaatgactttgcctgctttcttgcttgccccgctctccttagaagcgttggttgaaccgctggactctatctccgttgattactattggatggagctatagaagctattttacctacgtgaacacttaagctagaaagaaagtagtatttctcattatatagaaaagccttgaaccgggtaacccgtcatgggaaacttggccgaagaacacctctcacagagtcatcggtatccctgataaaaagaatcaaacgtcgaatggtccgaatgaatgctacatcaggagccgagtttacttcactcccggtgacccgccgtcgtaatagcactgtgggcggaagttactatgtgatcacggcttccgacactgcattcatccagacaagcccttttagatagggcttttcgagtagagaaaggtggaaactcttttcatagagaaccccttctggaccaaagatgggcatcccaatcacttttgtcacaaccaactcttggcaaattgtgttcataatatattcaataatggtctcgagctcatctgtaaatcatggcatgggtagagaagaatggctagctatccttgagtgacacatcgcaatgattgtatcgaagacgggcggaggaaccccttactttactatattatatgtcaccatccaatcttggttatattatgtcaattctgcctcatcgtgaatgaaacgttttctttgagtcacccattctggacgacgagaggaatggtgaaatatactttttaatgggtaaaataaatctctgcttcgttgccaattaccgtcctgctaccaaccaaaaagccacttagactgatgtggaaaattgatccccgagtggctttttcctccggtcgagtcatctttcagttcaatacctggaactgagacggattcggatggagaaggattcaatagttcatcatgagctgtccgaaaccgtacttcttcccgcgaaaactcggaattagctttagctcgaaccttgatctgttgctcgaactctaatacaccgtagtagcaggcggcactcgagttctttgtgccaggtgtcagaaaaaaagtacgcaatttccaagcatcctagttcagcgtgaatcatctcttgtctcaatggaaggccaaggccttcaaaagcggattccgccggaagctaatccagtggcttgttgagtggaggaccgaacatgattatacccataaaggtccttcctacccctattccaaaaccccttcccctctgagggcacgggcacactttcaggaagtaatgtagtaaacagtcgaatttcaaatagaactatggtgaccttgcaaaaaagatcttttcttcgtttgagtgtacctttcctatgactattaatccttatgaaatccgtgaagttttgaccttgttttagaagctttctttggcgttgagtgaatattggtatcactacccttccttatcttcttcttttattcataggaatagaaagcacgattaagcggtttttcaatggcaagtgccggtcgtcgagtggctgaaccaacccctacggcggatccacacgtactgatgaatgccagccatcctttatcgagtagccttgactattcaagtacccttgctgatttgatagcctgaaaaagatcgaccacgatttttatttctgactgcctatgcctctaacgatgcttcgggcaaactgtaactaactaggtgccctactcctacccccccctgttctcaccttcatctctgctgcctccgctccagcttgctctattacctatgcaatcacagctcagtaatggactggtgaactaaaatggatagctgctgggagaattgcgactgatgaatcgcgatcagccgctgattcccctgccgttggattcgtgcctcaagactctgccactgggactcggtcggaagaatctactgcggccttctctacccacctttatctttatgaaattctaacctcaaccagccatgacaaggcttaatttattagaacccgttgttgtttagaaagatgtgttattcctgtgaaagtctcgtttttgactcagttttttttgagcattgtacacgggctttgctgcgacgaggatgccttttttaataaggccaacgtcaagacctgaaacagagccctaccacgttaagggagagcatcccaacttgcttgttgacacgtaaggtaaaataagaatctgaggtggcaggatttaccactataaccctatggtagtgatggttggtcccagtactccttcgagtgccttttgcgcttagcgtaggaaagaggagttgccttgccttaccacaccaaccaccttagcgctggaagttctagcaatgggcagctaggcaaaggataattagctatctaatgaatattcattagataatagattgtggatctgttcttagctcgtgcaatcaataaaaagcggtccttcgccttagtaagctagctttctaagcccggacgtggatcgatcgtgacgaaaaaatgggactaatcctctgtactgtagtaatagaagagtcagagtcccttctcgaccagacgaaggagataggaatggaattctgccttgaccctcctggaggcgcaaagttcataattcagtgtggtggggcctagtagtattataaggatgttggtttcgtatataagaagactgctgcttttaggagagtgatctgttcatctaactcaaaatattgtaagaagaagaagaatcttacgccccaaattcccatctcttttttcttggttggaccaaccggcaccagccatttccgtcttccttaattgggagagtcagaatcagtctctctttgtttggggggagcagaaaatgaaggaacctttgctttgaaaatg

SEQ ID NO: 4880 - DNA, 3000 bp, Unknown
  misc_feature (1)..( 3000): cDNA_ID_2123668_gDNA_ID_1620739_Annot_ID_166317 3000 nt of promoter + ATG
tcccctgcggagagccggatgaggggagaccttcacgtccggttcggagggcggggatatcccgaccctactatcattatgcctttgcaatgttacttggttcaactctatttgtgaccttttctcgtatgtgggactctctatcttcttgggtagataatcgatcgtctttcattttgatagtgagtagtttttatacaaagtcaagtcaagaataataatcgaactggaggagcttgccaggatggcttggtaagcaagcaaccaggcgcccattcccagttctttctcttctctctttttttagtttagtgacagctcatcaaaacaattgtccaagattgctagatcgaagacggacgcgcatagtttcaagttcaagagcgggttgtctcctctcgtttacactcgagttatttaaacctcttgctttgctcgagtcactccgtacctctcctttaagtcgagtccctaatggacctctcgttttactcgagttgcctttaagtctccttcttcaacatttctactacttccttgcctccccggatccatcattctcgagtaggaggaaaaataagtatacttttgatcgaaatggcagcttagaacacagagtcagcacaggacttttcttgctctccatcattcctctttagcttggactgacgcttctcgttgacgttcaatcttattctgaggttaagttgaggcagtgacaacatcaataatagaaggcgcataccttatccgatcgtagctcactttctttctagcagcttttttctcctctcctttcagtcgctcgttgagacctcatcaactagttaatgctcgtcgagacctttcttctttttgattctggaatgcttctttttcaggatagatagggccgacaagatcatcagggaagaagtcaaatcacatccgaattcaattgttcttttccaagaaccaaatgtgagaacctggaagcgtaaaccgggggagatgaagcggacaaatccaagcaaatcctcggattctattctatcgactgatctttccttctgatgtcgtctattctgtaggaatgagagctagatcttctatattcatcacttcctctctttccgagacagccaattatctatgagatgggatcatctgactattctcactttctcacttgggactgggaagtttcttcttgatcgaaatgggggctagcgtgaagcccaatagacagggatgagagggggacaggcattgataccattaatggaggactcacttccacgcaagaagatgacacactgtgactgctttgttatagacccgggaactgactggtaaggaagagtgagaactgatgggctcttctttctctgaaaaaaattaattttacgcttagaatgagacggatgacctttcatattatccgactttctttccgggttgacttcgtcctgctcgatccctctttttcataaccggcctatctatcgtcttggaatccaaatcgcttgaaagcataggagtggaagatctttccttcaagagttaatcccagtatcaaagattcattcaaactactatccagaggcgaagaagcaagaaaactccagcgctaactagctcatctttattctagttggagtgagacgatccttctttagggtcctgatcattccattggggagaaagcaggagtcatccatatatagtatagatgaatagtaccagtggcgtctaggatgaagacggggagtgaccgaattataagttgggcagcagtgttctcacttccgggaagacctacatctgggaggagagcggcagaaagaggcagcgcagcgcctctctacagtgcaggttctaagactaggcgaagatcggagactaaacacgaatcatcaattcctttgaccattcgttttgagcctccaattcttttcgaaatgctaacgaggttcaatgacgccgatgaagggaaccagcggtaaaggctctcaaaggcaggcgcgtagcataggcagactcataggataaggctgtgcgtgtgaatcccaactatttggctccttttaattcattctatttctagaaatggctactcgacctatttggaaagagctactctaaagcctattctattggtaacttttcagtcgaatttcagtttcagagatcacgccaagaccgtaggaataaaaaaaaccacttttcattcaggagcgggaaaggaaagatgaattaagcggtcatcgagatctttacagaaaatataagcattaaaaaaaaattaaaaagcagtgatacaggaagctgtttccagtagaactattgaccgaagagcctgactaccagagctagtaagctagcggaagagctcagctcctactataagctgatgaagagctactatcaccaagagagggcgaagaaactcattaattcattgatgagggctccccattctctttctaaatctgcagtccaatccttcctaatttcgaaactcatccttaagttaccaggggcaaggtggacatgaatcaagagaataagctctttaatcagaatacatagttgaatttagtaagaaaagaaatgatggttgacttcacctccggtgaccggcttcgcgggatcgccttacgtataaggacctgatccactctaggcgaagcaggtctacggtgtccacgattgtatccgactattgattgagtgaggccaacttcccgctattgagtgaggccaacttcccgattgatagaataatacggtatgtataaaaaaaaagatagcaagatagatagcccgacccacatcagcccctctgacgtcgaatgatctacttgcttgtacttctctttgtcgagattcagttggtcttcagtctaccactccgtgggtataagatcgcaaagaatgcattccaagtgagatgtccaagatcaaaggaacgagggtaagaatcgacgaggaatcaataagatataagataagtgaatg

SEQ ID NO: 4881 - DNA, 3000 bp, Unknown; identical to SEQ ID NO: 4879
  misc_feature (1)..( 3000): cDNA_ID_1826067_gDNA_ID_1620739_Annot_ID_166328 3000 nt of promoter + ATG

SEQ ID NO: 4882 - DNA, 3000 bp, Unknown
  misc_feature (1)..( 3000): cDNA_ID_3074477_gDNA_ID_1620739_Annot_ID_166339 3000 nt of promoter + ATG
ttaccagctcggaatcaacccgctaacggaatcctctggctgggttacctaacctccacttactcctaccctaagacaccaaaagattcaccagggtttatttcaactagggctctttacacgtcagtttggtttgagcctacagctgtctcaacttaatgaactggaccttatctatacgcaattcatgccctatcatgatgagtcaacaatcccaatcccaagccaagctttctcaccctatttagatttaagtgcaccgcctgctttctttcatgttggaatttctcctgctgtaatatatagagtagttccccttattctagttgtcttctttctattccttccggagaagaagggtaaaagctagaaaggtaagcattgtcgtgtcgacgcacgcgaaaaaggtacaagtccacttcgatagccaagcaatgagggagtctgaagagacttccagttcgctggacttagttttagatactccaagcctcgttatcttaattctcttctgtaacagtaacggatttcgatattgaatgtactggtcggttgggaccctataagaagacaagccaagcgcttagcttagttcgcggccctttacaagagtgaataccgaaacagacaattccagatgccactaaacaagtaaaggacaacagacagtattcgtggatcgggaagacctactctcattcaaggaagcggaccggttgacgactgcaggctagggtcccgttgaatttgacctggtaaatcccgccacagaggtcgttttctaccgggaaggcatagagtcgcattttagtctgagtctgagcaaacaaacactcacttaatcgaaagctaaataattaactttggaatggtaacgaagatcgaagatcgaaatccttccttccatcgtctgatctcctcctgagacttctgagcctcctaggatacttcgtaagccgcagccacaggattaatatgtggaaatggcaagtacacactgtgcaccacgatctttacgttgcggatgacgtccggcaccttaatcctcacatagttaatcctcatcggcgccgaggtcaaacctccaccggcaccagaggttgtgataagcagcggttggcctcgttccaatgtcggcggagcagtccccaccgaatgatcatttatttgactttgactcttcaaatcccattttttattttttctattgtttgtttgttctttatgcggggacaggattcgaacctgtaatcttcaggtcatgagcctgatgagttgaccaattcctctaccccgcttcttctcttctacaagtaggcttctttcttctagagacaaacgaccgattgaactacaatcacaggagacaaattattcttcttgtcaaccttcttctcttacgatatttcaaaagaaagaagtagagtcgttggaccaacaaccgccaggataaaagtcttctttagtcatcaggaagctgatttgaatgaaaagtaaacatagaattaggtctcacctgcgctagggactttcattgaatcaatctcggtatgtcaatcggaagctcaagaagagatagtatcttcctttcagtagcctctggtcttgcagttgggtttccccgcccaaagccttctaatgattccgttaaggcaaatatcccataataagatatacgaataagacggatcagaccgaactgtcaatgcattcattccatctccaccggaatcacccctatgcatagctccttccctcttctatgaagttgaagtgaagcaagcgagcctctcgattgagggagaccgatctgagtcagtttatccagtattttaggaaatgttcgggatagattcacgttttcccggtcttttttatataaattagcgcttttgtggtacgggtggagggctatgagctcgttcactcaatcccgtggaaacaactcccttagccttagttggaagctaaaccaaagtgaagcttgtaggctcgtagagaaagctattttgcaggtatacccatagatccatgttcctgaacagtctcggagaaggccaccagcacccgacttaccagaatgtcccgttgcagcaccatgcaagaaaaggttcctcttggaagcaccatccgtattgaattttaaccagccaatggaaggaaattcccaaaactcaagaacctgagcttataagaccaaaacaacttggacctgccgaatagactagaagacgatatcatagttctgaatggcgcgcactacctgatgatagggagtgctctgtcgcggttccattcgtttcgatttcatttcaatatagggcaagtcctttttccgacagaaggagtggtcgttttgggtgacagaataagattccccggatctccctcaatctcaaatcgacgacgagagattctaccacgctcacttttacgtagcttcacttcttcttgatcctgctccattggagttggttcattcagtgtgtcgctcccacttgccccaggaggctgagtaccttcgttcctcttcctcaactggttgattaggtgctccaagatctggatcttctatttcataaaactggaagtcttgactcgcccttctcggtggtcgttagcagctgctatttgaaatccattcccgctgctgtcgtcaacggtagaactcttcgggcatccgtccgttcttgcttctggagttcaggagtggattcgattcgatccgatgagagagatcagtaggggtcatccccgagtggacgagcataaagagatcccccggatgacaggcctggggcgaaaactcttcaaaagttctggcgctttcaaccctcgaacgaaaatttgattgatgaaatagtggatttcgcctttttttgggggctatttcgtgcctctcaattctgaaacaacaaagcaggggaagttgttggaaacaaagttaaagaagagacttttaggaacaacagcaccaaagataccttcggggtagacatg

SEQ ID NO: 4883 - DNA, 3000 bp, Unknown
  misc_feature (1)..( 3000): cDNA_ID_3074439_gDNA_ID_1620739_Annot_ID_166383 3000 nt of promoter + ATG
ccattacagttgagtgtttaacacgtaaatattcgaattgagccattccagctaacaatccagggaagaaaccagttgagtgtttaacacgtagaaattcctattagtcaagaaaggcatagagtgtccattccacatagagtatccagttcagatatctccaaatactcagaaggaaagaaagacatagagtatccaatcttgagttccctctattatgcggatattatcgaatcggccaatcatgcatttccaactctcgcgtgtgtgtgcccacggggtacctttatatcttatatgcgtgtgccgaggaaggcaggggaagctctctttattcctatgcgtgctttacttacttgacccatcccttactccctctcttgtactattgtattgccctgtgttggctagcttacccgtgttccataccttcctagcaataacaggaccattcaaacaaataagacattcactctagactcgtacgctcatgacttgactcctaggacctgtttgattcaagctctagctctcgttaccttctcttccttggctcttatcttactggaaagtaagtctatttctctttcccagaactacttcactctctgaaaatcagaataagaaagaccggcacgactgaactcagtcagtgtactttcctatttgagtttcagtttaggaagagagttccgtgacttccgagcttaaggagagctaccaaaggtaggaattgctttcatcaaattgacatagatatgagtagaactgagcttattcaataccttattttttttgcctatgataaatgcatagatcgctttttttcactggaagagttcaaaaatagcacgtccattcgatccttgtttttaagcgaagggcgagaggtgaacataagggaacgtccacccaccggacacctcaatcacaagaagcatcataacgaacgacataatgggcacctccacaagccggttatcgaaagtccgtggaaactggtcaataaaccattcttttttagccttgtcggataagtcggcttctctctggtcgactagtatacagaacagatgttgttctcgactccgtgcctctccagcttctccgagctatctatctaaaattaatttactttacttacgaagccagtctcctctataagactttcattcccaagacctccaatccgaatccataaataccttttagtcagtatatctttggaagaatctacattggaaggcctgtgtgaaggaggaaaatcaaattaacataccactggaatacccctatcgtagatcagaattggtaaaggtcccggcactcaaaaccgtccatactagggctagctcgacttagatcgactccacagaataagactaccattcggcatcccaccacctcatatccttattaacataagcaaattatgccgtctgcaggtcctcttcacgcgaaagcaacgcaacctcctcgcaaacaaaggagacgctcatttccaactactctcaccctgtcgaggcccgagtaagggttttggtggggaaggaattaagccatagagtcttgttattcccgcctgttgcccgcacctcattcattaaaatgtcataagttaaaggtgttattaacataaagttgtttgatttgccagccttggcctagagcaatggagaggactgttcgtatagtagttgggacaaccggctcataaatatgccattaaacgctaagaaaaaaagccttctcgtaaaagtccctcagtggattaatttttgtgatctttccgatgaaacccggatttctgttcggaaagaaagactaagtcaaggcagacaacgaggcgaagatagcagacttgcctctttccttttgcttgtgttgtgccagttgaagggcttgctactccaattcaagtaagattagataaatagattccactgagtctgatttccctcccgaggtacgtaaattgttaggcttgcagaccttctgctcgagctcgccgtaggaaactagctggcttagtaatacctattcccatcgaacaaacagggataggagttataccgcagctgcaaagcaacaggagccgctcactcagactaatggcctcggctatgccttaaccatcccattagtcttccttccccttcttccgcttctcaaggaggggactttctctcccaggtagaagtaagcgaactacaccttccctctgccttagccctgcctccgggatcactcaagaagtaagctgtgattaaccagctcacttctatagggggtgaactacgccttacacaaacgaaccctttgataacgaaacaagctaatacaaaaaagtttcagaaaacaacagaagatgttccggatgatagatgcggattaggttagtggttagcttacgagtagtacgggcacaggccaaccggtgaaaccaggggaataaggaaagaacacagttcaataacagcatattcccagtgaagtaagaaagtatttgaaacaaaactcagggaagtagcatttcgagtacaaagtttgactaatttgctcagttggactgaaagggtaccgtaaggaagaatgaaagctaaacaacttttagttcccaaagaagaaagagttaaatctcgttccaaaagaagagacagacaaaccaggcttatcgattgcttatccaaatacgtatataagaagattcatctcattccagactctactttccgattgatagaataatacgtatataatcagaaggctgctttgtggagtgatctttctctctaactatcactaaacgaaacaaagtggaatgaaataagagaaagagattcagttgagaacaaagtggttcagctcagttggttagagcaaaggactgtaaacccttgcagtggttcgaatccacaaccacttctattgtaagcattcctcggaagagctcgccgtaaattatttattcaaaaatactctcaaataatatcaaaaatg

SEQ ID NO: 4884 - DNA, 3000 bp, Unknown
  misc_feature (1)..( 3000): cDNA_ID_3074443_gDNA_ID_1620739_Annot_ID_166373 3000 nt of promoter + ATG
agcaccggctccacgaagtctgaatcgaatctttctgttggctttcccaaattcattcgtaaatcaaaatcaaagggctagaagcgagcgcttctagctgcttcgcctgcttcttcttattatggcggccatgttggcgtggcgaaaatgaacgaaaagcgagatgaacgtgctattttcaaatcggattgatagattgatctgttctgatagatctaaagagtagaaatagatagagaatagagagggaatcaataataaggtctttgagcctatttctatctattgatgagacaactatctattcttgatccatcagaaagaaattatttatccatcagaaagaaatcgatatgtatctgatggagtcttctacatcgtacgtagagcgcccaagcgctttttgggccagctcagttctcttatccatcggtccaatgcactgggctcatctcatggagggaaaagccaaaatgtagttgtcttgttgttgttcgccgcctcgacgcattcccttctctccccggcatcgtcccacacagaaagaaagagcgcggagccccggcccgagccgtaggtccgctaacgtaaagcgaggagttgagcctgaactggcgaaccgaagtcactttcggaaccatacttcctacagctgctaacatgtgcccagtcctgcggaaaggcgcaaacgaacgtgagctgctataccggaatcccccgctggccatcggggaccgagtggtaaggccatgatctgcaggggaacggatcactcattcttccattggggacaggtgcacgaacgacaactccaaacgtcacacatccgccgcctacttaccgtttaggtggcaccagcgagatccagctaaggaaaaagagtgtcgcggctgctccactccgccgcggtctcatgaacttcacttcgttgccttcccgcgcgcaaagcgaatgggcgctgtgctgtgggtcagtttcggggcggggggcgcagagataccagaataaatgattcatttgtttggatcgacgagctttttcagccccaaaactcagaatcaatggaatgtctgtccataaacatctattctatctgtatatataggggatctctctatacatatcaaagtcttttatggcattgatatgatcgcctagctgtagccgcatatcacagctgcactcaatatgcggatttctgttggatcagatcttttctttcgctttgacggaagctttttgacctagcgaaaagcactttcgcgcaagcaaagtagaagctttgccagaagcaagacgaggaagtggagctgtcgtataagcggtagcttcccccgaccgactaaaatacaagagtcgcggcctactttgattgcgaaggggtttggcaacaagcaaacggctttctatcatagttgcaagggttcaaaaccttagttcgctgcttttcccagtaccagagaagggcttatactgctcgcctttgtttggtttgatatattcattcagtcaaaatacaaactacaacaaagtggaagtggaagggccgctatagaagctagaacttgctttataagtcggcctaaccaaagcgtcacgacaacaaaaaattatccttatgaatggaatcttaagtagggggggctttgaccgcccgcctaccaatcaaagaggcagagagtaaacgtaagctcacccgtaagctcgaagagagcttcccttcattcgcttcgcgggagccgcacaagcacatagctggaagtcagagggcccatactacctgcctaaccctttgttccgagggaccgtagatcggaaagcaccccatttatccaaaagagaagggaaggggcctatgtatttgcatgacccctgcggatttgaccctatcccggagccaatcccctattggtcctgccaccacgccgcagaacgagagctcgtgtggaaccttttctttctggcgtaacagccggtggaacgtaacaaaagattacggtcgcctaacattaacataagggcggggggtacggtaaactcggccaaaatatgacacccgaagggcccgaacgcacaatcctatcccatccgagtccgagtttaccccttgcacttcggacagccgaccgtagcatcataaggaggaccccctttcgaggtaaaaaaaaaaaaaggtacggtacatataggaggttggactttctcaacgtggtgtatagcacgaaaaacttttcgatacaagaaagggccgttctcacatgaaagaagagaagaaatcctttcttctcttctttctctttctcgagaaggaaagaaagaggatggggggagggggggaatggggccggtgcccttcttttacggccgtcactcttatttgtcagccgtgaggaactaccggctcggtctcggtgggaaaggaaaggcttgggcctacctatcccgataagacctcataaaggaacggcgggagtgataggttccatattgccgagctgaagggcaagacttttgtacgtgatcgtagtatgtgacgtcgtctcgtccacgctgcattgaagagtacctacgcactaagttccggttcactgataaggaagatagagttgggcgggggtctacgatgtgatactcaagtatatgacccggggagatacatgctaactatgggtaggaagcaggaacccttatgtaaataatttcgggggggggttacagatctcttatactaccctcgatcgacagagcggaacgaccagaaaaataagtgatgttagaaagccgtatgataggtggtaactatcttgtacggttcggggggtaatcggcgtactccgggagaaatctttcgctctatcgaacatacagggaattggaggtagcattctaccgatgttaagtcatggactggttccttcagccctttttctatgtgttggtgttttatatgaccgacataagactcgacttgttagatattacggaggtttagtgagcacc

SEQ ID NO: 4885 - DNA, 3000 bp, Unknown
  misc_feature (1)..( 3000): cDNA_ID_1825990_gDNA_ID_1620739_Annot_ID_49553 3000 nt of promoter + ATG
aagagagccagaagctgggtccgcccgccggagcttctttcaatttccggggggcttagcttgaaccactcccaagtgccaagaaccggcgaatgaaggctccgtggcggcatcggagctgccaataagctaatccgttcccagtgagctattacgcgctctttcaagggtggctgcttctaggcaaacctccttggctgtctctgcacccctacctcctttataactgagcggccatttgggggccttagctggtgatccgggctgtttccctctcctagagaaagaagttctctagtcactaaagtgcgtttcactctcgttcctctcgtttcactcgggttgctaaagcacctctcctctgccaagctctctgtcttggttaatggttatccaaaaggatatttctcatgttaggcggtgtgagacagggggataaaggatcccccgttgttattttgtattgcggaagatgtcttatcacggggtcttaccgggcttaatcacctgggcattctttcttcaattaccgagacctgtacatacaaagatctaggcagctcatcttcttctaacgaagtcagatctttttccataccataacatatatagaatcgattttcttttctgatcgctagcctgccgggccgcccccgcgatcaaactatcaatctcataagagaagaaatctctatgccccctttttcttggttttctcccatgcttttgttggtcaacaaccaaccacaactttctatagttcttcactactcctagagacttgacggagtgaagctgtctggagggaatcattttgttgaaatcaattaatctaatcatgcctcaactggataaattcacttatttttcacaattcttctggttatgccttttcttctttactttctatattttcatatgcaatgatggagatggagtacttgggatcagcagaattctaaaactacggaaccaactgctttcacaccgggggaagaccatccggagcaaggaccccaacagtttggaagatctcttgagaaagggttttagcactggtgtatcctatatgtacgctagtttattcgaagtatcccaatggtgtaaggccgtcgacttattgggaaaaaggaggaaaatcactttgatctcttgtttcggagaaataagtggctcacgaggaatggaaagaaacatattatataatatatcgaagtcctctccttcaaatactggaaggtggatcacttgtaggaattgtaggaatgacataatgctaatccatgttgtacatggccaaggaagcataaaatgattctttcattctatagatacctctggtaggtaaagcactcgactgtgctttattgaaagttcccatcgcgggggcgaggatacttgccttcgcggttcgactttcttttcaggcttgactcattcgctagcttctcctcccctttagagctctttatgatgcccactgagtaagattcggggacttccggcgcagaagctcattctgaaccgcgggaaccttcgtctcaatcttcataatcaatttatgccatcttaaaaaaattggaatcttgttaggtacccgtacgacagctctaataatgagctaacgtactcatctttagagtggtttgtgcgcaggctcgagaagttgctgcccgcttcagaagaccttagggtgccttcgattcctggacgactttgttcgtcgtgtacaggggacgggaagagatggctgttcgctgtagcaaaattcaacgaaccgacgggcgtcccggacatagccttcaacccgcaaaggttagctttgttgctggacaaccactagggtactattcttcctggcccctcttcgccctatcacatcacatggtggtgtggtatgcggcagaacatgtctatccttcctccttcttctttcagtcgaaacttcctcctagtgaggtgttcgcctatccaggtatggaagtattcaatgaatacactctgtaccatgcatgggtggatgaagctttatctggagtatcaaagatggaattgtatgctaaggcttagtgccagtatagagcttgaagtctttatggatgtgccgatctttatccgtacatattaccgacctgcgaacatggatgattcgttcaggtacgggataatatttaggatgtacgatttggctgtccagttacagtggggcaatgtcatgaaattgctactagtaactaagactcaagtggagaaaaaaaaagcactcaatttgaatgtaagtaaaacacgggatggaagaggaggcctgaaccaacagggatgaaacagtatagattcccctgggcgaagcaagtcaccgattagtaacctaagaaagagttgtcaacgggcgagtgtcctgctataaggtaaactcctactatttcagcttcttttcccgtggtcgaaagctaaatatctcaagatgatattttccaaactctcgacaagcagcaaatagaaaattaaaagaagattttgaaggatctgatttcatctaaggagtggcggttaacagaaggccatttcaacttatgctctaaaaagatagaaagcattgttgataaagccctctctttatataaagagggctttgcgccttcggataaaggaagattccgatattcgcataggtattgaagcggggatatgaacagctagcttcccctcaaatgggagccgtttaagtaatcttaaaagagtcctcgactgtattggaaaaacaaaaagttcaatatggcgggagatccataattttattgagagctttcaatcaaattagattgtaaagtagtagtcctgtgtaaaaaaaaaagctggtggggcggggtccaagcaagcgtaataaggggagggggactaggggtggaagggtcgtcgaaggagatgcatttctggtacaagtggtattggacaagatctcagggaatcatctctttcagatttctgcctttctttccc

SEQ ID NO: 4886 - DNA, 3000 bp, Unknown
  misc_feature (1)..( 3000): cDNA_ID_1825968_gDNA_ID_1620739_Annot_ID_49560 3000 nt of promoter + ATG
gtgatcttgctgtagggtcagagctgcaccgaagaacagttattatcgactcgatggctctgatccgcgtgaatcagacggtgagttactggttcttgaatgggaatcccgagcaccaaagagcagagtgatcctctgctcgagataggaccgggtaaagggaaaaagacagaaaagaccatagaatagcaataggaatcgctgctatccgacaactttctccgtggagcccgcagctaaaggttaacaaaagattgtagaacccatggacttactatctaaacgatacgagacgggtcagtcaagggccaccagaggcacaaagctggcgaatatccgtgagagcggaagatataaaaggtataggtaagtaagctcttttaagatcaagggcaataagacgtcgaaggaagaatccgcaatgctttgacattccttttcaaatgagttgtgcccagcccagttagtccactactacagatagtaactagcacagaaaaacaagatggaatcaaatacggtgttaattaatttactgaagtgaagcaaggaacgtagtaactcgactggttggagagaaactttgttattagggttgaatttccagtcttcgggcctcaacaccggagcttatcctgaggcctaggtaggtaggtagtgacgtctcttgctgggtctttcataaggaatggtcctgttagtcttaatccagcgactggccttgctccgagccgatatccgaagtatggttcgctcgctagttatatgcttaacacatgcatctgaggtcagaggtgccgctaaggtgaacgctcagcttcaactctgactatatattatatataagtgcactgaaggttaactatgtcaatctacaactcaatgtgattggcttcgcccgggctcagtctctttcggccggtatgtagaatcgtcggagcgagcaaagcagcggagcgaagtgggctgtgtaatcattttattttttgacttttttttaatatataagggtaagtaaggagctgaaaacgagtccttcggagggcgaagaaactcattaattcattttgatgagggcccctcattcaaatgttatgcttagtgcttccctcacattttgagttgattatttccaatttcgagagtgagattgatccgaccaagtagtagtgcggaagccagtacatacatggctagtttccaggcaagccatccatattggcataaccttcttctatgccatctagcttcatagccgatagtttccgttgatcattatcttcatccatcggatcagctccttcttttctgatttttttcaatgactgcttcttatgcttgccctcgttcttctctcttctcctagacccaccccccttactgtctgtttaggccccctgccaggtactccagtctcattgcgtaccgtcgtctgcatcttcttgccctgttttcatagttgtttgcttttcttatatggattaggcttggttaaaagcgtaccgtcaagcaagaaaaggaaccgtaaactagctttaccgagttggcttcttcgtatgagccctagcagcatctattccttactctgttttctgctttcaagcccctaagtaggatcgtctaacgaagtcaggtacgagggaatatgttaatgcaaaagaggcgaggaggctggtgaccagagaaggtctgtgatggaagcaattcctggctttctggtctgtgataaaagcaatctctctccggtcggttcgactgttaatggaaaaatgaatagatccttaggaagaaaaaggctcttttgctcttgtgtagaatcagttgttacagagaaggagcggttttcgtttcgcaatggaatcagaattagctacgatcaattaaaatatcgtagtatagtaagagccaacgaagtagctgtaacgtgaacagctaaagctccttaccttatatgggctgcaccgcgctgaatgatcaaatcccatttattcttatttttttacattacaactcccatgcctttccgttggtcaacaaccaaccgtcgatttaccttttccttcattttgagaacaagtctctcttggggggagcagagcatgcaaaatcgagcaatagatggatcttagaagaattccactttgaacggcacgactctttcgatttttgcgctggcatttgagttgtctcccctcctctttcaatcgacacactcgacgcagatagctccggtggccccggcttctgcctctatcaggcttaggctgcccccacccccacagagccacagcatggagtagctgctcccgcgctacaaccaatcaaaattttatacggatcgatatatgatgatgctaaaccgagatagagaaagagggcgaagaaactcattaattcatcgatgagggttgccgcgcctccctttgttggctcttcgagacaaaaacactcataggaatggtgctaattcccatgttccttctagtctcgtttggtttcgaaagcctccccctccctgtctcttactctttgaaagctgtcatcctggatttatttttgaatggtttctttgttctcttatttggattgaaagaaagacaaaacttcattttcttcgacgaatttcggctatgaccaatgcaccaatagctgaataggcgtaacaaagctacctgaaaaggcaaggtgcaccttgggattgaaatcgacgaattgcgttttgcccgagagatttatttagaaagattatccatcggataaagaatgcaaaaatagaaagaatataaataaaggcgtatacacgggaagggggcaccactacttccagggggagactagcctcattacttcttagtgggcgagaggtgcgcctaacccacctacccactcataaatcacggtgttcagctgacttgaactgatagacccttattgtattggaatttagcgcccatcttttgactgttgtcaacaaatctcttcaatgttcgattctactct

SEQ ID NO: 4887 - DNA, 1694 bp, Unknown
  misc_feature (1)..( 1694): cDNA_ID_1826452_gDNA_ID_1620744_Annot_ID_49667 3000 nt of promoter + ATG
gaattcaaatataaagtgaagtccaatcaaagggatatgattttgctacaaaaggatagaaaagctttatgagtttgagacttgtcgtttccgcatagatttgcactaatgaacttattgtggctggcagccaaacacatctgtgtgactttcgatattagtaataaagagtttaaatagttacgttggtttaagaaaagtttacaaatttgatttcatctttgggcagatagccatcaattattttattaatctacatttaaagattgttttaagagaaaccaaagttgaataatctcatcaaagaacggtaggtaaaccctaccaaatttaacaacccttaaaaccattttctgtattcacattcattttttgttatactcatcatggactttttttttttgttttggtaaaaaacatgtacatatttagatgctatcaacaacatgaatgacttacaagttaagaaacaaatctctttttttttttgggataaaaagaaacataaatcttaccaagagataatctctacaaaattgttttttcaggatatttccaagaaatgagaggaggtcaacgactaaaaacaacttgctgaatatttaaaaatctttttctgcttagtggaggcatttattttacattaatttttatgttttaaaaacataatgttattatataattaaatttcttgcacaaacagagaatattattaatatatactgtgaagagtaataaaacagtttcgtttcattaaatatttgattgaattataaaaatagtgaaaaaatagaagatgtgttcgtgttcgtggagcggaggacaacgtagttggtttccgcgtgctgtacgagacagataacttctacagagagaaacaaagatcgagacaaaaagaaacccttaaaggatttgaacggagaagacgaggaaaaacaaagacacaactctgtaagttctgacccaattttttttatgttttgtctggaaagtttcaagatttgatttttgtggttctctttacattttctgggttttgtgtaagcatttgatgtgtggagtgtctctctttttgttattcgaattcattatcaatcttttgtgtgtgtttcatgtagatttgctcaatttttaatctagatctaaccaaattaattaactaaagatttagataagaaaagccctaatttgtgatctactatatgatccagaatctggagtctttgtttctacttgatatatgtaaatcttgaaagtttccttttttttttcttctcttcttgaagtagtaaagactttatcttttctcaattgaatccaagaatgattagagggtttatttattttgggaccaataaacagactttgttcttgggggcagagactgtttctttcccttttcttttttttcacttctttagaagattcttcatttgaattctgtccttcaattttgaagttgtcttgttctcttttttactaaatgtgaatcaaaagaatgttttcttaagttttaaaaaagcctgtggtggttactgcttttggtccattgataagaagaatcttcttttcttctcttctcttctcttctcttctcttccgtgtcattgctttgttattaagtatcattcagaatttgaatcaaaactctacttttgtgtcttgcagaacctttagagagagaaaaacaaatg

SEQ ID NO: 4888 - DNA, 3000 bp, Unknown
  misc_feature (1)..( 3000): cDNA_ID_1826446_gDNA_ID_1620744_Annot_ID_49670 3000 nt of promoter + ATG
tgagctttctactgcttagaacaaataaactctttcccaaactgagcaaaatcgaaatgatgaaaggtagtgagcagaagaacctgttcaaggttgtggtcggcattactataggtcacaagatctgccattccatgtgaaaaacagagcagaagagaaccaccctcttcgatccttacacgaaggaccgttcatcatctacaaacaagagcccacgaggttctagccgcctcggaaaccatcaatttaacccgtaaccaaaccccagttggtgaagagagatagagaaggagaaaaaaggtaaaaaatttgaagatggcagtgcttgcccagatctaaagacgcttctccgagatggaaaaggactagaacccgatcttcaggaacttaattttgagctcggaaacaatttccagcgagacaaaggaggaggtaggtagtggtggtggagagagaaaaatccggcggagaaaaacgacggaaaagcaaaaaggaagaaggaggaagacaatgaagtcagagacagcgatgacagagagaagaatagccaaaaagaaagtgacgacgatgtgagagggagaagaagaagaagaagacggagtcacagacactcgacggtaaaattgttttaccacaaattaattacatctatataaatataaaggaaacactttaatttcttggagttattaataaatatatactttatactttattctatttccttgtttttaacaacaatttatactttaaaataaaaaaattgaggcatccctataactctattgatgcttaggaaaaaagaaaaataaaaaaaaaaagtgaagaggcgttccccatgcagttgtttgtacattcgaacttaaattgtttttgttgtattctttttaaaaaactactatatggtatgggagtggattacatcatattctatgttttagaactaattttagttcgtcgtacgtactttcattgtgatcaatattgcatagttagatttccaattctctattgtgaagaagttgtttgtttggttaatttatactttatataaaagtaagcttattggctaatcaacatacaaatctttacgtgcgtatatcagtatatggtttgaaccactttatctaaaaacttatgattaaacacaaataaaaaaattagataactaagtgcatcatttgtttgttgaccaaattggtaattgtttaattatgatcaatattgatttcttattcaattagctatgtgcagcatttgttttttgatattaggtatttgtttagatatgaataatattgactttataactttcttggtttgattacttttaatatcattgtatagattccttgccattacaatttcacttgtaatcaatttccaaatctccctaacatataaattagaatctgagctggccggttcaggttgtccgggctaacacgaggtcacgcaatggtaatttactagtagggaaggtttattcttttggcgcagctacgttgaatgttggttgccgtttgctatgaaaaagacaaaagtatccctaaggagaggtaagtgggcccatttggtctgggtgcttctctccacattttcggggagttagtcgaggagaatgtatccacttttggtgaaaactataatagtgcgtctcccttaatcttattcttcttatatgattctttatttgcgtaatccttgacattcaccgacaaaacaaaatagttagtggttaactggttatttagcgaatatgaatgtgatttgtttggtagccaatacataattacataggatctagctcttctcgacattgtaaaagcaaatcgaaaccttggattggatgatgcatgcccaactatcaagacactaaagttgtagttcaattttccatacatatatagaatcatagatgatattatactatattcgaaatgttgagttctaagtctaaatcaaatgtacatgagtattatattatctctatgtaagtaaacttaagaataacatgttaatgaataagacgaacaatatttttactgaaacgtaaaatctcatgaataacacttgacaatatcgtttcaagaaactaatacagatcatataaatagttatgtatatatatgtgtgttaaaaccatattacatgtatatttatgaaagtatctataaagttttattatcaagacagtataagatttaataggaaagttctgaagcggaaatatttgataaaatttaaggaaatactaagaggatgcgatggtgatagattgtatgattagactttagagaaacaaaatgaatgatgattaaggcaaaggattaagagttaagagttgagaacaaatgaagttttggttaacaaaaagaaaagctccaaggaaacatggaaacctacttacttttgttgtttattgttcttgtgtttgggtccatctcctcatttcctacatttatactaaccacttaaccagttataaaaacataattctgcttttgttttgtcgtttatatatttaccttgtttttatttttgtcagctattaattcacttattcaaagtttttcattcattatgattttctcgttactcacatataatccgtgattcacacattcacttatctttagacttttttagatccacgtaaatccaactttagttaaatgggccttaaaatagtgatttagcagcccgttaatccaacgcggaaattgagatctgttgccataaaacgggccgggtcatcgagatttcggatctttaagacaaaataatcagaaacttcgaaatcgagaagcaagaaattggaatcaatagatttgagaaaacttttgatttcgagagtgcttcggagcagaagaacgagcaaagctagggtttccatctatcaaatccagctacaatcgaacctattcatcgaaattagggttttttttttggtcccttaatttttcccttctagtagcttctgatccttcgatttccatg

SEQ ID NO: 4889 - DNA, 3000 bp, Unknown
  misc_feature (1)..( 3000): cDNA_ID_1826442_gDNA_ID_1620744_Annot_ID_49671 3000 nt of promoter + ATG
cttctcgatttcgaagtttctgattattttgtcttaaagatccgaaatctcgatgacccggcccgttttatggcaacagatctcaatttccgcgttggattaacgggctgctaaatcactattttaaggcccatttaactaaagttggatttacgtggatctaaaaaagtctaaagataagtgaatgtgtgaatcacggattatatgtgagtaacgagaaaatcataatgaatgaaaaactttgaataagtgaattaatagctgacaaaaataaaaacaaggtaaatatataaacgacaaaacaaaagcagaattatgtttttataactggttaagtggttagtataaatgtaggaaatgaggagatggacccaaacacaagaacaataaacaacaaaagtaagtaggtttccatgtttccttggagcttttctttttgttaaccaaaacttcatttgttctcaactcttaactcttaatcctttgccttaatcatcattcattttgtttctctaaagtctaatcatacaatctatcaccatcgcatcctcttagtatttccttaaattttatcaaatatttccgcttcagaactttcctattaaatcttatactgtcttgataataaaactttatagatactttcataaatatacatgtaatatggttttaacacacatatatatacataactatttatatgatctgtattagtttcttgaaacgatattgtcaagtgttattcatgagattttacgtttcagtaaaaatattgttcgtcttattcattaacatgttattcttaagtttacttacatagagataatataatactcatgtacatttgatttagacttagaactcaacatttcgaatatagtataatatcatctatgattctatatatgtatggaaaattgaactacaactttagtgtcttgatagttgggcatgcatcatccaatccaaggtttcgatttgcttttacaatgtcgagaagagctagatcctatgtaattatgtattggctaccaaacaaatcacattcatattcgctaaataaccagttaaccactaactattttgttttgtcggtgaatgtcaaggattacgcaaataaagaatcatataagaagaataagattaagggagacgcactattatagttttcaccaaaagtggatacattctcctcgactaactccccgaaaatgtggagagaagcacccagaccaaatgggcccacttacctctccttagggatacttttgtctttttcatagcaaacggcaaccaacattcaacgtagctgcgccaaaagaataaaccttccctactagtaaattaccattgcgtgacctcgtgttagcccggacaacctgaaccggccagctcagattctaatttatatgttagggagatttggaaattgattacaagtgaaattgtaatggcaaggaatctatacaatgatattaaaagtaatcaaaccaagaaagttataaagtcaatattattcatatctaaacaaatacctaatatcaaaaaacaaatgctgcacatagctaattgaataagaaatcaatattgatcataattaaacaattaccaatttggtcaacaaacaaatgatgcacttagttatctaatttttttatttgtgtttaatcataagtttttagataaagtggttcaaaccatatactgatatacgcacgtaaagatttgtatgttgattagccaataagcttacttttatataaagtataaattaaccaaacaaacaacttcttcacaatagagaattggaaatctaactatgcaatattgatcacaatgaaagtacgtacgacgaactaaaattagttctaaaacatagaatatgatgtaatccactcccataccatatagtagttttttaaaaagaatacaacaaaaacaatttaagttcgaatgtacaaacaactgcatggggaacgcctcttcactttttttttttatttttcttttttcctaagcatcaatagagttatagggatgcctcaatttttttattttaaagtataaattgttgttaaaaacaaggaaatagaataaagtataaagtatatatttattaataactccaagaaattaaagtgtttcctttatatttatatagatgtaattaatttgtggtaaaacaattttaccgtcgagtgtctgtgactccgtcttcttcttcttcttctccctctcacatcgtcgtcactttctttttggctattcttctctctgtcatcgctgtctctgacttcattgtcttcctccttcttcctttttgcttttccgtcgtttttctccgccggatttttctctctccaccaccactacctacctcctcctttgtctcgctggaaattgtttccgagctcaaaattaagttcctgaagatcgggttctagtccttttccatctcggagaagcgtctttagatctgggcaagcactgccatcttcaaattttttaccttttttctccttctctatctctcttcaccaactggggtttggttacgggttaaattgatggtttccgaggcggctagaacctcgtgggctcttgtttgtagatgatgaacggtccttcgtgtaaggatcgaagagggtggttctcttctgctctgtttttcacatggaatggcagatcttgtgacctatagtaatgccgaccacaaccttgaacaggttcttctgctcactacctttcatcatttcgattttgctcagtttgggaaagagtttatttgttctaagcagtagaaagctcaaatctttgattgaaaaatgtaatctaaggagtttatggattgaaacccaagtttaaatatttgagattttgtttgttcaaattccagcaaatctctaagtctttctcaaattcttctttgtaataccaaagagtcaattagctggatttaaaatcaccattgagactcattacttggtgatgtaaacgaat

SEQ ID NO: 4890 - DNA, 3000 bp, Unknown
  misc_feature (1)..( 3000): cDNA_ID_1826434_gDNA_ID_1620744_Annot_ID_49673 3000 nt of promoter + ATG
ttaataagctccatcatgtaaacaagtagggacgagtaaatagtccccaaaactaattgatggtgctgaaaataaaatcaaactatcatttaatatacgtatcgtattgataaaataatcaatggcttagattatctccgtcgcacgctttccttgataattaataaattcatataagctaatcatcatatataaccaaatgacaatcataccctaaactcaaaattaatttatttatttagttctagaatttccaatatatacatgtcttcaaataaacaaatgttataaaattgtagaaattatatataattgatgcgaaaggcgtgtttaacgggagagttgtgaacaagaagaagactcaaaaacttctctcaattctaaaagctcgatttttttatttttttttggttccttcaaacttcaaagtaaaatcatggcaattttcgatctttcgtcgaaatcattcgatagccatttgaattttccgagaactttcgatgatcattcagattccggcgtctgttcgcctcctctgtggagaacgagtccaccgaaaagtcctgctcatcttcacaacaattaccagaatctctcacctgttacgaaggctcaagtcatcgctcgtggtcagcgtgagcttatggatatggttagtaagatgcccgagtcgtgttacgagctttcgttgaaggatctcgttgaggttaacacggaggaggagaaggtgttcgatgaaatgcctcagagagaaaaaaagccgaggaaagtcgtgaggaagacgaagagtgataaatgggtggatccgattcgaaacggaggtgttaataatagtgggtttcttctgaaactggtgtttcctgttagcttgggtgctaagaaaaagactaataagaagaaagataatgatgatgatgattcttctgtgacaagtaaaaggtcttggatttcttctcctagaccttcgatctctgatctgtcgatgaaacgagaggataaagattggtggaaggatggattgtcagaatctcgtaggagtcaaagtgttgtctcgaggatcaacagtgggagctcaaagagcagtggtggtagtagcagtagaagcaatagtgatcgaagccgaaacagtctaaggtatccacaaactctggccaatttatttaggaatccgttgaggtgttttgcatctagttctagaatttgctttttctgagctttgtttttcttgatagtttcctttagtgttgaattgttttgtgatagtcttctctcttcatcatgtgaatcgtgtaaagagtttgtgaaattggtcgttttttttcgttggtgggtttgaagttaatggtcatggaaagtgtcaatttagttgcgttggttgcacgagattttgacctcaagttttagacttctttgagggatttgaactatatgcctaagtctctttgtctatttttcctaattttgtaacacaatctcttgtgccgtcgctacaacttttggtgttctaaatgtttaaattgtggggtttcttaacacagggatgaaaacaggggatgcttatctttcctctggaatgtacatccacgagattgaaatgaaaaagttcttcaatggttattcacttctttggctaagaagactaaccggttcatatactcgagacacgtttagtggagtctataaaaccagaggacatgaacatcgtcttcaatgtaccacaaagattctatctttcttcttcttcttgtggttctctgagtttttatttttgtaagtctacgcaatgtatctatagagttcttgataatgatttgtagatagatacttcagcgtttgctaacataaaacattaataatagtgtaccaatgttcatcaataaatatcaaaattttatgttttttgaaatcttatgtacttgattcactaccgactacttaataagtaatcgttgccttcacttcaacttcaacaagagtgaatctcttttatgtgtctctgttccttttctggtgagtttgatgatagagtttggtcttcattgtggacttgtgtgagattatctctttgaagtcatcttctcgtttaaacgcgttttcttttgcgtttagaaaacgctcttaattttattttagcgcacaagtcaacgacgacaaacctatagggaaagcgacgccgttttctatttattattttagtagtgcgacggtgactttgtcttaatatcaccgacggtgacattagccaaaagtgaaacaaaacccaaaacacaagtttgcaacttttataacatctctctctctctagaagcagaaaagtcagcagttgattctaggacggcgacttgacttgacacctgaaaaatccttaccgtgtttgatagtttttcgaaaacccttcaaattgtttcattttttttaagtcttgagactttaaaaaatcctcgcttgctcttgttttaggtctcctgacaaggtaaagatccttgcttttgtctcttttgttcgaatctcaagtcttgttccaaagttttcttactcttcgaattctttccttgctagtagctgttttttttcctttttagtttctgcgtaatcacgatcaccggaaagactaatccttgtgagcttattgaattttgttaattccttgctttaaattgttcatgggttctgttgcaatctttctaatgatgtgtgcttagtatttaagctttgaaaagtctttgaatttttgcttgttatagctttggactaaagtagagtatggtgtcttcataggaaaaatttggaaacttgtgggagttgattgataagagttgttaagatggcaaatgatgcggctgcatgtgcagaaagggctacaaatgatatgctgattggtccagattgggctattaacattgaattgtgtgatcttatcaacatggatcctaggtatttgtaatcagaaaactctcagatcgctttgctagttttcagttttctttgtggctgggaatg

SEQ ID NO: 4891 - DNA, 3000 bp, Unknown
  misc_feature (1)..( 3000): cDNA_ID_2993598_gDNA_ID_1620744_Annot_ID_49675 3000 nt of promoter + ATG
gagaaccggtctttctcatctctagtcgaaattcagcatttatctaagtgtaacaacaatttcataattatttcttattaggtttttcggtgagtttgaaccgggatatatattttgtaaaaatttatactatatatcttatcaatataagaaaaagaagaagaaggatatgtatctcagaagattagttacatctagctattgatgctttcaaagccataacaaaaaacgaaagccttggacttgttagacttataataaaaaagtttatcattcaaagatccatttctttataatttttataagaatctttgtaggagtagtgaattattgcaattttggctgattatatgagtactgtttgtggttgacaacaaaataagtgaactgtttgtgatgtatatatgtttatataaagacaaaatgatggtgtagtttagcaaaataaagaaattaaaggaccattggctgggataattttggagaaatgaaataaagagagaaagagagtgacgtcgtaggaatgtgggggaggaattaaagagataaaagggaaaagataccgaatcttctcatggttttgcaacttggtcggttccaattatttttcacacccactttaaatcataatattgtagggaaataatttcaagctacatattgtacattccgagttccgacagtactgcattccgatattttaattgattcaagttttgattacattttttctttttgctgatttggaaaaaaatcttgattttgtatcgtcatcaaacggttgaatttagagatttattgtattttatatattctatataaacttaacttttctcgtgttcaagtagtagctaggtcgccgaccttctgcatgaatcacatgtctcgtaagtttagagtagtaagttaaaattcattaattgtattgtctcaagaaacacgcatgatacaatagtatttttaaaaaaagaaagtaaaatttttattttattttattgttttcatatatttcaggatcgaccatgatcagaagttttctagatgatatcgacacgaaatgtcagtctatagaaaccgttagcagtgatcagtgatcacttatatagttgctaaattgaccgttacttgtcatcgttttatgttttatcttatcacccaaactgttttttatcccacagtaaacacaattgatgacaactaaaccaaataatatacgtgtttcaaacttaaaagaagaaacagcatcgtggaagatagcccattcccagagtggctattttgtaattaatgaagttttccatgtcctcgatcaaaacaactaagcgacaaaaaggaccgcccgtactaactcgtgagatccaaacgctgctactttcacgcgcctctactacaaattcctctttgcactaacccaacatttaatttctcagattattgatgtaaatgatttaattaccagtttcaagctaataatcaacggtacataaccactttagccaaatcggtctggtttgatttatccaaattattttacacaaaccgatcttgtaagctaaccacaatgcaaatagctaaatggagagtataggacacgcgctataaagaacgtgtgtgggagtgggaatagttcatattaataccaccactaactataatgttcgcttcgtcatatctgactaattactcattaatttataaggtttttatttagtttcaattaaattataaaaaggtttgtcgtactattccactagattcctattaaaacctctgacacagaaagaagggtttcaatctcattaaagagaaaagaaacgattagagaaagagaagagggtagagacttcttttctttgtttctgtggaggctcttcttcttcttcttctctgtctctgtctctgtctctctgtaatcttctgtgctctccacaaatttgtctctcctctctctcgccgactccacaaattttgagcttctttttttgaagttcttgaggtaactaaatctcactctctttatagttttactttgtttgattttgtcaattttgactctttgaattctggggttttccattaaaaaaactcagaaagttctaagatttatctctgaattgagtaagttctattgaaattggcgtatggattcgacagatttttgagcacgatgtatgttttaaatttcgatgtcgacgcaccataaattttatatatatgaaattgaaatcttgataacaacagatttggtctcatcttcttcaagttgttgttgttgatgtggctgctgcttagagtaatgtttgttgctgcaagttggcttattgtctaatccgttatattattattttattttatttatatacagttgtgtttcgatttgtaacattttagattccgtctttgaccaattaaatctttcctccaaataaaatatttattttcttgctttcatgtttttaattttgacagctactactactaagttcgttttaagcatcaattcgtttatgcaaatagagagaatatcatgtcatgtcttaaaaaacaaagttgctcagaaacaatctttttttggttttgattttcaagttagtagtaggaggaggaggagatcttttaggaatctattcctctgttttttttctttggttgagaaggacccagagaaactcttgttttgttttcagagaatctctgtttgtggtctctctttatgaaatctttatctctatcttctttcagattctgcttcttctgtctagttacttagtggccaagattcacttatttgactcggcaggcaaaatctaccgaatatcttatcttcttgcaacttgtttatagacttaaagctgtgtacttactttgttttgttgcttcttcttatcctttgtcttgttctgtctcttggtcgtgatatgaattagttctttcttcttggttaaattgcagaacaagtgaaagagcttaatatccacaagactcttgtttctttcttaa

SEQ ID NO: 4892 - DNA, 3000 bp, Unknown
  misc_feature (1)..( 3000): cDNA_ID_1017181_gDNA_ID_1620744_Annot_ID_49676 3000 nt of promoter + ATG
ctcataaaaacatatgaattcactgatatgaaaagctgactcaagtatatgtgagtaggaagaaacacgtgctaaatgaggaagagcacgtgaagactaatctagatgcatttgtctataaatagtgaacgtagacgtgtaattagcttgttgttgttaagtgacatatgtgtcattaagagaatgatatattcagtgatgtgctgagtagttctcatctgtaacagaaacatagtatcattgttgagaaataaatattagactttccatttctcaacattaacaaaatggtgcggtgaactacactagagtttgcaagctgatataactcattgtactctttgcattcgattaatatacaacagaaaagttcattgactaacgatccatggtccaaaatttcaccagtcaaagagttttgggcctttaatcaaattggtgcattgacttgggcatgagaatgggtccattgacttagcacaagcagtatataataatatgcaacatatataatccagtgaataggttatgggtgggtgatcattgtgtttctctgtagtttaattaagtattaaacgtaattatttttatttatgaaatactaagtttctcctattaaaataaggttgagtatatgcccttgaatttggggagggctaatgcaaagtagatatgtgacaaagtggaaaagcaattaaaagaaaacggcatagagtgcggcctcgggtaaggctaacagctagctttctctacatatgcacgacactaagaaaaaagtaaacggcttgatgtttccatctcttatcgaacaatattgtttaaagaatacagcttgtgtattgactttcaaatcttttatatattccgtgaggatgcaaagaaaacaagccgtcgaattcatgttatctatttcttttcttgagcatatgacagattttgatttaattactttttgttgacatgtcgaaagaattgaaactacgatagattccttacatatatgaatatatccctttataaaattagttaccatatgttctctttgttacatgttgttgaatcatagcaaattacaaatggatgataaacttatggttaatgagatactatagagtaatcaaaaccgtaagataacttaactatcagtataaatgatacattgaaaaatgataactacttgattaccatgatcggatgaaaacttggttaattaataacataacttgtactaattatcacagaactaactgaatcttgggttttaggatgatatgggaggtggagggaatgaagaagatttggtgggaagctgccccattagagcaaaaaacgtgcccaccaactcaaaggcctcattagcccccaatgtgcatttttgttatctttaccagttgcgttttttcttctgttttaaaaaaaaaaatatatctcatagtttgttttaattcaaggtgcatttatttcctggctattaaatctgcaattcttgtacaatagttcttgtctttttcatgaaaataggttttgttttatttgcacaagataaaatatcttcgaagctagtaaaatagtaaaagaaggaaagagtccattaagtttataggtgcatgtgggtttcacagagagttcagaaaatacaaatagaaagctatactttttacaatggagattattcttttgtgtaacgtttttatgtaagataatgtcattttataagttactaattcactcttttttattatttttgttggtgttgtttttctacttctatagatacaaaaacataatatttgagttgttttacactgtcttgtaagttctaattgattaatgttatgaacttagtttatgcaacgttctacaaacaaagagctaattttacaccagcaaaaatccctcaagtcctacaattatatgtccatcacaaccgagttcgaacaatcatataataattatttttgttaatgaaacgaggaacgtatgatatgagaaaaggtcatttcttaatttaaataaatgaaacagtgatatatctttggacgttatctctcgacttgtaaacgagtttaattacattatgcgactcaactttgtaatcaattatttaaagttctcaatttttgtcaattccgttacgtaaattattattagattaacaatttcaataagataacttctcttgaatattttccgaatatttcgttttaattagatattacaactatggttataaaaataaaataaaataaccgtaaaagagtcgtcgaatttggaatataatttgtaatagtactgtattctcctgtcagttttagacacgtggcagttcacgtgtcatatagtcataacccgtacgtttactctttgcctctttcccttttatattcaaaactcctttttgattttgtctatcttatctcgtgaatcgttaattcgttatcaaaagagcttaaaaagctttaaaaaattaacggattagtaataattcaaccgaagagaaacccaaggcaccgaagaacacgatttcagaggtatgatccggaaaaaaaaatccaaagttttgatccttttgttttttggtgagcaaaaaaactggtcctacgctagtcaatggacattctcctaaatttttgtctctgtttttttagattgtaaattataaagtaatttctccaactttctggaaaaatccatccagcaaaagaaaagaataattggttttattgatcaaagatcttcagttttcaaaattaagcactaattatggggttttgtttattaatgtcctaaaaaagagttacacatagagagacattaatgcttgcagtttagtttaaagagttttaagaccatatctcactcaatccttatttccttacatttgtcgtcttttgatgtcatagactcagagatatttatttatcttctttctctctcatttctcattctcatatttacttttgatctcgtggtgttagaatcaaagaaaccgcttcaagg

SEQ ID NO: 4893 - DNA, 3000 bp, Unknown
  misc_feature (1)..( 3000): cDNA_ID_1826416_gDNA_ID_1620744_Annot_ID_49681 3000 nt of promoter + ATG
caaccagcagcaccagctgcaatcaaatcctttacggttctttgaatgtttagcgcatttcctccaccggtatcttgaaaagatcaaaagaaacctatgaagagaactataaccaagcaaatccactattttcaaaaagctatgaagagaactataagcaagcaagcgactctaaccaagaaagattgatactttcaatctttggtaaagaatcaacgactcaatgtttttaaatgttttttttccttttttggttttagttaagcttcttgcattctttaatgatgtctttattatactatcaaaattttgcaactttaccagcatctgcaatgatgggtatattaggagctgacgcacacaccgaccttgccgtcgcagccatctccggtggtctaaaacgacgaaagaacacaaataaaacgaaagcatacaaacaaaaaattactaaagaaagaaaaaaaaaaaggtggcgcacgttagcaaaccgaaatcgggttttcccaggagagaagcggataaggcgtaaccggatataaaaccagcggagaatccggtttgctgcacaatagccgcggataaggcatcgtagcatccaggcataagcacaatgccttgttcttcaatcaggcgatgaaaacgtgtttggattctcgctgtcggattcaccaatctcgccgcgcgtgggttccgtcggaatgttggtgaagctgtaaggtttaagctgctacaacagagtgaagttgttttgacagccattaacatcgacattcttcgaagcctcgaacaagttttttcttctctctaatcgagttagactctgacccacacgcttgggattttaatagagagcacgtggttattatatctcggtcttatcttatggtaacagtatctcaaagactcaaaccacaaggtattgtgaaaatgttagaggcaatctaacaataaatgtataatttggttagcttaagctcatcatagaaatgggcctttatgtcaccaaacctatttcacaacataacacaagagcccacaaaacaacgactcctttctccaccagaacaagcacgacaaaggcaagagagttgcaaaagacctataagatgataacaatcgaaaagatgtaaattttgagaaaaatcaaaataaacaagaaagatttcattgtttttcactttttctccatttctactttgattttacatactctatgggccaaccaatttccaacctaatgcttgataaaaaatgattcggttttactatctcaacaaattgggcctacaacatccaatttcatgtagtgacttgtttttgcctttttcacatctcaacaaattgggtcgtttgtatttaagaaattgttacagctttttagactgaattttactttatggctttatgctctctttttccgttttgattaagggtgaatatgtaaactgttgataccatctgattttttttattttttatttttcttgtgtgcaactataccatctgaattcaattgacattttagccaaataaaaaagattggtccacttggatggctgtaaaaaagtttagtggaagtatttatagggcttgttggcaatcttcaccaacggctataatgttgatctttttaaaattaaacttaccgttcgactgtcttctcaacgatttgacaattagccgttagattagtattactgatttattattaacaaacccatttcttttcttatttttgaataagctaaatcaggccaataaaagggacaagtagagatgggctatttctttttttctctttttttttttcttatgtagtagagaaaagcctttattcttagagctatcatttaccacccattaaccagaagctgagaaatgaagcaagccgaaacgaatttgtagttttggacggtgaaattatatcgggcctttaatgggcatgtgaatagagttgagagtctttttgccccaaataatcgtttaagggagtattggctcgttggtttaatattgggccgaaacgagattgggaagaagaacaatgtcggtttaatccggttagggtcgtgggctgattctggttcacctttatagcgtaagcgaacaaacattgaaaatggggaagccaaattagttaccatccctaactcagttttgagacgtagtatgaatgagccacggcagaacctacgacctaactcgataaagtaatggttactcttggagacggaagaaagcacaaagattttgataaggctttctagttggtgaaatggtcaaaatcgctcggagagccatcataggagcggggaggtgctatctgaatatcccaatgcatcaagacaagatggattcagaaaacaaagaaattaaacaaacattttaaaatatgctcttagttttagataatataatgttttcaataccaattatcttacactgatagtggtcaagttactaatcacttttaataaattggtgatagtcaaacgtattgaaaattatcgatttaaaaatatttgaattcaaaaccattttagtgaaagtttgcattgtagttttgattatccgatcaatctttaatataattacgtcaataataactgaaatccttgaattaaccgttacccgattcataagcactactttccgatcaaaaccaatgagataaaataacttttaaaccctccaaataaaaagagaaaaccttaaaaaccaatttctgttcggtggggatgatgatcggactcggaccggtctaaccgactggattaaaaagtctttaacaacgacaagcttaaaaatttgcctcttagtggcttcaaaacgcaatcgtttcgcttaatactattattttctctatctcgtttaaccaaaaaaaaaaacgagttggaggaaaaaaaaaaccaagaaaaaagaataaaaagcaaaaagcattgagcgtctccggagattaggattaaattagggcataacccttatcggagatttgaagcc

SEQ ID NO: 4894 - DNA, 3000 bp, Unknown
  misc_feature (1)..( 3000): cDNA_ID_1826413_gDNA_ID_1620744_Annot_ID_49682 3000 nt of promoter + ATG
aaacaaaatccttttatttaattaggatatataactttctcgttactaaaaattgaatatttgtttctggtaaaggtgcgcataccaccggatcgacggcatgcttctttgtcacgccacggttgacttttttcaagtccttaggttgaagtgccctcgaggcggttacgtgtgcttcaagattcctctggattgggacgggaaattccaattcgacaaccaagtccttaggtcgaagtgcactacaccgcattgaagaatctgtgggatgacttggatggagctagttgtgtcaatacttgccaaaattgcaaatgttgtactgctacttactctgttgccaagcatgccaagatttttaagtttctctcaggcctgaatgattcttactcaactattcggacctggcagagatttacaacctttttatcacagtcaatgcaacattgtcacagtaccaaccaatgcttccacattcaacatttcggtttcacataatgatcagtttgccgtgaatgcgaccaggttatttcctgctaattcaaagccaaaagttcaatgttctcattgcggctacactggacacaacgctgacacctgctataagatacacggccatcgaagtggtttcaagcataaacagaagagtgttataccaccagaaaaagctaagcatgttgttgtgaatcttgctttaactgttgggaaagtgacaatgaataaaggaattagacttgatgggattgcagagttagtgggaagtacgtcaaaaactcagatacaggatgtgatcgcatatttcaatacacaacttcacaatcctgcaacaaagatagatttgtatattcttgaacgtaaatgcacataaccttaaggcagaagagactactatctgtatgtaatatgaattgttttggggcaaaatctgtaatatgaattttattcgttctgtagactcctagtaagtgacattgacacgtgtgaggctagaaaatgattagccacaaatcacaaaagaagttaagaggcatgcgtatcagccacaaaaatcggttagtctcgtccacggctttagactttagtgtttccaggggaaagattggctgtcgtgaaaaaaggtcttcttgccgggagagttcctggtctgtccgaacctgatgatgaaggttcgtttcactctgttcttgattcctcttcttattgtcttgctctgtattttcatttgtatctataaatcatcttgtacgcaaaacaaatgggttcttaaatcctagcccaaatcatgccaaacaccctaaggcccggatataaatgggcctcgtcatcttttgaaggttttgaagaccacaccaaattgcgcagcaaagcaagtttcatctactttaatataatgagcttataataataatataaataaaataaaagagattacgaaatgggattatgtaaaatttattaaaattaaacagacgacgaacaatacacatccaacgtctcatactagataagaatactcattgataagagttattaacaatggatcagtataaatatcttagctcatatagaagtagcgctcaatattgtgtctagtaagtatagttcgatgccctctaattgcaattgttttacatattattatttttcgatattttttattactgcaaaaaaagagaattattatctacatatggattagtgccccaaacaatttttttctttagatccgccacttgcagtaacacgagcttatttgtgggtattcttcgtcgggtgcacaataacctctccggtaacctacacccgtacaatatttattgcattctttgctagtgaaacctttgccacaaggaatatgtagtccaggcggggtaggcacagggtctgttcctaatcctgttcaaacaaatatatagaggagattttatagaaggcttaattgagattgtcaaaaaaaaaaaaaaaaaatgtcaaataaaaaagagaatacttaattgagagaacaaataaaatatcgatagcatgtatatacatgtaactataccattatcaacttaagacgtcacccaaacaattatattgtaaaactctttatatactattttggaataattagatctcttgagtgatatatatataaacttaaatcactcatagatttcagaaattaatttaagtttggacctggaattgtttattaaagataaaaacacgtaaaggaaatcatgataataaacgactgaactatgaattgtattagcgaaaataaaaaacagaaagatgagtttagagaatttagacctggggttagaagaacgctgaggcagatgaagagaaggaccaaatatttggtagaagccatttcacttcgatggatcttaattttgatttagtttcagttcttttctcggagtgaatgtttgaggatgaatcatacacacaaatatatatatgaaggaaatacatacagtatacgctttatcaattttgtacagtcaatattctaagatattcatttactattacttttctcataatccaatatatatggttaaaccaaaaacaaatattgacttgatatcctacttattttgcaaaatacatactatggtttattaattctgtacattcaatattctagtttattttatttatttccttgtaattcaatatgcattcttataatgacagaaaaaaattcaatatgcattttttaagattattttagatttatattaaccaaaactctacttttgaattaatcagcattaaccaataatataatcaaaactgaaaactctatcgaactttttttttttttttttttttttgtcaatcaactctatcgaacttattatgtgatttatttacagtaagtgacattgacacgtgtgaggctagcaaaatggttagtatccatcacaaaagaggtgagagccacgaatctgttgatcaacaaacaaacacatcacaattctcgaacttcgccggagaatgatg

SEQ ID NO: 4895 - DNA, 3000 bp, Unknown
  misc_feature (1)..( 3000): cDNA_ID_2993602_gDNA_ID_1620744_Annot_ID_49685 3000 nt of promoter + ATG
ttttgagcttaagattctataggacaacatgatgaagcatgtaaacaaagcggacccctcataccacccacacacttactatcatcaataaaatcaccaaaatggtcaacatgatgttgacttttttgtttctcatgatgtttttggactcatcaaattaatgtccattctaaagaatttatttgggagattctatcattttcctctagctcacgtgtgtaatcatcagcgaaaccgacgcatggttttctatttttttcttccattactaaatccacaacctttattaacaaaaagagttataactaattagttgctttcaaaatatcaagttttgtcctaactatcactctgtatctgctcacgtgtattttatataactaaggatcagtgccagagaaggagattagcttcagagacgcacttaaggctgcaccacaggctacggcagccggtggtggtgcttccatggaggaaggagccgccggaaaagacacaactccggtggctgcgattggcaagcaagaaatgccaagtgcaattgtaatgatgcgcctcatactaacagtcgtgggccgcaagctttctcgaaaccctaacacttattccagcctcttaggtcttgtctggtcacttatatccttcaagtgagtcaaaaaataactcaaatatcaaaatttcaactataatcattgaatttgtttgttatataactttaactcatattttattttgctaaataatgagcagatggaatataccgatgccaaatatagtggatttctcgataaagatcatttcagatgcaggtcttgggatggctatgtttagtttaggtatgaacatgttcttataaacctgcataataaataaaattatgtataacgtattctaacaaaattaaactataggcctgtttatggcgctgcagccaaagatgatcccttgtggggcgaaaaaggcaacaatggggatgttgatcaggttcatctcaggtcctcttttcatggctggtgcttcccttcttgtcggattaagaggttctaggttacatgctgctatcgtacaggtaaactattcagagtttaccttgatttggcccatatatattattgttggaaaattaaagaaaacatacttggtgatggagaaagtgtttaagattttgggagtgaattaggaagtttaacatatagaagggactaattagttaaaaaaaaatgaaggatagatatgttcatagctttcaaaagtacaaatatctatctcatataaacctaatatagtctaccattatatctagacttatatgttacaaagtatctagatattatgaaaatatctagatattttacatgatgcaattctcctgtattagtctaaggaggtattaatattttaagatggttctaaagagactctttaacttgtttcaagttttgcgtttggtccaagaaattaatgatacctggatcattgacacataattataactaatccaaaatcaagttaaatatttcaaaatataaattacccgtggctataatttaaacttcgtttcttataaaagttttcgattaacttatagtagagatatgtacatctaaatttgatgaagccgatatgttcttttaggctgctctaccgcaagggatagtaccatttgtgtttgcgagggagtacaatttgcatccagacctactcagtacattgtgagtctcttgctcttctttttgttgttcttcatttacatttacggttgaacgtttcaaaatgcggtattatggtttatgtgaaatctctgttcttggtgattttttgttttgttttcagggttatctttgggatgatagtatctttaccagtaactattttgtactacgtcctcttgggcctatgattcacacaacacactgaagaaaaagattacaccggagaaattaaatgatctatgaataaagaggtctggaaatagagaaatgtgagctcttaagagttgttcttgaggagcttgtgagaaagattaattaacggttaattacattgttgaatcaaattactggtaaatggttaggtgaataatttaattttatgtatttgatatccaacattgatcgacgtacgtacgtagtgaggtagaggcttaggttaggaatcaatcgtgaatactatttcaacgttgattcccgcgagctgaatattttttgtgatgtatagtaaaacgcatatgattataggaatcatcataaagattcttgtcatgaagaacaatattaaaccaaattatgcattacgagcaaaataattatacaaaaatactgataattataacttgggtcattgtattttctgtgtaatgtctactatcccttaattagtcggtttaaatcaggaaaaagtataattaatgacactcataattgtatcgttaagacttgaaagtgacggccaagaatacaattaagagccaattagtgatctttcataactttaaaaatctcacaaaagtagaaaaaaaaaattccaacttgatgaccaagaataatactattaaagagctatttaagatgaaaccgcccgaaaccaaaagcattcgatgggtacaccgattactgcttttagcaacaccacggcgtgaccatcaagactaattaactaagaccacattttaaaaaaactattaataattactacaatttgtaattaaaaagatcaacgagaaatgccacgtggacgaatactagcaacgccaagtggaaagagcgttcgagagaacaaggcaaaaccaaatacgcccctagtattctacagatgtcgactggataattacaaaagatttcaataaacagtactaattaatttctagtggtgagtttttgtaaatatctacttcttccaattaccagctgctatataaatccccttctctgtttctcttttcttacatcacaatcacacaaaactaacaaaagatcaaaagcaagttcttcactgttgata

SEQ ID NO: 4896 - DNA, 3000 bp, Unknown; identical to SEQ ID NO: 4895
  misc_feature (1)..( 3000): cDNA_ID_2993602_gDNA_ID_1620744_Annot_ID_166595 3000 nt of promoter + ATG

SEQ ID NO: 4897 - DNA, 3000 bp, Unknown; identical to SEQ ID NO: 4894
  misc_feature (1)..( 3000): cDNA_ID_2127560_gDNA_ID_1620744_Annot_ID_166590 3000 nt of promoter + ATG

SEQ ID NO: 4898 - DNA, 3000 bp, Unknown; identical to SEQ ID NO: 4893
  misc_feature (1)..( 3000): cDNA_ID_1444645_gDNA_ID_1620744_Annot_ID_166589 3000 nt of promoter + ATG

SEQ ID NO: 4899 - DNA, 3000 bp, Unknown
  misc_feature (1)..( 3000): cDNA_ID_2127541_gDNA_ID_1620744_Annot_ID_166585 3000 nt of promoter + ATG
cttgatacgaccagacttcaagatggtatgatcatatgcactttaataccaacgttattaattagaataatggctgatatgtgctagacccaagcaaacgatacttgaagcagaaggtgaagttgccaaatccaaacatgtgaaggtaccctcgctattcctatcttattttccttccctttgtttgtttgactattatagtatttatcatctttctcaaaaatctgtacttggctggtagtttatatgtgtatttctgatatttctttataattagcctaagccaaaccgttttggttcttgtgcagggtcccgctggccaatgggttgatgtgatgaagaagaaaagagctattcatgaggagatcatcaatacaagacatcagcagaatcaaaagacttccaataatcatttggagatggtatttcttgcagtttctaatattaaactgtgccacatgcttctttctttgccattagtttcactcacttaaatgttttgatatctaggaagctgaacctacaacttcttttgttgatggcacagtagagggaagcaaaggtatgcgtgctgcttgtgctcttgttattttaattctatgttaaagtctgttatagttgatcttttgaatagtttgtggtgcatggttggttttccacttctttggttaccttaccttcaaataaactctccattgttttcagtaagcggtaagaaaagaaaggcacaagaaaccttcaaggacgatgaattctttatcagctccataccagtaaatcatgtatgttattttcgttgaataaaagcattttctgtgtcagtacgcattagcagtcaaagctacaatgcttatgatcatattgagatgatgcagagtttgactctttattactcttatgcacgtagcattcagaggcagggctatctctgaggggtaacgaaggatttggatcgaataggtaaaatgatttttgatgtggctatttgtgacattccatagaaggatcaagggattgcatttaaatgttgcaataacaaaaatttctgtcagatattgacgatttcggattgtaggttggacgctgctgttctagatctagttgcagatgatgggcaagggataaagcagcaacaatcaaattatcactgggacaaggtaagagttgtggttacttcataacaattgccccaactgtaatcttaatcttttaaaaatattggatttgtctttcttaacagaaaggtaagaagtacatcaagttgaacaatggagatcgagtaacagccagtggaaaggtagtaaaagtgtctttgctttaaaacattcgatgattctctgggaggctttaagccaacactaaggttcttgagactaaatagataaagacagagagtggagctaaagcgactgcaaagaagacagggatatacaagagatggcaagagaggtctcacaagaaagtatcccgagacagcggtgatgcagacgaaaccacacgaatgtcaggtaattaatgttggacagcgtttttttaacacaagttcagcgttttgccacctttgagttgtcaataggtctaaagagaaaacttggcaggtagaggaggccgagatgggaagagacggcaaggatcagtgcctaacgcacatgttcgttcagagatcaaagatctggaccaggtgcgtaaggagagacagcaaaaggcaaacaaagtttcttatctgcagagcaagagaggcggaagaggtggaagaggtggggccaggggaggccgtggtggtggggccaggggaggccgtggtggcagcagggattttggtggtggaggaagggattttggcagtagcagcgatagaggtggaagaagtggcggtagggattttggtggtcgtcgtggtggtgctagcactagtagcagaggtggtaagagaggaggaggaagaggaggtggaggtaaacgtgggagaggaagatagtcatgaagaagaagactgtcttcaaaactttgagcttaggcaaactattacttgccaaattgttatatcactcaccgaaccttctctactcaaattttgtgcaacactttataatcttgtttttttctgcaattttggttttcatgtatcaataagttggttgacgacaaaaagaaagcgacccaacactagacacttgtactgacgattcgttgtttcatgtcaggttaagtaatgatgacatcaggtatagtacaacaaggttctatggtgtagtggttagcactctggactttgaatccagcgacctgggttcgactcccggtaggacctttatttttttcattagccatttcctttttgattgtgattctgtgatccgtgactcaccttgaaatccaactcaaaagttaagcgtattcaaagtgtatctgtaagtagatagaagttattatccataaaacaggttgggtaaaaatatctaaccggattcatagctaatataataataacttccctgtatcagtctcttgaaatatgtattatttcttctgcaacgctcaacaatccataatgcaatcatgttacgaggtccaaacgcgatcgtgttttaaactctatactctttagggtctaatggaaatgtctaaatcattgcctaacaagtattttgaaatggagaataagcaaaaaggaggaagaagagaaaaagaggacatgaaatgaatgataaaaagcactaagtagacagttaaaaagagagagtgttgttgtagtcccccgctcaaaagcggcgcaattagtttattagaaaagtgcagatcatcactgtaaagccaatctcttttctttttcagcttcttgaagcagatcaagatcaagaaagaacacttttgtgaacttcttcttccccacatctcctaaaagcttcacacacaccaaaccaagcgtttcttttcttatctactcgattatcaacacatcttttcctgaaactccttccacatctttgtctgatcatg

SEQ ID NO: 4900 - DNA, 3000 bp, Unknown; identical to SEQ ID NO: 4892
  misc_feature (1)..( 3000): cDNA_ID_1017181_gDNA_ID_1620744_Annot_ID_166583 3000 nt of promoter + ATG

SEQ ID NO: 4901 - DNA, 3000 bp, Unknown; identical to SEQ ID NO: 4891
  misc_feature (1)..( 3000): cDNA_ID_2993598_gDNA_ID_1620744_Annot_ID_166580 3000 nt of promoter + ATG

SEQ ID NO: 4902 - DNA, 3000 bp, Unknown
  misc_feature (1)..( 3000): cDNA_ID_3074810_gDNA_ID_1620744_Annot_ID_166577 3000 nt of promoter + ATG
aatttaaatcccgtattttatcgcattacgggattgtaatcgaatctagcaaactagcaaggattcagatttccagttatataaaatgataaacaaattttggaaaagatagcaaaatccattttcttgtttaatttttatttccactacgagtttcgagacggcgagagcatttaataagctccatcatgtaaacaagtagggacgagtaaatagtccccaaaactaattgatggtgctgaaaataaaatcaaactatcatttaatatacgtatcgtattgataaaataatcaatggcttagattatctccgtcgcacgctttccttgataattaataaattcatataagctaatcatcatatataaccaaatgacaatcataccctaaactcaaaattaatttatttatttagttctagaatttccaatatatacatgtcttcaaataaacaaatgttataaaattgtagaaattatatataattgatgcgaaaggcgtgtttaacgggagagttgtgaacaagaagaagactcaaaaacttctctcaattctaaaagctcgatttttttatttttttttggttccttcaaacttcaaagtaaaatcatggcaattttcgatctttcgtcgaaatcattcgatagccatttgaattttccgagaactttcgatgatcattcagattccggcgtctgttcgcctcctctgtggagaacgagtccaccgaaaagtcctgctcatcttcacaacaattaccagaatctctcacctgttacgaaggctcaagtcatcgctcgtggtcagcgtgagcttatggatatggttagtaagatgcccgagtcgtgttacgagctttcgttgaaggatctcgttgaggttaacacggaggaggagaaggtgttcgatgaaatgcctcagagagaaaaaaagccgaggaaagtcgtgaggaagacgaagagtgataaatgggtggatccgattcgaaacggaggtgttaataatagtgggtttcttctgaaactggtgtttcctgttagcttgggtgctaagaaaaagactaataagaagaaagataatgatgatgatgattcttctgtgacaagtaaaaggtcttggatttcttctcctagaccttcgatctctgatctgtcgatgaaacgagaggataaagattggtggaaggatggattgtcagaatctcgtaggagtcaaagtgttgtctcgaggatcaacagtgggagctcaaagagcagtggtggtagtagcagtagaagcaatagtgatcgaagccgaaacagtctaaggtatccacaaactctggccaatttatttaggaatccgttgaggtgttttgcatctagttctagaatttgctttttctgagctttgtttttcttgatagtttcctttagtgttgaattgttttgtgatagtcttctctcttcatcatgtgaatcgtgtaaagagtttgtgaaattggtcgttttttttcgttggtgggtttgaagttaatggtcatggaaagtgtcaatttagttgcgttggttgcacgagattttgacctcaagttttagacttctttgagggatttgaactatatgcctaagtctctttgtctatttttcctaattttgtaacacaatctcttgtgccgtcgctacaacttttggtgttctaaatgtttaaattgtggggtttcttaacacagggatgaaaacaggggatgcttatctttcctctggaatgtacatccacgagattgaaatgaaaaagttcttcaatggttattcacttctttggctaagaagactaaccggttcatatactcgagacacgtttagtggagtctataaaaccagaggacatgaacatcgtcttcaatgtaccacaaagattctatctttcttcttcttcttgtggttctctgagtttttatttttgtaagtctacgcaatgtatctatagagttcttgataatgatttgtagatagatacttcagcgtttgctaacataaaacattaataatagtgtaccaatgttcatcaataaatatcaaaattttatgttttttgaaatcttatgtacttgattcactaccgactacttaataagtaatcgttgccttcacttcaacttcaacaagagtgaatctcttttatgtgtctctgttccttttctggtgagtttgatgatagagtttggtcttcattgtggacttgtgtgagattatctctttgaagtcatcttctcgtttaaacgcgttttcttttgcgtttagaaaacgctcttaattttattttagcgcacaagtcaacgacgacaaacctatagggaaagcgacgccgttttctatttattattttagtagtgcgacggtgactttgtcttaatatcaccgacggtgacattagccaaaagtgaaacaaaacccaaaacacaagtttgcaacttttataacatctctctctctctagaagcagaaaagtcagcagttgattctaggacggcgacttgacttgacacctgaaaaatccttaccgtgtttgatagtttttcgaaaacccttcaaattgtttcattttttttaagtcttgagactttaaaaaatcctcgcttgctcttgttttaggtctcctgacaaggtaaagatccttgcttttgtctcttttgttcgaatctcaagtcttgttccaaagttttcttactcttcgaattctttccttgctagtagctgttttttttcctttttagtttctgcgtaatcacgatcaccggaaagactaatccttgtgagcttattgaattttgttaattccttgctttaaattgttcatgggttctgttgcaatctttctaatgatgtgtgcttagtatttaagctttgaaaagtctttgaatttttgcttgttatagctttggactaaagtagagtatggtgtcttcataggaaaaatttggaaacttgtgggagttgattgataagagttgttaagatg

SEQ ID NO: 4903 - DNA, 3000 bp, Unknown
  misc_feature (1)..( 3000): cDNA_ID_2127517_gDNA_ID_1620744_Annot_ID_166574 3000 nt of promoter + ATG
aaacagagcttttaaaacccaaaatagctaacaacatatatttttactgccccacataaaataggaaattaccatcctcccttgtttatatgaatcgattcccacattccacatttccatgttttgtaggaaccaatgatcacaatttcctattttaaagaccctacaaataaagcattgatcatttgtctacaaattaaagcaaattcatcttgaccagagctctactaattcattagacatggagatcattccattgatgctcatttccgttatcatactcttgacatcatttccggctccgattaaagtgtccggcaggggtggaggaggcggctttgttggtagtggcaactctcctagtattggaagcggctattttggtggtggtgggaatcctggcaccggctatatgggtgggggtatccctagcggcggcagcattagggatgggagtaatgttggcaccggttataggggtgggtttcaaggaggcaagccttcaggtggtggtgaccccggtgcggcaattgtggtgtttcctaagaagcccgaggaacctgtgaaggtggtgccaacgccaatgccacaagtttgcgaaccgaaagttagacattgcatcaatgtacatgtatacggacgcgccgggcaacctcaccgaggcggagcatgttgtaacaaatttaggtacgcgagaagatgtgtctgtaaattccttgtgtctaatgatactcacctaaacaaacaatctaatggtgtacttcgaggttgtcattttaaacgcaattgtgtcttccgtaactaagatctagagattatgtatgtaactaatagaaaataataactatgtatatacaagcaaatatatcttggaataattgtacatttttgtaaggttaaaaatgtatatcttaatgtattttgtaaatgatatatgagtgctcggatagacagttaaacttgttcttcggcgatgatcgtcgtttgcttgagaatacagtctgcgagcacatggtgagagacttggctatgctcccgatgggtactctttaatgctcttctacagaggtacaatcctacaccagagcttccaccgccgtacgtttctgctcctccgccggtgccttgttaatccaaatttttgcagtctaagagagttgtttggtcacattatcacacataaaataaacaaggatacagctttaatatatatatttttacatagaataaggtttgtatatctatattttggtcactatttgctagagaataagagattgctggatgatcttggcggtgctttctgatttctgtaacaacataactttacctatctatattgatatgcatggaaagtttataagaattaatcatgatatataatatatgttgcagtttatatagtacatgacatgtataacgaaacttttgtctcgtaatttctcttgcgtagaaaagtctgatcgggaaggactgaggggtattttcgtaattttacagattgcgattctaacccatatgaccatatcacgtaccacggagtctataaatattaatcacccatatacacataacataaagttgtaagaaaaaagagagagacagagatttactcaacggctaagatgaaaagttcatcggagctccttgtaataatgattttcttattcttggcgcttctcataatctcccacgctcaatcacttccaggtacgtttccatttaatagtatgtaatctcacgtattcttatataatttatataatctcatcgtattgtatcaatagtattattattaatatgatttggacctgtgttgcaggtacgccgtatggcggccctggtccgtatccgcgtagttaccctgtgtgttacccaccgtattgccgtccatgagagtttcaatttggtcacatgaatgaattatagtcaaatacctatatcaaggtgatgtatgtgtgtatattattatatgttttcatcatttgatggagaataaaaagcttaggaaatatatccatgttattatatgtttcagtttgtaatatgtataatgatattgctggctctgtccctttttttcgctgtcaccataaataattattggatttcgaagagatcaaagcgaccagaaccatatcgagatggaatgaaactatgaattctgagatctaaattcaacaatggcaaatggtcaccaatcaaacttaaatttcaaaaattaaatacccatgttataaaaactaaaacttaccatttatttcccaactattaaaaacaaaccaaagaacgatttgtaatcaccatcggaaatttcatatttaaactcgtgccttgaattatatattacgagaatcaacgctttatggtttttcgagtgtacaatgatcgagctccattaatggccaactctatgttcaataatgtaaatttcatgaacagaatagtcagtcaataccgatcatgaaagttatgcggacgaaaacaaaagcataaagaaaaatctacgcagagagagggtttgataactactagtagggagtgacaagacatttttgtgtgatgctccatgcacatatttatgtcgtatagagaggttcgatagcagcattgatatgtccatgtcgattagtcactacagttttgaaaatgcatgtagttccaaataaatcgtctaaaatgaaaagccaccacacaagaaaaataacccttaaaaatacaaaattaatttcacaagaaatttaatctatatctacaaaatagttacactaaaaatatatctatatctcatgtaaggatcagttagatgatctacaaaatttctcacataagtatgtgattgtaaatagacaaagatccaccacaaggtctattatctcccgagggattgggaaggacggaggatattattgtaaatttcccaaatgtgttcttaataagtagagtacattaatcaaataaatagataaaaataagaaagagagagatatttgtttaatg

SEQ ID NO: 4904 - DNA, 3000 bp, Unknown
  misc_feature (1)..( 3000): cDNA_ID_2127506_gDNA_ID_1620744_Annot_ID_166571 3000 nt of promoter + ATG
ggagcataactatctatgtgttgaggaaacgtgaaaggactcaggagcttaccgaaatcggaacggggacgtttcataggaccaccaggaggatgatgttgctgtcgctgctggttccagtacccatccgccatggaaatcgaaggatcagaagctactagaagggaaaaattaagggaccaaaaaaaaaaccctaatttcgatgaataggttcgattgtagctggatttgatagatggaaaccctagctttgctcgttcttctgctccgaagcactctcgaaatcaaaagttttctcaaatctattgattccaatttcttgcttctcgatttcgaagtttctgattattttgtcttaaagatccgaaatctcgatgacccggcccgttttatggcaacagatctcaatttccgcgttggattaacgggctgctaaatcactattttaaggcccatttaactaaagttggatttacgtggatctaaaaaagtctaaagataagtgaatgtgtgaatcacggattatatgtgagtaacgagaaaatcataatgaatgaaaaactttgaataagtgaattaatagctgacaaaaataaaaacaaggtaaatatataaacgacaaaacaaaagcagaattatgtttttataactggttaagtggttagtataaatgtaggaaatgaggagatggacccaaacacaagaacaataaacaacaaaagtaagtaggtttccatgtttccttggagcttttctttttgttaaccaaaacttcatttgttctcaactcttaactcttaatcctttgccttaatcatcattcattttgtttctctaaagtctaatcatacaatctatcaccatcgcatcctcttagtatttccttaaattttatcaaatatttccgcttcagaactttcctattaaatcttatactgtcttgataataaaactttatagatactttcataaatatacatgtaatatggttttaacacacatatatatacataactatttatatgatctgtattagtttcttgaaacgatattgtcaagtgttattcatgagattttacgtttcagtaaaaatattgttcgtcttattcattaacatgttattcttaagtttacttacatagagataatataatactcatgtacatttgatttagacttagaactcaacatttcgaatatagtataatatcatctatgattctatatatgtatggaaaattgaactacaactttagtgtcttgatagttgggcatgcatcatccaatccaaggtttcgatttgcttttacaatgtcgagaagagctagatcctatgtaattatgtattggctaccaaacaaatcacattcatattcgctaaataaccagttaaccactaactattttgttttgtcggtgaatgtcaaggattacgcaaataaagaatcatataagaagaataagattaagggagacgcactattatagttttcaccaaaagtggatacattctcctcgactaactccccgaaaatgtggagagaagcacccagaccaaatgggcccacttacctctccttagggatacttttgtctttttcatagcaaacggcaaccaacattcaacgtagctgcgccaaaagaataaaccttccctactagtaaattaccattgcgtgacctcgtgttagcccggacaacctgaaccggccagctcagattctaatttatatgttagggagatttggaaattgattacaagtgaaattgtaatggcaaggaatctatacaatgatattaaaagtaatcaaaccaagaaagttataaagtcaatattattcatatctaaacaaatacctaatatcaaaaaacaaatgctgcacatagctaattgaataagaaatcaatattgatcataattaaacaattaccaatttggtcaacaaacaaatgatgcacttagttatctaatttttttatttgtgtttaatcataagtttttagataaagtggttcaaaccatatactgatatacgcacgtaaagatttgtatgttgattagccaataagcttacttttatataaagtataaattaaccaaacaaacaacttcttcacaatagagaattggaaatctaactatgcaatattgatcacaatgaaagtacgtacgacgaactaaaattagttctaaaacatagaatatgatgtaatccactcccataccatatagtagttttttaaaaagaatacaacaaaaacaatttaagttcgaatgtacaaacaactgcatggggaacgcctcttcactttttttttttatttttcttttttcctaagcatcaatagagttatagggatgcctcaatttttttattttaaagtataaattgttgttaaaaacaaggaaatagaataaagtataaagtatatatttattaataactccaagaaattaaagtgtttcctttatatttatatagatgtaattaatttgtggtaaaacaattttaccgtcgagtgtctgtgactccgtcttcttcttcttcttctccctctcacatcgtcgtcactttctttttggctattcttctctctgtcatcgctgtctctgacttcattgtcttcctccttcttcctttttgcttttccgtcgtttttctccgccggatttttctctctccaccaccactacctacctcctcctttgtctcgctggaaattgtttccgagctcaaaattaagttcctgaagatcgggttctagtccttttccatctcggagaagcgtctttagatctgggcaagcactgccatcttcaaattttttaccttttttctccttctctatctctcttcaccaactggggtttggttacgggttaaattgatggtttccgaggcggctagaacctcgtgggctcttgtttgtagatgatgaacggtccttcgtgtaaggatcgaagagggtggttctcttctgctctgtttttcacatgga

SEQ ID NO: 4905 - DNA, 3000 bp, Unknown; identical to SEQ ID NO: 4888
  misc_feature (1)..( 3000): cDNA_ID_3408919_gDNA_ID_1620744_Annot_ID_166569 3000 nt of promoter + ATG

SEQ ID NO: 4906 - DNA, 1694 bp, Unknown; identical to SEQ ID NO: 4887
  misc_feature (1)..( 1694): cDNA_ID_1826452_gDNA_ID_1620744_Annot_ID_166563 3000 nt of promoter + ATG

SEQ ID NO: 4907 - DNA, 3000 bp, Unknown
  misc_feature (1)..( 3000): cDNA_ID_1826538_gDNA_ID_1620745_Annot_ID_49687 3000 nt of promoter + ATG
attttttcaatttaaaattcccttatgaatatctagctcatgaccgaaatcaggcactaatttagtaagacaatgtaattggtgttgtgagcaaaggagtctctcgaagcttttttacacaagaaaataaattatataatttttgtttcaatttctttcatataactataaaatattccaacggtctctctgggataaaatcgcttatatacttggaaagtggttttagtaaaaatatataatgtgttattgttgggtggtaactaaaaatttctcgaatcggttagttgcttaacagttatctaaaattcaacaatggtctacaagatttggaaatttttaaaattgacaaaaacctcaaaaaatttcaaagacctttccgaaacaaatcaaatcaaattaaattttagagtattcggattagatcaaattaaatttaaattctaatcaaaaaccagtaatcacatttcaataaaacatggttatcggttaacgagatatggtatttcaaataaatatgtcgaattacatagattctaataaattgtgatgtttagtgaattaataataattttctcgattaacaaacaaaaaatatcaaaagtttaagattcaatcatgtgacgaatagaatttggataaatcgtatattctactgttatatttattattattattatataaaaatgcatgaagtatatgattaataacgataagcgaaaaaaaatattttacacagattgttacgactcctactgaatagttaacatttttcacatacttcaaaaaaatatagtttaacagaaacttttttcatatttttatcttttttgtaatacaaatattaaaacaaaatgtttataataaactgtattatgttacatatataaataatatctttaaaaatttgctcatttgagataatctagtaaaatggttgaaaaagtaatatttttatgttagaaaaagtaaaatctaaaaaagctacatggcagactactatacgtttgcaattataaaattaggagagccaaccgacatgaaagagcatttatgtaaataacaatataattgtggaatatgggcacattgttttcatttgttaattaaaaaagacataaaaggtcacctgataaaaaaactctaatacctacgcttttgtttgtgttcgatctaaagtacacattttcgttctattttatacaatcttttggcaaaagtcgcataaactaaaaactcatagaagctacaaatgttttcatttgtattttctttttttaactaggaaatgtcgtaccaaaattcatcataactaagctttattaatttaggcatattagctgctactctcgatgactcgatcaatcgattgtctgaactccaagacataattgcagccgagttatcaacctttgttacaaatgttttcttcatcaattcatcaaatgaagtgacataaaataccgacatgtctctttattcagctaggtactctcattgatttcatgtactttcttaagtcgcacccgtcaattcctcttatagtatgtgtgtttcaaacagtatacacgatatatagagagagaaaagaacagaagatgacatggagaacaaacaactttatgcggcttctcttctttaaaccattgcactctgaagatacagaacaacgacaagctaagaggatatgttgcgagaaatgttttcaactagatattccaaaatcacatacaaatagtctttagactctattttttacttcattttatattctctaatttttttcaaattcaaactcaacacataaggatgaaagatgtgtataatgtaaccatattttatgctgaacaaatttaacattcatacaaaaaaaagaaataaatagctacttatttatattttcttttttatgtgaaataaattaaatttgataaagcaatttacagtagtgaattaccattttactcttttgtacttgtgtcgttctactttctcgttctcatcaaatagctaaccatcaaaaatctctagttatactgtattttctaaacttacaacattagttttaacttttaacaaacagaagttggataaacagaaaaaaaaaggattcaaaataatttttaaataaaggattatcaattatcatttaagtgcacattaatacccgtttaataatttattcatgtaattattaattgttctaacgtctgaaaacataattgccaactgccaagttcttctacacacatgccacatccttggagccttaacgaccttccacgaggaacttcgtccaatcttattatattactaacccttttgaatctgccttttcgttaaaatatttttataatctatgaaaacgatttaaatttatctactgaacaaacaaaaatttgtcttgatattttttaattctaccgttttgttttcactttaactattaaattttcttctacattttgttattgtcaaccaaatacggtccataatcgaaatctacggaacatatatacacaaaagaaaaaataaattgtgaacatgaattcaagttatactatcagttttaaaaagtttaaaattcatgaactataaataaaaataaatctttgcaatcttctctagatacatcaagaacttctctaaagctatatttgacttttcatttcgttagttacatcacccatggaaaaaagccaaaggtttaaattttcatatctgaaaagtaaaacttatataaaaatgcaattaatagaagaacaatatcgaaaaaagaaaagttattcataattaatttgttccggatttacccttcgcgctacgcctatttaatcaaacgttgtggtagccttcgtagaaactactcacaagccaaagaccaaagtaactaaaaagtttacaagtccatcaaactgttcttttacttctcaaacactcaagaaaacttttcagttatcttctataacctaccccaatactttttctttgctcaaaatg

SEQ ID NO: 4908 - DNA, 3000 bp, Unknown
  misc_feature (1)..( 3000): cDNA_ID_1826530_gDNA_ID_1620745_Annot_ID_49689 3000 nt of promoter + ATG
tgttgatgaactcaactggcttgtcttgtataccatcaacatgttgtgaaagtatagccaagaaggctgacctggggatgaaattgggcagtccaacacacttgcattcgtcaaggatcttgatctcatccatcaagaactcggccacttcttttggctttgcttgcagactatcagagaattggcttaacatatcagccaagcgagcagtacaatgcatgttctgatcatctgggtattcagagaagtctccttggactagaatccttaagagggactctttggcagaaccaatgatgtccatcaatgccatcaatgcttccccggtagaagccattaccattggcagtttgttcaactctagaacagcagtgtccaacttctggttgatcttgcttacaattttaggcaaacatctagcaatcatgcttgattggataagcattagcttctgagctaacacagggattcccactatgtcttcatcaattaaacttagcactggatgggtcctgaaaagtaactcttcttgcatccttgcttcttcatatgtctcttctccaatgcggtttctgacgcacacgtaaccaagaacaatactcacatcatctgcagttactttctgcaagagaccttcaggagccatgtctgcctttgtcacaacagctagtgtccgttgaccggttttgtcaacttttctagacatgcgaatggattcgcatgtggtgaagtcgaccgtagctgacagaacattgaggattattgattcttgaggctcaatgtactccataatcatcccagagatctgctcataaatattttccggctgtccattcactggaactcgagttataccgggaagatcgaccatcgtaaggtctggaacaccagccttcttcacatggagggtcaatggagcatctgagacccctttaccagatcctgcagcacatgaattttattagtagttaatcatagtcaatacttgttaacctcaaactcataactttgtatcagtttcatcaaatagcaaaacttgtaaaaaaatcagatgggtaaagaccaaactagtagctcatataacacctctaggcacttgtggtcagataaatgtctctgtcaggttagcagcaaaatacacttaacacttagagagagagaaagagaacataccagcaatcacatctgttgcagcacgaatagcttcagcgatgtgttcctcgtccgtaggaaccactttgtcgttatactcaagccaaatctcaggttcagggctagagcttcgctgaagcctcatgacaagaggaaccctagtgcagattccttggccacgaggtaaactgattcctgccaaggattcaagaacacttgacttccctgaggactggtctccaaccacgacaatggtgggaagatggatcccttctctcatgacattgaggttcctaagtctgtccacagtgtcaagcaacggccttatccgatcgttatatgaagatataatcggtgcttcaacagaaacaacatctttgttgctacgggacttctttttggcaattgcgagagaaggagagttttttttagtggcaactttcttcttaaccattttcttcttgagacaagacaagagtgggagagatagagacagaaaagagatgttttaagggtaagtgatgagattgttctaaagagatatgcaaagatatatattagaagtaaacgtttgagataaaaggatgtgagtaacgtgcatgttgttggaatcttaaaaaaactaattaagtccattattacaatatagattatagctcatagttgaaactaaaaagtctccattaaatccttaattatgtgtatatcaatatttaactggctttaattggctgaattttcctacggtgacgtttggtaatatgaggtaccgtttgaacttgtaagtttgtaacaaaaggcgtacctaacagagcgttttttgttgatctcaagattcgagatcttattgtttatggctttatgctctgcttttctctgtttcttactttgtcttaatttaaaaacaagagtggaagagaaggaacgtaaaagagaagttaatggtcttgtactcttgtagtagttaaaggtaaattcatttcttactaacacatattttcagcagcaagagagacttgagagattttgtagataataaatttgtaatatgatgtaagaatttctcagctcgatgatattatgtagaaaagaaactgctttcaaattgttaaattcttcccatgatgcagattttttcttatgacggacttttgtataacaaatcacatataaatctattttctattatgttcttagttcaaaaataacaaagattactctatcaaacaacagagtaacacaattttcatagagatttattttttagattagtaatgtttgaataattttattattgtaatgaaaaatattgtgtatttaaattcaatcaaccaaacaattttactaaaatctaaagtacatgacatacccaattttaacattagctcaacaaaagaaaagaaaaaaaatctataaacttttggatttacagtctactacaaataacattttattgtttgtcacaaaataagactaacattttaattttagggattttataagattttggttgttatttctgtgttttttttttaaggtttaaaataaattctaaaaggtatattatgatgcaaatcaaagtttatattattttctttaattatgttaaagtaaaagtaatttgtttttttggtagaagtaaaagtaaaattttcccagagtcgtctgcgttcagacttggggacaaattaaagctgatgatctccggtcaagtactcctctcgacgactcaaaaacacacatattttacgaattcgaatttcaagtttccgattctctaaatccaattgatttcactcttcctcaaatgaaaaagccctaattttgatcgtctaaatttcatacatg

SEQ ID NO: 4909 - DNA, 3000 bp, Unknown
  misc_feature (1)..( 3000): cDNA_ID_1826526_gDNA_ID_1620745_Annot_ID_49690 3000 nt of promoter + ATG
tctccactcaatgtccttgttggcggatatttcaaaactctttgaatggatctaaaaatgaaaaaaaaaaagaaaaaaaaaaagaagacatcatctaaccatgagactatatgcgactatatatcataattatatatatgatcatgaagtgaactgtttccctgaagaatgccacacaactccaattcaacccaaaaacaaaaattcattccaacagagtcccacacttacttccgctcgatattacttggctttagatccctgtcgataatgccacgatccaagctccttgccagctttagttgcttgttctctgaaggattagtctttcccagttctgtatcccagacagtaacaaattcatttgttgaacctattggggcagttatgaacaaattggctccagactccttgaaatcaaaagcagagagacataaatccactggtgatttcaatattgcaagacacacatggagacaatttgaatatataagaaggtcacagacagatctaactgcagtagatactgcacctgaaatacaacccgatgttcaaaactacagaaatcaatgaccacaaacagatgtgagcttccatgtttggtgctttcttgctccttaatcgtatccaaggatttcaacataagtcgatccagccaatctatgctttgaatctgccccctctcatacttattcatgagcttctctaaacgctctagctctccacgctcatgccgtggaacctacgagtacagaaaaataacagataacccaagaaaaagtaggtcggcatcaagaacgatatttcggattatataggaagagttgagatgtatcagaaacctttccaggagtagaggttggaaatgaaccatccgcttctttcccctgccagagccttagcttctgcttccctgatttcatttgcatcttgctgttaaaaagaaggactgttgccccaccaatcagtccctcagttttgccacacgaaacatcccatacctgatatgagcataaacttttcgataagcagaaaaaggagagaggtaccataaaagaagcaataaggtcagagagtttttgtttactgtaatcgcaagttgtgaatgggcagtcaagtcccggtatttagaactgagagtgatgagttcgttccagcagtatggtggtcctgtagttttcaatctggaattaagaatagagctagatgaaacacaaagcacttctacaagagtcatcaacatcatcaaaacacaacaacactacagggaataaagaaacataagagagagaaaccttgttctcatgggaaggccaaaaggagctccatcaatgtacaatgcacactcaatgtaaagctctggttttttctcctctgcgatggagacaactcctgaaaacacacataaatcaaaccaatttgcactaaaaattagaacataatcaattcaagcttctttcaatcagtaactgtgggagatcaaaaatatttgagtacccgaatcagacgatttcttgacggggaggtttccatcaagcttctcgatacgaaaagtgaccggcgaattgatatcgcaggagaggaagaaacgaaactcgttcgcacccatgtatgaaatttagacgatcaaaattagggctttttcatttgaggaagagtgaaatcaattggatttagagaatcggaaacttgaaattcgaattcgtaaaatatgtgtgtttttgagtcgtcgagaggagtacttgaccggagatcatcagctttaatttgtccccaagtctgaacgcagacgactctgggaaaattttacttttacttctaccaaaaaaacaaattacttttactttaacataattaaagaaaataatataaactttgatttgcatcataatataccttttagaatttattttaaaccttaaaaaaaaaacacagaaataacaaccaaaatcttataaaatccctaaaattaaaatgttagtcttattttgtgacaaacaataaaatgttatttgtagtagactgtaaatccaaaagtttatagattttttttcttttcttttgttgagctaatgttaaaattgggtatgtcatgtactttagattttagtaaaattgtttggttgattgaatttaaatacacaatatttttcattacaataataaaattattcaaacattactaatctaaaaaataaatctctatgaaaattgtgttactctgttgtttgatagagtaatctttgttatttttgaactaagaacataatagaaaatagatttatatgtgatttgttatacaaaagtccgtcataagaaaaaatctgcatcatgggaagaatttaacaatttgaaagcagtttcttttctacataatatcatcgagctgagaaattcttacatcatattacaaatttattatctacaaaatctctcaagtctctcttgctgctgaaaatatgtgttagtaagaaatgaatttacctttaactactacaagagtacaagaccattaacttctcttttacgttccttctcttccactcttgtttttaaattaagacaaagtaagaaacagagaaaagcagagcataaagccataaacaataagatctcgaatcttgagatcaacaaaaaacgctctgttaggtacgccttttgttacaaacttacaagttcaaacggtacctcatattaccaaacgtcaccgtaggaaaattcagccaattaaagccagttaaatattgatatacacataattaaggatttaatggagactttttagtttcaactatgagctataatctatattgtaataatggacttaattagtttttttaagattccaacaacatgcacgttactcacatccttttatctcaaacgtttacttctaatatatatctttgcatatctctttagaacaatctcatcacttacccttaaaacatctcttttctgtctctatctctcccactcttgtcttgtctcaagaagaaa

SEQ ID NO: 4910 - DNA, 3000 bp, Unknown
  misc_feature (1)..( 3000): cDNA_ID_1826514_gDNA_ID_1620745_Annot_ID_49693 3000 nt of promoter + ATG
tagtgcttcgtcgatggatgatagattccataaggttcacggtgaagttccgacccacgaagtcgtttggaaaaaaactgatttctttggtgaaggagataacaaggagtttgttgatattatttatgagaaagcccttgatgaaggcattgcaaaggtttgtgcttgtaaagtgtttgatgatattcctgagagagttatgtatttggtgaagtgggttttgaattgcatagtttttggtttctggggtttatgtagattactataaaccggccagagagaagaaatgcgttccggcctcagactgtgaaggagcttatgcgtgcgtttaatgatgctagagatgatagctctgtaggagtcatcatactcaccggcaaggtaaagctcttggtatttgaattgatatctgctagttaaatgctatgaagcattaaaatgtaatagaagaactatatcagagttaatttgcgtatgtgtatgaacattgaagatggagtctaggaagaaaaatatggatttaggttattttacttaagtcagtgtgtctagctatgagctttgtgttgagtctcataagtgccaagatcaaatcctacatttgagttgatgactgttgacaaagagttcgattgtattcctatttttttgtttttaatttgtttgtgaaacgattgttctgaatagtgatattgatggtttagggaacaaaagcattttgcagtggtggtgatcaggctttgagaacacaagacgggtatgctgatcccaatgacgttggccgccttaatgttcttgatcttcaggtatgtccttgatggacaagacaataaaaagtttgggtttcctcatccttatcgggctcatgtattttccaccttccttcttctgtttctactcaggttcaaatccgcagattgccaaagccagttattgcaatggtaagtaccttcaaacaactgctcgtttactgtatgcatctttgtactaatcctggattagctagttcctgaggttgatctgtttgattttggactgagtcaggtagctggttatgctgttggaggaggacacattttgcacatggtctgcgatctaacaattgcagctgataatgcgatttttggtcaaacgggtcctaaggttttccctctagcttctgtttcagccttgaattgactgtgtaagtgaagtaagtactagagttattactaatccccactgattatgtggattgacttgatgtctgcaggttggaagttttgatgctggttatggaagttccatcatgtctcgtctggtaattgaactcactattactgcaatgcaatatccaaaatctaacaaacataggctaatcaaagtgtatgaatgtatacaggttggtcctaaaaaggcacgagaaatgtggtttatgacgaggttctacacagcttctgaagcagagaaaatgggacttatcaatacagttgtaccggtaaattttaccagtaaaccccatagtgttgtcacagatacacaaaaaaatcagtctatttgttggtaattgttttgttccttcactgagacctatttttctgttccagctagaggatttggagaaagaaactgtgaaatggtgcagagaaatcttacggaacagtccaactgcaatccgagtacttaaggcagcacttaatgcagttgatgatggccatgccggccttcaggtacctccttcaatcaacttgcttagtctttttccgttctaaaggaacaaaatcctattagtcaaatttgcaatctaagtcacaaaatcacaatttggataggttcagttcttatgcaacccactagcacacagttttttaacggatttacaaacttttcttgctgcagggactcggtggtgatgcgacactcttattctatggaaccgaagaagctactgaagggagaactgcttatatgcaccgccgaccaccggacttctctaaatttcaccggcgaccttaaacacatttctagctctgttcaggtgttttcattagagcatttgttctcattccaatccaagtctcttttttttttctttttttttttccattttttttatttgtttaccaaactatgaattaacgattttatgaaaataaaacgggaaacgttcaacattaaaaaaaactcagcattaccaaacagaaggaaaaatccagagttcaagagatcacaaaagccttgcctcccattgaaaattcattccaggacaagaagttactttaatctctaaaccaaaacgataattatcaatcaatcacatacatttgcagtggtgacatttgcatgtggtgaagagtgattgaaatgacggaacgaaatgagcagagcaactcgttgggaagtagagtgctgctgagtgctgacagatactcatgatacagataaacaaatttacatttacttataatatagatttatacaaaatatgaattgttgtaaactgaagttttttaccaaacaaaaaactgaaaaaaaaagaattgaatgtaatcaaaattcaggctgatgagagggagtttgtttagttctaattatgaagcgaatatgtatgtcagtaacatctatgagattccttctgtgagctacaacttaggttataattccaaatgtcttgtctacctgaaaatagtaaaatattgatatctcacacattcattatattaaaggatttgagagaggcttttttatattcaactatgagctaatatctataggtaataggtgtaatcatgaacttaattaattagctttgttcagttccaatatgctttttacttacgtcatttcatgtcaaacgtctgcttctgtagtatagtgctcataaacacaaagcccttcaaatatctcagtatatatatttgcatatctctttgataaatctcaactacgcttatctcacttacttctattctctatctcattctattctactcttgtattgtctcctcaagcaacaaaatg

SEQ ID NO: 4911 - DNA, 3000 bp, Unknown
  misc_feature (1)..( 3000): cDNA_ID_1807686_gDNA_ID_1620745_Annot_ID_49694 3000 nt of promoter + ATG
attccacatcgaaagaggaagaaaacgctctcgaggcagtctcaaagagtacaagagcgacgagtatttggaatatagactgtaagtttccatttcagtttcaaagtactcaaagatctcatttttcacttgtggttttcatttgttttacttcttattgaaggtattggtgttcatttggtcctgagaactatggagaaggtggtggtgtgttacccagtaggaaatatcgtctcaacactagaaatcgagctgcgagacctcaatctatgagaggatgtacatgtcattttgtggttaaacgactctatgctcgtccttcacttgcgcttcttatatacaatgagagacgacatgtcaacaaagctgggttcgtttgtcatggacctcttgatagagatgcgattggtcctggtgctaagaagattccttatatatgtaatgagattcagcagcaaactatgtctatgatctatcttgggattcctgaagaaaacgttttggagaaacatattgaagggattcagaggtattgtggttctgatgcaactgttgatagtcttgcctctcagtatgttcataaacttgggatgattatcaaacgttccactcatgagctggatttagatgatcaagctagtatcaagatttgggctgagcgcaacaagaaatccatcttcttttatcaggaatcttcggagacggatcagtttatgttggggattcaaacggagtggcagttgcagcagcttgtgcgttttgggcattgtagtcttgttgcagctgattcgacttttgggataaaaagacttaaggtaaaatggatcttgttcttatgtctgtctctgcttttgtgaaatttatgtgctttatcctgatctcctaaacattgtggcagtatcctctgtgcacgcttcttgtatttgattcaagacatcatgctctccctgtcgcttggattatctcgcgtagctatttgaaatctgatgttgagaagtggatgaaaatactactccaacgcgcccagagtgttgagcctggtttcaaaatcaatggctttatcattgacgatgctgcaacggagactgatcccataaggcatgaatgatggttcttcaactttgtagaaagcttcgaaaataggataaacagtctattgtgaactgactggattcattttttgtgtttccagggacacattttgttgccccatccttttctctctctggcgtgttcgtagatcatggcttcgaaatgttgtgaagaagtgcgatagcattgaggttcaaagagatttattcaaatgtctaggagaactcgtgtacagtatttgggatggagtagatacaacaaaggctttagaaaagttaacgcaggattttgttgatcaaaccgcgttcatgcagtatttcacatccacttggttgcctaaaataggttagggccttaacttttcaccttctcatccttattatatagaacctttgggaacaccgcaatcaagttcacatgtactcggtcttagtgcctcatatcttcttcaattattgcaggaatgtggctttcaactatgaaaagtcttccgcttgcaagccaagaagcatgtggtgcgatagaagcttaccatataaagctgaaagtaaaattgtttgacgatacacacctcggtgcccttcagagagtagattggttggtacacaagctgacgactgaacttcattctagttattggcttgatcggtatgctgatgaaagtgattctttccagaatgttaaagaagaatacattgcttcaacatcatggtaccgagcgatggagattcctgactctgctgttacactagacgaaaacaatatccttctagcgaaggttcagtctcagagagatagcgatgtaacacgagtcgtgtggaacccaggttcggagtttgctttctgtgattgcacttggtctttgcaaggaaatctatgcaaacacatcataaaggtaaatacaatgtgtgaaaaccgcgaaggatatggtgactcaatgtccttgcgttccttcaaagagaaactgagaaacattaagatgaaacctatggatgactcgatagctttggatctgtcgatggcattgacgctgcagatgtttgatcagataaagcagttggtgcgattaagcggaacaaatgatatcagcaatatagtcaatgatttgccagtgaaatggggttgtaagaaaggccgaacaaccataggcattcctgcatctattgctgcctttacaaagaaaagaagccagaaaagaaagcgataagtcagagatgagatgagaagtggtagcatagatcacttgtattggcttacaagaacacggcaggttgttgcgtagcttcagagttagagaattcatagacggttagctatagttataggttcttgatagcagccattactttctccgttgctttttctaagtgtaaatcctctaggttaatttgataatttcattgcaatatattcaagtttttgggacaaaaggattttttttgtgtgtggttaacattaataactgtaaacagagtttatttagtagatacatcagaggttattttgaatggaaaataacttcaagaggaatgaaacaactcttttcatataacgaagaagctgggcgtattacagtcaaatcttaaacttttgattgattttgagtattatgcgcataaaagggtatttatggaaataactacaattgaaacgcacgttttcttgcgttttgccttatcttatctcatcgtcaaaaacgtttttatggaaagagacagagcgcgaagcaattctgtccacttcctctgattctgcaaagcttgaaccttcttttaggaaatttttaattaattttgttgtcttttttcaattgaaaaatgtattatcaccaccattgtcaaagcccatgctctagaatctttggtagtcttcatcatctttctctatctctcgtcatcctatccaatg

SEQ ID NO: 4912 - DNA, 3000 bp, Unknown
  misc_feature (1)..( 3000): cDNA_ID_1807690_gDNA_ID_1620745_Annot_ID_49697 3000 nt of promoter + ATG
tcaatataagagaactaagctatttaagtagagattctaggatacaagatcatatatatcgaaatgtactcacgagaagtgagaaacttgtaaaaattgtttcttccaatcacttctcagcattcgacagcgtgcaagtgcgagaaatagagatagagagaaatcgtgacttgcgatttaatacaacttatttagaaggttgatttcttcacatcataactaatgaattattaagtgcgacaagaaaaaaaaagaaaagaagaactgttaaatatgcattttcatataagacaaagaaagaagataagaaaagtttttaaaagaaaagttggaggagttgtggagacaatagcaaagcccgtgaagtggtgcatgtgatcactaaaagagatgttataatcaactgcccattgacaaaaatatagacccaatcacatgtctcatccatttttacatgcacacacacatatatattacatatatatgcaggtgtgcaatgtttctcttggaagaaactaaatacgacaaaattacctcttaagaaactgtcaaggtgagctcatcattaaaagaaaataactttggattcattgaatatcaactaatagggtcttaatagacacattttacgatgaaagcaaattgaatggaaacatgcagttttttttcctttaagttaacatattaaaaggtttaaatcaataatattcttaatctagttaaacattagatacaatattttcatcaacgaaaaacatttctttaaatgaaaaaaaaaaatctatcgatgcaaatggcaaattgcacgtatagatttcttacatttttcatcactgataaattgcaaaaattctgtaattgttggtctgattatagagtgctagaaaaccgcaactggtttgtaacatgtaaatattttaaagtttattggtccgtactaaaaaaaaaaactaactttataaccattctgttcaaagttcttatattatgaattaaatttatgattcaaaaataatgataaggtgtatatttaactcaaaaaagtcactcaacacacttgtaaatgaagataatttacacatgatgaaacgaattcgtgataattcaatatcctatagtaaatatagagaccataagacacttatctgatcaccacgatggcacatcaacaaacacatctatacaaaaatgtttatccctatatgtatacattaaaaaaaaaccacctcattttcacgtagccccactctatggtgcatcatatgcctatattattgtcatatataagtgagtatatatgtatttgtatgttactagatgaggttttgcaacaggaaaggtatatgtgtttgtctgaacaggtgcctctttgtggtatgtttgtcttggcttgctctagtgtatgtttcagccaaccatagtggatgagtctcaaccaacctttagtatacacgtggcgcacacatatcccctgaaattatatatcctaatttataaactaataatctccaaaaaaacagataaagagaaacctaatcatctccaatgctatttgtaaaatcctgaccgcaacttttaatgggttccatgtcatttttcgactcatgggtctaatctcatacgacggccaattcgctacatacggaaagttcaaaatcggggcgttacactatcacatttatgataacaactattaatatgtagatatgtgtttattttgcgtccgaaaaactgattctattggttaatcctgaataacaccaacttttgagttaattagattgttgaaattactcgttaggattagtataacttgtttcctcggataaatgcatggactttaagcctaaactgtccaaaatctctaataattatttaaaggttgcttgaaatatctgaaaatatcaaaacacaactccaacgattattccaattaataagagttggatagtgattagaaggaactacgtacccaaactatttttatgaaccctatccagtactcagaattatacgaaccattcttgaagggtatagttcgatgataattttagatactcaaattacttgtccaatatgtatcacttcttacccgaaatagacagtcctgaattttggcatcaacttgtattttagtttgtgtagggaatatattccaggacagtttactgcagttaagaaaaaaacactgtaaaaaaagttcatagagggttgttttcaataatagttttactgaataataatgattaggatactaagattacgtgctatattataatgaaacttattaaaaaattggatccaaatcagtaatcacacaaaacaaaatttaatgtggatatgtaataatacgatagtagtaaccttggggttttaagcttacagtactgtcaacgcttaggatttttaagtttatggcttaatttggtaaatgacaatagatcagaattttgtattactagaaatgattcccattatatatctcatgatttctatgttgaaactgaaaatttcataagttacttttccaagataacaaaagaaggccaaaaattgggatgaatacaagcctcatattttagtgaatcattaaaaacatactaatattttagtggatcatagaaaataacatgttacagaaagaaccacatatcagtaaaaccgtacaagattattccattttgtttcttgggcaaagaagttccattgtcattttctaaattactatcgtatatatctagtgcaatatttctaagtttatgagaaaacaatatttttaaaaaaactttcgtcataaaattccattttaggctcccgtgagtcgttctatattcttggaccgattccttatataaacccccacaaattcctttatctttttattcattctataacaacaacaaataaaccaaactctcttcttcttcttctgcttttgtctcaaaccattacaaagagaacattttttgtttagtaaagaaaaaacaacaaaaagacatg

SEQ ID NO: 4913 - DNA, 3000 bp, Unknown
  misc_feature (1)..( 3000): cDNA_ID_1826502_gDNA_ID_1620745_Annot_ID_49698 3000 nt of promoter + ATG
taagaaactcaattagaatctctttcagtaccatggaattgccaggttgaaggaactgtgtttttctttttcttttcttacatataaaatggttcttgacacggcgcagatccacttggtcctcccattccactccatctcttatgcattctctacacaacgaacaatcacgcggccgagctactgttgccctcttcctacctgttttccacgtttgcaagtcaaattaatttgccgccaaagttctcaggtttcatcagaatctcttattgttactcaaaagcaagtaaagacatttgaaggaaacttgggaaggcttttacttcaccttggcccatgtcttcaatgtcaaaaactttcttggggcagacttttacgagttcttcggcatgtttaccctcgaattcctttagtagaaccacctaagatattataaacaaaaagcattaccggaaaagcctaggacgagtcaagaagaaattaattaagtccttttcccagaaggcttatggtgaacttctcacctcaggaagcattcgataccaagccgttgctactggggaccactttgcatgtgttttaccaatgcccttaacggcatgagcctcaagctcgatttcctgcaagaagaagatgcaagtctttcatctctcaacggaattaagtcctcaaaaatgtcacaattaaggggaagagtataaatagaaacagtacctggccagggccaagttttgctatcaagatatcttttaaggttggcctgataggattttcagcaaattcagggaaggaatcttggctatggttgaatgaagtgtaagtttttggcgttgtggttgaacctccagattctttgataagctcacttccatttggtaaccatttcaattcgcttgttaagacttcaagaaataaaaaaatgatacctctcatgagatctcgagctaacaataaaacaaagactcttcttgagcaaaccaaagaacatatattacctttacgacgcgggtcaccttttagacatttcacatggagtttgaaaacaatggtgttcttttcatttggctgatcgttttctatgacacaaagataaacaacaacaaaactaagcgtgacacaaagagtttatatgcttaatgagatggatcacattccacagaatatttcttaccagataaatattcaaagagtctcggatctgcggcaattggaataagacccaacctgtgagcaagaacttcgtcttgaataaccgatgtgttgtttgctacatacactttttcaatagccattgaaggaagctgtaatcaaagaaacactattaaccaaagattctaataatcagagattcatcagaggtagtgagacagtgggcagacctcagctaagaggattcttcggaaagcattagcgattcctgcatggacaccgatcatatcgaataccatatctgtctctgtgagactaatcacatcaactttgaaatcctcagagaagttttctagtctcacactgttgtccactcccatagaggaataggcacccgagaaagtgatagccgtaggctacaataaaacacaaaaagaaagggaagaacattaaagacttcaaatttcaaacaatcatcactcaatatcattcggatttcgacaaacccacagtgtaatcttcttaaattgctaagaccaaactcagtaaattcacagctttctacaagcaagttttaaactttactctgtaaatctacacgaaatcgatgaacatagcaaacccacatgggacacactgagaaaagccaataaatttctagttagctgaacttatacatagcttaaaaagagtgtaaattttgatcgagaatagtacttacatgaatattagaatccttcttacagacaacgcgagttcgctggagctcaagatgcggaggaagtccggtaggaacgtcagggagatcaaatatgttgaagttcttcgcttctctcttttcttcatcagtcacaatccttgttacttcgttagtccccatccttctctgcagccaagttcgattgtgagaatccgaaatcagggtttaaggagaagaggaagatgaaaattgcacgatttcacttttcacttcaatttcgttcttcaatttcataaaactggaaaattagggtttatggacacgtgtgaatactagaaaaaaaaacatccatttttctaatagcggcatggcttaagtccgaaccgaagcggctgaaccgtccaaccggagtttggttgatttctgacttttaaaattttcgttaccaccaaaccgaaattctaatcttaagtccgaaccaaatcgacatttttttattttttaattaaccacatattagttaaaagataattatatgattggtcgccgaatatggaaaaaaaatctacaaaacaaatttgagaaaacagtaaacgaaaagaacgaactaaacaatctgtcttataattaaacaaatgagatatatagaaaatcatgaaacgagaaatataacattcgacattttgtttgattttctactatataacttttccaaatataagtagaaatgtcgatttctaaacaaacccgatctgaataatcatattctccaaatttagttatggcagttcaaacccataatggtgaaggttctcactccagtattttttttattatagcataccaagataaccagaagaatgagccaagaaactaaacaaaactaaaaccaaaactagttccaatcaactcaaacacgaaagtagataaataacaaaccacatgtgatttcaaatttagtttagtctaataaaaaacaaaaagactaaaccggacgaccatacattgggtccctatcgtaaattagcaaacaaattagtgttgcccattttaaaagtttgaactcttctttatttaaaaaaagaagaagaagaattgaactggtcaggaagaaaaaaatagaaaaggagaaaaaggacagagggaaaatg

SEQ ID NO: 4914 - DNA, 3000 bp, Unknown
  misc_feature (1)..( 3000): cDNA_ID_2052106_gDNA_ID_1620745_Annot_ID_166631 3000 nt of promoter + ATG
ctttcatagacgagaaggtgaaggacaacagaggaaatgtatcattagtgattcaaccatgctattagatccacatactcattcaagatggcactgatgttatttcttgccatataaaacagactgacgttatcctgtggctgtatgcagaaaataggatgtcaggatgggaattccattacgaaaggacaacagcatgtatcccaaccaaacaataagttgcattgaataaaacattgtgcatgtgaaaaatacattctacgatctttttaaagtcaattttctgctaatgcaatctttttctaccagctagcatttggatcagatacaaatcaattaccttgcacacagaaaggtttgaggagatttgactgaaagcttgagcattctgccgtagacgctccataaccgcatcacttagacctaggagaataaaagtttggaaaatatatatgagaccgtaaaaatgtgacaggtgagaaaaaggtatcaagctaacaagattgagttttcttggcacaactaaggagatgagacaataactgagagagtccaggaactctccaacatcgataatgcctatattcaggcatgaacaagatgaacaacaaattgcctagtacatttgattgagatttcaaacaagatgcagtttgtctttctaaaataatctttctttacagttacaacctttgcaggagagggaaggaaataataccgacaatactgttacggtgttacccaaatagtactaaccttcaaaaggcatgcgtgcactctggcacatatggttcatggcatatgtagcattttgttgtggctcagttgagaacatgttcagttttgggggtaaatccactacctaaatcaaggagaaatcagttacttgtgtgttgggtatctcaaggagaacaaatttgtagctgttttgaacaaaaaaccatttgtagccaataacctcttgtaaagcgaactataacctaggccaccaaccgttatctggttatttactaacattacatacctttctataactaaccttcgtgccagtactatgttcttccccttttcttcgcttttgctgaaaaaaaggatttcaatcttagcccagacaaactcaaaagtcatgaatttaaatagttgaaagatattagatagcaaactggcagttattattaatgttaaaaaggccccgtgtcaagacttatgtttgtatgagtcatatatctgcttgtacaactcaagtcataaaaaatctatctatttcttcagcccaacttcataaaaaaaatatgacaggatagatagtatggataagccaataaggtaatatttggcactataatctgtcaacttttttcccccatttattatatgaatcttaacactacagtgtaggccatactgcagaggatataaccaatgtttaaccatcgctcatagaaatcttatccttcataaaaagtaacatatcaaaataaacttcagaaagtcgaaaaaagcccaaggctatctgacatcactcgtttggcgatattagtttcagggtaactacagaaatcaaatcaagctttagggtcaaatcaagttccaacatgactccagagctaacagaaagccagatctatcgtcagcaatacttgttattactctccttgcacactcttaaccatactttaaacaacctttatgatatggtaaggtgtcttttcatcaatatagcaatagaactttaagcctaccttatagccaaaaaaatataaaagaacttttcccataggactttatctttaacaaagcatacacccaaagtagcgtcactatgtttttcctccttttttcatctcccaagctaaatgacgttaccaagatctctttgaataacaactaataagaagtctgcaagccacttatgaaacttaatgacaatgcattgggaacttaccgtcatccatttacatctcattgctacatcccgtacacttttatctggtagagttgctgcgatctttacatactttgtaacttgtggttcatctttaaatctacaaaagacatgacaaaggttttaggcaaacaaaacaataaaagacaaactcgaaacaacataaaacagcgcaaggtaagaaactaacacagagaaaaactcagccatctttcgtagaaattttctgatacaaaatacatctataagaatctgaatcagcttatgattccagataacaacacgagctataacagttcatatgaaacataaatgcaaaaccttttccttcatctacatataaaaatttatctactctaacattgtataatagctacgaagtgagaaaatttgcagagaacgaagaacaatggagaataacaaaaatacttactttgaaagacctttctccaatatatattgttcctcaacagaccaatcaacagccaaagaagcttcatgtttgagtccagtaaccgaagtcggagaatttacagtaagatgaaatccagaagaagcattcatgctcgaagtcgccgaaaacactaaaccggtcgtgctagtactcggtacgcaataattatccatcggaatcatcactcaaaagctatttcgtagagattaagttgacctacaacgaagcacgcccaaaaacatgttcaatttagggttttagcaatttcagaatcatacggaaaaaaatccgattaaaacccaacagaaacctaaaagagcaaaacctgagcaaaacccacctcggatttagccaaaatagaagatgagtatgcttctccgtagctcgatagatggcgtcgatgcaaaaaccctaaacccccaacgattggtgatgaaagtagagatactgaaatcgtgaagctacaaaattcagagagatcgcaatagagaagaagaagattgaagaatcgtgattcgattcgcgagagagtggtgacagcaagatgatgcgaagaactttcgaattgcagaagctggcgaggagagagagagagaaaatg

SEQ ID NO: 4915 - DNA, 3000 bp, Unknown
  misc_feature (1)..( 3000): cDNA_ID_3074850_gDNA_ID_1620745_Annot_ID_166628 3000 nt of promoter + ATG
tgggataaaatgttgtccactcaatgactaaaacacccttataaaagttacttaatttacaaaaataacctaaaaaccctaaaacccttctctttagcaaagctttccccttttcagtctccaagctctcttctgcggaactcacggtacgaaagtctcctcttttctatttactttaatccgaagtttgctcctttacttttgatttgttggagaatttcgaattctaaatttgggttttgtctctgtagagtaaacacgaagtaaaaatgataaagagacgattttacaagcttgagcatggtgataaagacagtggatccgattcatcgtgcttctcttctgactctgatcctgagacggaagaatcagaacaatctgaagaagaagactctgttgcagaagtttccgaggacggtgatgattcaggagatgatgaatccccaggtttgcttcttcaattgagcaattatctcttttagttctcttgtgattgtactctcagagaacctttggtaaaatctttgcttattctctgttatagctgctggcgaagacgctgatgttgatgatggtgatgataactctgatgctgatgactatggtgggacattggagaagatgtcaatgaatcgttttttagaagaaccacccgaagaagaggaagagaactatattctcggttgtatgatacaatccaaatcggtttataaatgcagatattgtccaaccgttgtttgcttgaatgagaacacaatgcaagcacatgtttcatcaaaggtaaattaggtagctttgaattagcatttgagtgtttggtcctttttggaatcaagtagtagatgataagcacgggattagttttgagcttttcctcatcagtcttgtagttgatgagatagtattttttgtcgtttgactcatttcagaagcatgctcgtatggagaaattagtgaaagaaggaaagattagaactgatgacgaagaagttgacgatctagagacagcatctcaggttacattagagaatttgccaacgagtgctttttgttttgtcaatgagtcctaaccaaattcttgcacaaatcttaaatgtaggagaaggagaaaaaaggaaacagaagatcacaaagacagggaaagagatctcaaaaacaggaaaaggtaaatgtagcttgctcaatactgaagcattgtgaccatggttggtttgttggaaacctaattgattcgtgttttcaatataaacgtctaggattcattgaccaaaaatggagaaaacgaagaagttgaagatccagagacgccatctcaggtgagatttaagacaatgccatcaaatgcttgtgttagtccaatgagtcctaaccaaagtcttgcaaatatcctaaatgtaggagaagcagataaaaggaaacagaagagctcggagagagcttaggagatcacaaaaacaggaaaaggtaaaatttgcctgctctataaccctgtgaccatggttgacctgtcaaaaaccttatctattcgtttcttaatatgaacatccaggattcatcgaccaaacatggagaaaacgaagaggttgacaattcagggacgccatctcaggtttttctttttgacgttcgagcaaatgtcaacaagtgctttgtgttcttcccatgagtcatttactcaaccaaattcttgcaaaactactaaatgtaggggaagcagataaaagaaaacagtagagcacgaagacagcgtaagagattagaaaaacagggaaaggtaaaagtagcctgctcattactgtaaccttgtgacgatggatggtttgtctgaaaccttattgattcgtctttttaatatgaacatccagggttcattaaccaaacatggagaaaacgaagaagttgacaatccagagacaccatcacaggttttctttttgaattctagcaaatgcaaacaagtgctttgttattcttccgctgagacctaacaaattgtttcaaaaatcttaattttaggagaagcagataaaaggaaacagtagctcacgaagacagcttaagagatcagaaaaacaggaaaaggtaaatagcctgctcataattgtatccttgtaaccattgttggtctgtcaaaacccctaatcgattcattctttcttaccaatatccagattccatcgactaaggaaggagaaaacgaagatgcatcacaaaaatctagaaagaaaaggcgtcaaactaaggattgaaactgctgtattgcccaatatggttagccagaaagattcatctttttttacttggatgtcgatgaatagatgaagaaacataggttgagagtgagttaattatgtgctttttaaacttcaagttttgtctaccaaatacggtgcttgttataactgatatgattttgataattgagttatacaattcttttttacaagttgtatccttttttcatttcgaaccatccccctcttactcaacgagagagattgggaaataattgcttgaagcagaaaatcgaataacagattagttgaattaaaaatatgtttacttgaaactatgttcctccaataccatcaatgatctctggcatttccctccaatttctgtcgttttctcttcccaagtcagcactcagcacttgtcttgagaaagttcaaagacttgagtgaaaaagacaaaaactttaatattttcttctcttcttttaatcttggtctccaccataaacaattattgatctacatatctgtgtaaaacagtggaagtgtacacacgaaataatatttttatgaatgcattgaaaaaggaaacaagtgagacaagtgagatttgattaacttctcctactgctcttaaagtatcaagaagcattggcttcacgtgacatcttcgctgtcatgtccgtgatcgagcttcttcatcgatgccacttacaactgctgattctatcatgacttggtaaaaaatctcttgaattccattatg

SEQ ID NO: 4916 - DNA, 3000 bp, Unknown
  misc_feature (1)..( 3000): cDNA_ID_3074861_gDNA_ID_1620745_Annot_ID_166624 3000 nt of promoter + ATG
cgttttctatgacacaaagataaacaacaacaaaactaagcgtgacacaaagagtttatatgcttaatgagatggatcacattccacagaatatttcttaccagataaatattcaaagagtctcggatctgcggcaattggaataagacccaacctgtgagcaagaacttcgtcttgaataaccgatgtgttgtttgctacatacactttttcaatagccattgaaggaagctgtaatcaaagaaacactattaaccaaagattctaataatcagagattcatcagaggtagtgagacagtgggcagacctcagctaagaggattcttcggaaagcattagcgattcctgcatggacaccgatcatatcgaataccatatctgtctctgtgagactaatcacatcaactttgaaatcctcagagaagttttctagtctcacactgttgtccactcccatagaggaataggcacccgagaaagtgatagccgtaggctacaataaaacacaaaaagaaagggaagaacattaaagacttcaaatttcaaacaatcatcactcaatatcattcggatttcgacaaacccacagtgtaatcttcttaaattgctaagaccaaactcagtaaattcacagctttctacaagcaagttttaaactttactctgtaaatctacacgaaatcgatgaacatagcaaacccacatgggacacactgagaaaagccaataaatttctagttagctgaacttatacatagcttaaaaagagtgtaaattttgatcgagaatagtacttacatgaatattagaatccttcttacagacaacgcgagttcgctggagctcaagatgcggaggaagtccggtaggaacgtcagggagatcaaatatgttgaagttcttcgcttctctcttttcttcatcagtcacaatccttgttacttcgttagtccccatccttctctgcagccaagttcgattgtgagaatccgaaatcagggtttaaggagaagaggaagatgaaaattgcacgatttcacttttcacttcaatttcgttcttcaatttcataaaactggaaaattagggtttatggacacgtgtgaatactagaaaaaaaaacatccatttttctaatagcggcatggcttaagtccgaaccgaagcggctgaaccgtccaaccggagtttggttgatttctgacttttaaaattttcgttaccaccaaaccgaaattctaatcttaagtccgaaccaaatcgacatttttttattttttaattaaccacatattagttaaaagataattatatgattggtcgccgaatatggaaaaaaaatctacaaaacaaatttgagaaaacagtaaacgaaaagaacgaactaaacaatctgtcttataattaaacaaatgagatatatagaaaatcatgaaacgagaaatataacattcgacattttgtttgattttctactatataacttttccaaatataagtagaaatgtcgatttctaaacaaacccgatctgaataatcatattctccaaatttagttatggcagttcaaacccataatggtgaaggttctcactccagtattttttttattatagcataccaagataaccagaagaatgagccaagaaactaaacaaaactaaaaccaaaactagttccaatcaactcaaacacgaaagtagataaataacaaaccacatgtgatttcaaatttagtttagtctaataaaaaacaaaaagactaaaccggacgaccatacattgggtccctatcgtaaattagcaaacaaattagtgttgcccattttaaaagtttgaactcttctttatttaaaaaaagaagaagaagaattgaactggtcaggaagaaaaaaatagaaaaggagaaaaaggacagagggaaaatggagaaaagtagagtaaaatggcgtcacaccagagagaaggcacaactcacggggaaatcagcagaaccaataccaccgccaccggttactattactattcttgttatcatcatctcccaaaaaaaaaatgttagtattattttcgagtctatttttcaagtttttgttttgtttttaatatctcgactttgccacccaactcctcccactccttcacaactgtgtcctgtcctctgctgatttctcacctttccatcattcatttcattctttcttttttcccatccgtttcttttattcttctttctccttaaatttaaaatctttgaattaaattattggattttattgtttcaaagcgtttctatcatcaaaacccatcttcttcttcttaagattctgaatcattcattgattgatttagcttctcttcgacttcttaattttacagttttttttgttttttaaactttaattgatgcaaataagcaaacttggatcgctgtgagcctgtgataatgatttcttttaggtttgtaggatctgaaggaagctacggtttatttttttttatgggcaatctctaacaggtacaaatcttctcttagcttctctcttacaagatctttaggttatgtcttgttctttggagttgctatctttcttccatgttccagaggtttgccttattttatcacttttgacataataatttattttgcctgttttttgttacttggtttaatattcagatgaatctttgaccatgatctctaaatttggttcctaggcaagatcaaagaaagttcatcacataggagttgatcatgaaccatagtttcctcaaagatctcaactttgtctctagttggattgtaatctgtattgcttaggacagttaaatcttattacatcttggctcgtcatgtcaaaagctgaagatatttgagctttcatatcttacaactaattagtttcgtatgtctacaggtttcttactgtaatttttctgtttcagttctttacgggtatatatatacacataaaacggttaagctctagagaagatg

SEQ ID NO: 4917 - DNA, 3000 bp, Unknown
  misc_feature (1)..( 3000): cDNA_ID_1807690_gDNA_ID_1620745_Annot_ID_166620 3000 nt of promoter + ATG
tacaagatcatatatatcgaaatgtactcacgagaagtgagaaacttgtaaaaattgtttcttccaatcacttctcagcattcgacagcgtgcaagtgcgagaaatagagatagagagaaatcgtgacttgcgatttaatacaacttatttagaaggttgatttcttcacatcataactaatgaattattaagtgcgacaagaaaaaaaaagaaaagaagaactgttaaatatgcattttcatataagacaaagaaagaagataagaaaagtttttaaaagaaaagttggaggagttgtggagacaatagcaaagcccgtgaagtggtgcatgtgatcactaaaagagatgttataatcaactgcccattgacaaaaatatagacccaatcacatgtctcatccatttttacatgcacacacacatatatattacatatatatgcaggtgtgcaatgtttctcttggaagaaactaaatacgacaaaattacctcttaagaaactgtcaaggtgagctcatcattaaaagaaaataactttggattcattgaatatcaactaatagggtcttaatagacacattttacgatgaaagcaaattgaatggaaacatgcagttttttttcctttaagttaacatattaaaaggtttaaatcaataatattcttaatctagttaaacattagatacaatattttcatcaacgaaaaacatttctttaaatgaaaaaaaaaaatctatcgatgcaaatggcaaattgcacgtatagatttcttacatttttcatcactgataaattgcaaaaattctgtaattgttggtctgattatagagtgctagaaaaccgcaactggtttgtaacatgtaaatattttaaagtttattggtccgtactaaaaaaaaaaactaactttataaccattctgttcaaagttcttatattatgaattaaatttatgattcaaaaataatgataaggtgtatatttaactcaaaaaagtcactcaacacacttgtaaatgaagataatttacacatgatgaaacgaattcgtgataattcaatatcctatagtaaatatagagaccataagacacttatctgatcaccacgatggcacatcaacaaacacatctatacaaaaatgtttatccctatatgtatacattaaaaaaaaaccacctcattttcacgtagccccactctatggtgcatcatatgcctatattattgtcatatataagtgagtatatatgtatttgtatgttactagatgaggttttgcaacaggaaaggtatatgtgtttgtctgaacaggtgcctctttgtggtatgtttgtcttggcttgctctagtgtatgtttcagccaaccatagtggatgagtctcaaccaacctttagtatacacgtggcgcacacatatcccctgaaattatatatcctaatttataaactaataatctccaaaaaaacagataaagagaaacctaatcatctccaatgctatttgtaaaatcctgaccgcaacttttaatgggttccatgtcatttttcgactcatgggtctaatctcatacgacggccaattcgctacatacggaaagttcaaaatcggggcgttacactatcacatttatgataacaactattaatatgtagatatgtgtttattttgcgtccgaaaaactgattctattggttaatcctgaataacaccaacttttgagttaattagattgttgaaattactcgttaggattagtataacttgtttcctcggataaatgcatggactttaagcctaaactgtccaaaatctctaataattatttaaaggttgcttgaaatatctgaaaatatcaaaacacaactccaacgattattccaattaataagagttggatagtgattagaaggaactacgtacccaaactatttttatgaaccctatccagtactcagaattatacgaaccattcttgaagggtatagttcgatgataattttagatactcaaattacttgtccaatatgtatcacttcttacccgaaatagacagtcctgaattttggcatcaacttgtattttagtttgtgtagggaatatattccaggacagtttactgcagttaagaaaaaaacactgtaaaaaaagttcatagagggttgttttcaataatagttttactgaataataatgattaggatactaagattacgtgctatattataatgaaacttattaaaaaattggatccaaatcagtaatcacacaaaacaaaatttaatgtggatatgtaataatacgatagtagtaaccttggggttttaagcttacagtactgtcaacgcttaggatttttaagtttatggcttaatttggtaaatgacaatagatcagaattttgtattactagaaatgattcccattatatatctcatgatttctatgttgaaactgaaaatttcataagttacttttccaagataacaaaagaaggccaaaaattgggatgaatacaagcctcatattttagtgaatcattaaaaacatactaatattttagtggatcatagaaaataacatgttacagaaagaaccacatatcagtaaaaccgtacaagattattccattttgtttcttgggcaaagaagttccattgtcattttctaaattactatcgtatatatctagtgcaatatttctaagtttatgagaaaacaatatttttaaaaaaactttcgtcataaaattccattttaggctcccgtgagtcgttctatattcttggaccgattccttatataaacccccacaaattcctttatctttttattcattctataacaacaacaaataaaccaaactctcttcttcttcttctgcttttgtctcaaaccattacaaagagaacattttttgtttagtaaagaaaaaacaacaaaaagacatgataacgagagagagtttaacgctgagaagcatcacaatgatg

SEQ ID NO: 4918 - DNA, 3000 bp, Unknown; identical to SEQ ID NO: 4910
  misc_feature (1)..( 3000): cDNA_ID_2052152_gDNA_ID_1620745_Annot_ID_166615 3000 nt of promoter + ATG

SEQ ID NO: 4919 - DNA, 3000 bp, Unknown; identical to SEQ ID NO: 4909
  misc_feature (1)..( 3000): cDNA_ID_1826526_gDNA_ID_1620745_Annot_ID_166612 3000 nt of promoter + ATG

SEQ ID NO: 4920 - DNA, 3000 bp, Unknown; identical to SEQ ID NO: 4908
  misc_feature (1)..( 3000): cDNA_ID_1826530_gDNA_ID_1620745_Annot_ID_166611 3000 nt of promoter + ATG

SEQ ID NO: 4921 - DNA, 3000 bp, Unknown; identical to SEQ ID NO: 4907
  misc_feature (1)..( 3000): cDNA_ID_1826538_gDNA_ID_1620745_Annot_ID_166607 3000 nt of promoter + ATG

SEQ ID NO: 4922 - DNA, 3000 bp, Unknown
  misc_feature (1)..( 3000): cDNA_ID_1826456_gDNA_ID_1620745_Annot_ID_166646 3000 nt of promoter + ATG
ttagtgacatctcaaccgcccaaagactagggacagttcttgggttgtgcaggtagagcaaatgtgtaggttccaaataaaattgagtaaatttgaagaccataaaaaaaattgagttattttaaggaccaaaaaaaaaaaaaaaacccaagtttgaaggccaaaacagaatttgactaagtttgagagccaatttctttaaattttgtacatggaacctaaattttttgagacgcccctgcccaagactgttatattgcattacatcagcaagaagcatatacaactaccaaactcataactctccttttggctcaaagagtctttgccgcaagaaacaagaatttaattgcttataaaaaacttttgaaaaatggtggctatgttgattttgatatgcgcgcgatcacaacgatttgggtgcaagcatctcaaatgcacgttgaagagaaagacacaatggcctctgatttattcacctttcattaatggatgtacatacacattcattcttaaacaatgattagagtaaaaaaatcaaaacaacaaataattgtaagaaaaaacctttgacacatatctcttcacatatccacattataactctagcctctagggtaatagatgattagtttctaaaagagtttagaaagtgatcgatatagggtaaagtgcctatcaaacaattaaatttttctcggattcaattaccaaatgtcaaaatatacacctaactatgattaaaaacaatagtgtctgtagagaccaccacttacaagaagtttaagctatgcatgattacacattagtttataatttattaaaaaatataataaacaattcaaggttacaaaaacaaatggagagaatcttacaataattaaaatttgaattaacaatatcacatcaataatataaattaataataacatattttttgttaaaaagttaaatatcaaagggaataaacacatgttttcatatttgatagaaaatgacatatcatacatgcatgattaacccgaactcgaatgctgttcacgatgacaacgtgtagaaatttcacaaccacgatggtaagtgttggctggaactttgacgcattctttagggttcttactagtgcaacctggaattgtgtcttttatcaaatctttatagtttatctgttttattccttctccaaatccgctgaccaatgatattataatcattattgaaacaaagaaaacatggatacgattctttttgcgtgcagacattgtttttttttaaaaacaatgtatttgaatcgtgttgatcttttctctgtgttattatattttgtaattgaataggtgattaattattatttatgtttctttgatttataacgagagatgattctaaaaaaagatggccagtgcataatgtatgtgcatgtagagtttacttgctatttatatgtcatttcagtttttttgtttcatcaaaacagaaatatgtgcaatagatttttagcatggcagcacagttaaactgttcaaccaattaagatgtatagttgtcaaactgtcttgggatttcgtagtcatgaagctatgagctgcacctccctcagggattggtcagggactcatggtggcaacaacttctagttaacgaactagtaatgttatctcattatttcgattattcagccttagcttatactaattatttcattatgctatttttctatatttatctaattcaaagtcatgatttcttgtataataaaggattagtgttttaagaaaggattacttacaagttataaccatttacttgcgaatccccaaaaaaatatatttatttatttatagatgtatgaatgtttataagaaaaagatctaaattttgtattttgactcatggacctattatcacgaacatgtatgcaaaatctcaagatgaagattcattttgatcactagttcgttaccaataagcagaatcccttatagctgaggtctgtccacttcattacagcctatggaccaatgcagaactttttgaagcgagccattatagccatgcttgtttcctagataagcctcctttattagaggtatatatgcgttacacttgaataaaatgttaagtatttggaggataacaaaaattggtagtagttatgtatagcttttataagatgctcgatgattactttaaagttagaatgtaacacatcttgaatttgatggatatttgttacatgtgaggtctactgaagtaataaattcatgttatttagtgttgttcttcctgttcagggaaaactcaagactaataaccctgcagctgattcaggccatggaaattgataccaaaatcgtaaaattagtagctgcattttgtaattggtttgtttaacaatgtatggtggactaactccttttatacaagaaatattatagtaaaaacacatatgaattcatacgtacaaatttgaaatatttaatgggaattgttacaaaaatattggatagaaaaatgaaaaacaaaatcgaaatggttgggagttgaaacgtttgcttacaagttaggtataacttttatgatggaagagtaactccaaaggttttacaactaattttttttttttggtaagtaaggttttacaactaattttgtagtatgatttaatttatctataaaaaaaattagcataaattgaacagattaataaatatgttttgttttaagaaatttttttttttccaaaaccacaaaaaaaaataaaaaataaaaaaaataaagaaaaatgtttaaatataaataacgatcctaaagcgaaaagaggtatcgaattagtttgctaactaacgaagctgtagctacctcctctctcaacggtaagatccgccattttcatcgatctccattttctgaatcaagaggtctcgaatccccactaattgaatagttagtgatctgattcgtattttatcaattttgtttgtatcgttgtgaagtatg

SEQ ID NO: 4923 - DNA, 3000 bp, Unknown
  misc_feature (1)..( 3000): cDNA_ID_2052069_gDNA_ID_1620745_Annot_ID_166644 3000 nt of promoter + ATG
cgccgtaacaagcaaatattttttgacgttaatggttagtatcttgaaatactatcggcttcacatcattttgtgcagagcaaaactgacacttgcatcttgatgattaatattttgcagaacaatatgatccagaagtgagtttagggcacttgaagaggtatacattcaaagagcttagatctgccaccaatcatttcaactcgaagaacattctcggaagaggcggatacgggattgtgtacaaaggacacttaaacgatggaactttggtggctgtcaaacgtctcaaggactgtaacattgcgggtggagaagtccagtttcagacagaagtagagactataagtttggctcttcatcgcaatctcctccggctccgcggtttctgtagtagcaaccaggagagaattttagtctacccttacatgccaaatgggagtgtcgcatcacgcttaaaaggtaatgcagtttccaaaaaaactgctaatttcttcatgctcttttgcaagtttttaatagttccatcttgctacattttttgtttagataatatccgtggagagccagcattagactggtcgagaaggaagaagatagcggttgggacagcgagaggactagtttacctacacgagcaatgtgacccgaagattatacaccgcgatgtgaaagcagctaacattctgttagatgaggacttcgaagcagttgttggtgattttgggttagctaagcttctagaccatagagactctcatgtcacaactgcagtccgtggaactgttggccacattgcacctgagtacttatccacgggtcagtcctcagagaagactgatgtctttggctttggcatacttctccttgagctcattactggtcagaaagctcttgattttggcagatccgcacaccagaaaggtgtaatgcttgactgggtaagtctcttttctctgtttcttgtttcactttctagaatcttgaagctattgttcataattgtggtttggttcggttcagtcttgtttgatagaaaacttaaaccaaaacaaaatataaattagccgtgattttggctaaattttggttctgtttttgtgcttgataaaagactcagtttggttttctgttatctttgatttgaattcggtatagtttgaagactaaactgttattttggattcggtttggttctgtttttgtgcttgatctggaattggtttggtttggtttattggtctgagaaatgagattgttaaaaatggcaggtgaagaagctgcaccaagaagggaaactaaagcagttaatagacaaagatctaaatgacaagttcgatagagtagaactcgaagaaatcgttcaagttgcgctactctgcactcaattcaatccatctcatcgaccgaaaatgtcagaagttatgaagatgcttgaaggtgacggtttggctgagagatgggaagcgacgcagaacggtactggtgagcatcagccaccgccattgccaccggggatggtgagttcttcgccgcgtgtgaggtattactcggattatattcaggaatcgtctcttgtagtagaagccattgagctctcgggtcctcgatgattatgactcactgtttttaaaaaatttcttttcttgggtttgttttttatttgtcgttttataatgttgatatagatgtgaagttgagtgtgtaatttttatgtaaagaaaaaatatgaaatgcaaaagaaaatgttgattagcctgccacattactcaatatttgaattttcaaagtgaggtaagaattttggatggcatataaatcaaaccgaactgaaagtttttgaatcgaaatgaaccgaattgtaagctaaacgtaatttcaataccgaataaactgaattgaatacatcaagtttcaggactacaaaataattttgtaacatgtatataaaaaaaacatttgcatgtataactttttgtaattcttaaataaaattaaatttgtttaaactatgttatctccaatgcaaaaccgaaacaaatctaagattttcaaactgacctaaaccaaaaccaaaacaaaatcgaaaaggttcaaactaattactaaccgaaagaaaattctgatatagtttttctaaaaccgaaaaacctaaaaccttgaaccgagtaaaccggaaaacaaaattcctaaacatatattcatcacttaaccaaattaaagattccaaaccgaaataattcggtataaagagaatcgaactctattcggtcaacgtgtaatgaagcattaaacttcgcctcagacacactatacaaaaccaccgaacataggaattaggatggtctttaaaatcaacgaataatgggtcaagcagagtcgtaaacgtggagactattcaggtgtgaggacagaagcgtgcacctgcagcttgagagaccacacatgaaaccgttagatcacgcggctataagcaatcgcaataaacgagaagaagaatgatgtcggtccaaagtctcgtgagccgttcttatgccacgtgccttagatacagtcggtgccactctgccgtattattttggtcattaccacgatctcattaaattcctcattagtagtaattaccttaatcatctaaaattattaagggaaataattaaaatcatactacaaatgagcacctccatgatttaattaaaagtttagatccacatataccgcattacttaccacaattattgacaaacaaaaaaggataaacatacattaacaatttcattaagaaatggctttcaatttaacttttgacaaacatgaatggtggtttaaaactgaaatcgttatcttcgagagaaaccgctcttcccccaaattcaagttcatcgaaataaaaaatttaataaactctccctcacttttacattctgaaccagaatttaccattttcttaaccacttcagtttcttctccaagtttccatttgaacaaactaagaagatg

SEQ ID NO: 4924 - DNA, 3000 bp, Unknown
  misc_feature (1)..( 3000): cDNA_ID_2687499_gDNA_ID_1620745_Annot_ID_166639 3000 nt of promoter + ATG
tgaagttctcacttggggaactctatacattatttactcttaaaggcatcaacccttgatagttttggctttccctgggaatgaacctaccataatccactctcgaagacacagcacttttattaccttgatctagctgacataacttagaccacttaaatgacatgaaccccacaacaatcagagaaactcagacgattttaagcggctttccaagaagacaatggtggagtctcagagtttttgaacgtggtcaggatgctaatggatctttctcctttcacaaaacctggttgtgcaagggattcgagctcagacatctcttcgggagtaagtttcactgataaagctccaatgttctggttgaggttttcaatcttagtggttcctgggatggggcaaacatcatctccctggtgatgaacccatgcaagggctagttgtgcaggagtgcatcctttcttctcagacattgcagaaaccttctcaaagagaatcttgttgtggtctaagttttcctgttggaatcttggtagagtctgcgataagaaacagaattgaacagataaacagtgagttgattaccaacagttcatcaatcaaacaagtcatataaagcctgtgtacttgcctttctgacgtcattattgtctaggttctcaacaagcttgggtcctgaagcaaagaaacctcgtcccagaggactgtaagcaacaattccaatcccaagttccctgaagaaagagagagaagatgttacatatttaatagatagtgcatcaagaatgaggatgaaatgaaatctggttacctgcaggttggaattatatcttcttccacgtctctcgaccataaggaccattctatttgcagagcggttatcgggtgaacagcatgtgctcttctgatagttgaagctgaagcttcagacaaaccgatatactttattttaccttcttcaactagcttcttcagctctccaatctttgaaattgacagacaaaagagattgtcaagttcagctaaagttgctggctttcaatataggtcatgaagtgtgagctcagagtcaaacctaaaggagtctattcaaacgaaaaattctaagggagatgataagatcatttcaccagacaatggttcttcatgaataagctagtaatttcagaaagagtgacccaagcagaaaacatagttctgaaagctaaactcttcgactctatattagtcccaacatgtctctagccacatgtgtgaagctcactgagaagtgagaggaactatataacttccatttcatttgaaagttgcaaaaccatgaaggaagattgacaagaagagtgcttacagtgatttcgatagggacacgagtatcaattcgatgctgataatagagatcaatgcaggcaacatctactcgcattaaactagcctcacacgcagctcttacataagcaggatctcccttaaactctactttcccctctgcatacctgattccatatttggtcgcaagttccactttttctctcaccccatccttgagagcctgacaaaaatccaaactttcaacaaaaatccaaactttcaacatccaaatcatttatacagctctgaagctcagcgaatcaaggccagtgttcccatatcacaaggccagtgttcccatatctaaatcacgaactcaaatattaaaaaatatcaatatcaaaaggggaattatcaaaatcgaaccttgctgaggagaagctcgttggtctcaggaccgtagatatcggaggtgtcaaggaaagtgacgccggagtgaatggcgtggtggatgagagcgatagcttcggtttccggcttgggagtaccgtagaaagcagagagacccatgcaaccaagaccttgcgccgatacctcaaggccttggcttcctagcttaatccttctcactccgcaagcttccgccatgagtctctgtcagaagtcagaactatctctctctcttgacttgtctaggtgactcttatagagctgtgaatttaaatggagttggattggtgtgatggtgaagataaattcagtgtcaattttggatggctggtgcagttttttttttccctcttaacgaaaacaaaattgaatttgttaaccaaataaagtaatggaatcttcataagtcaaactcatttttgatgtagttaaccaaataatgtcttcactttctttctcaatcaattattaacttcttgtgagaaataaactttcctaataatttgttcacgtataaatgtttttttaggttgaaaatttgaagtacaattttctcttattagtttttgttttcaagatatatctttgaattaatattatataaaaacgcagcatgtagtagtataacattttgatcttgaaaataaaaaaatatcaatttcaaagtcttgaaaataaccttttttttttttggctatgagtcttgtgaagttaacttggtgaactctcgactcacgatgcatatcttaattgagcaacatgattcataattcatcttttcatgtctcttgccaacttccaatagagtgcattgacattatttttttaatacattatacatatatcatgcatgtttgtttctcatccatggagaatcatttttgaaatttttggatttttgaaattgcttaaaaagaaagaaaaaaactcaatttttattgtcatacaatgttttccaaaatatgtgtacatgttcttgcatatgagttaattagtgagggtttcctcaaaaagattgttgtatttttggaaaacaaagtttatttttggatattggttctgcattttacatctaatttgttttttaaatcataattttagaaaatctattactaaattaagaaatctatgaatggtttacttcattccgtaaaacactataaattgtcctaaactcatattcgctctcaagtcaaaactcttctattttcccctgtcttcatatccaacagagatctcttc

SEQ ID NO: 4925 - DNA, 3000 bp, Unknown
  misc_feature (1)..( 3000): cDNA_ID_3074850_gDNA_ID_1620745_Annot_ID_49700 3000 nt of promoter + ATG
caatgactaaaacacccttataaaagttacttaatttacaaaaataacctaaaaaccctaaaacccttctctttagcaaagctttccccttttcagtctccaagctctcttctgcggaactcacggtacgaaagtctcctcttttctatttactttaatccgaagtttgctcctttacttttgatttgttggagaatttcgaattctaaatttgggttttgtctctgtagagtaaacacgaagtaaaaatgataaagagacgattttacaagcttgagcatggtgataaagacagtggatccgattcatcgtgcttctcttctgactctgatcctgagacggaagaatcagaacaatctgaagaagaagactctgttgcagaagtttccgaggacggtgatgattcaggagatgatgaatccccaggtttgcttcttcaattgagcaattatctcttttagttctcttgtgattgtactctcagagaacctttggtaaaatctttgcttattctctgttatagctgctggcgaagacgctgatgttgatgatggtgatgataactctgatgctgatgactatggtgggacattggagaagatgtcaatgaatcgttttttagaagaaccacccgaagaagaggaagagaactatattctcggttgtatgatacaatccaaatcggtttataaatgcagatattgtccaaccgttgtttgcttgaatgagaacacaatgcaagcacatgtttcatcaaaggtaaattaggtagctttgaattagcatttgagtgtttggtcctttttggaatcaagtagtagatgataagcacgggattagttttgagcttttcctcatcagtcttgtagttgatgagatagtattttttgtcgtttgactcatttcagaagcatgctcgtatggagaaattagtgaaagaaggaaagattagaactgatgacgaagaagttgacgatctagagacagcatctcaggttacattagagaatttgccaacgagtgctttttgttttgtcaatgagtcctaaccaaattcttgcacaaatcttaaatgtaggagaaggagaaaaaaggaaacagaagatcacaaagacagggaaagagatctcaaaaacaggaaaaggtaaatgtagcttgctcaatactgaagcattgtgaccatggttggtttgttggaaacctaattgattcgtgttttcaatataaacgtctaggattcattgaccaaaaatggagaaaacgaagaagttgaagatccagagacgccatctcaggtgagatttaagacaatgccatcaaatgcttgtgttagtccaatgagtcctaaccaaagtcttgcaaatatcctaaatgtaggagaagcagataaaaggaaacagaagagctcggagagagcttaggagatcacaaaaacaggaaaaggtaaaatttgcctgctctataaccctgtgaccatggttgacctgtcaaaaaccttatctattcgtttcttaatatgaacatccaggattcatcgaccaaacatggagaaaacgaagaggttgacaattcagggacgccatctcaggtttttctttttgacgttcgagcaaatgtcaacaagtgctttgtgttcttcccatgagtcatttactcaaccaaattcttgcaaaactactaaatgtaggggaagcagataaaagaaaacagtagagcacgaagacagcgtaagagattagaaaaacagggaaaggtaaaagtagcctgctcattactgtaaccttgtgacgatggatggtttgtctgaaaccttattgattcgtctttttaatatgaacatccagggttcattaaccaaacatggagaaaacgaagaagttgacaatccagagacaccatcacaggttttctttttgaattctagcaaatgcaaacaagtgctttgttattcttccgctgagacctaacaaattgtttcaaaaatcttaattttaggagaagcagataaaaggaaacagtagctcacgaagacagcttaagagatcagaaaaacaggaaaaggtaaatagcctgctcataattgtatccttgtaaccattgttggtctgtcaaaacccctaatcgattcattctttcttaccaatatccagattccatcgactaaggaaggagaaaacgaagatgcatcacaaaaatctagaaagaaaaggcgtcaaactaaggattgaaactgctgtattgcccaatatggttagccagaaagattcatctttttttacttggatgtcgatgaatagatgaagaaacataggttgagagtgagttaattatgtgctttttaaacttcaagttttgtctaccaaatacggtgcttgttataactgatatgattttgataattgagttatacaattcttttttacaagttgtatccttttttcatttcgaaccatccccctcttactcaacgagagagattgggaaataattgcttgaagcagaaaatcgaataacagattagttgaattaaaaatatgtttacttgaaactatgttcctccaataccatcaatgatctctggcatttccctccaatttctgtcgttttctcttcccaagtcagcactcagcacttgtcttgagaaagttcaaagacttgagtgaaaaagacaaaaactttaatattttcttctcttcttttaatcttggtctccaccataaacaattattgatctacatatctgtgtaaaacagtggaagtgtacacacgaaataatatttttatgaatgcattgaaaaaggaaacaagtgagacaagtgagatttgattaacttctcctactgctcttaaagtatcaagaagcattggcttcacgtgacatcttcgctgtcatgtccgtgatcgagcttcttcatcgatgccacttacaactgctgattctatcatgacttggtaaaaaatctcttgaattccattatgatctcttcttcttcttgtatg

SEQ ID NO: 4926 - DNA, 3000 bp, Unknown; identical to SEQ ID NO: 4924
  misc_feature (1)..( 3000): cDNA_ID_1839354_gDNA_ID_1620745_Annot_ID_49710 3000 nt of promoter + ATG

SEQ ID NO: 4927 - DNA, 3000 bp, Unknown
  misc_feature (1)..( 3000): cDNA_ID_1826468_gDNA_ID_1620745_Annot_ID_49714 3000 nt of promoter + ATG
aagaacgtaacgaagagatagtgacattgagtgtacattgtatcttttattaaatgtgagagaatatccttttttgtttcttttctcaagcataaagaatgtaatcatggtatttaaagcatatgtttaatgtgaaagaaatacagtattatgtaccctaaatggaacaacttattttgatatacgttcttaagttattttttgatacataatttagtggtgatgccaatagtttttgttttagtcatacaaactgaaaggtgctatagtttttaaagggtggtgcaaaagatatcgatcgtagtcaactaaaaagtgccctaactaatgattacgataatccgttttatattggtcgaagttaggtgattaaaatatggtttctctacaagtattttgtttggacactgcaaataaaaccttcatgcacataaattctggaaccatcttcatttttttcataattaatctctatcatatatagtagtatagaccccgaagtaacttaaataccaattatgtattataaatacggattgataacatttcatatcgaaacatttcatacattttatatctgtaatgttacaaccagtctaaagccaaggattctagaaactagaaacaaattttactaaaattaattgagggaaaactcaagaatgtgtgtgtgatcattgaagaaatgaagaatgtgtgttagagtgagtgaatattcaaaagactcaaataggtttttaatgaacaatagggaacccgaggaaacgcgtgactctaagatatatgaatttattttgcacttattacttttgattaatttttatattctaacccttttttatatactatttttttcagtgcaagtaatgaatgaagtaacgagatgagagtctagtttcaaagttttgaatctttttggtcaatgtcgtctctatttgttgaccatattatacgtttgactttaaccccatttttctttaatctcattcttcttctttgcttcaatggttgacgaattcttaccgtagaagttgcatctaaatataccaaagattaatactgcgaaaatatgataaagaagattttttttttttgtactctctagaaatttgtaaacgatattattagtgtttgattaaagactccaatttttaacataatgtctatatccacataatgaatttgtgtctctactatatgtagtgttcccgtcatatatgcatttttgcgatagtcaatcggatctttgtattgcggttaattgatctggtctttcttgagcgtacaaaataaatagaattgtacgtattattagagatggttacatttggtttacattattagttaaagttaaccaataatgtaaaccaataaagttaaccaataatgtaaaccaaatgtaactatctctaatacgtatgttgactatgatgtacttcaagacaagttcatcatcacttaacgtaactaacactatattagttaagttcaagacttattgcccatgattcatttgtaaactatgaagtaacatatctctgattttttcctcttatgtttgataaattagtcattataattagtgtcttgccaaaaagtacacttctatcttattagcattctacattacaaactattaatttcactacgtatagcggtatagggagaagatcaataaggcgatcacaatattagttaagttccgagtcttgcattaccattgtcctatgaatcacagaacaagaggacgcatatatatatagtatttataaaagactaagatagtcacagaacaagaggacgcatatataattgacaaatactcaaaacatgtgaaaagataagggctattacgtcttcattaagatcccataatctttatgatgagaacttaagagccaaactagctatgtaacaaaatatcaagtttgaaagtaataaactgcttgaataagcttcaagttcactacatggtttagaaaggtttaaaatctattactttcaaacgcttttattgtgtaccaatcaatccaacaaagtatgcaatcgtactaatcaatccaacaaagtatacactcacaccggtaacatcaaaaattcaaaaattcaaaatttcatgttaccaatcaatccaacaaaatatacaatccctgagaccgagttataatttgttggaatgattggtaccagtgaaattgtgttgtcgtgtgaacatcaacacataggaggtaatatacgtaaatatgctagcaatcaagctaagtatacaaaacacttcatgttgcagtgttctattgaaattttatatatcgaactagaatactatcatggagaatgatcaaatgttgcatatcttcatatccacgaaaaatgagtacacaaacattcgatcataccccatgacagttttctagtttatacttgatagtcctcacgatttcatggtggtgacactacacaaaccctagattcccctaaagtttttgtgaaaaacgcatatgttcgattttaggttttacttctatccttgattcattacaaacctatttttatactaattcgtcgttaacctaataattttaacctacgaaacccaacctatatgggcctgactttatgtaatgatccaatgggcctttcttcttcaatgatgactttcttcattgactctccttctactttcgatggtattaaatttgacggaaaaagtaaaacgataccgtctgggtgaaaggcagagctctttgcttctgaatattattattttcttaaattcttccgtttttttttttaatccaaccacaaggatcgataacgaaatcatcagatcgccagaaaaaaaaaaaaaattgcgaaatggagaatctgagctgcagatctgcgtcaatctccatctagatgttgttgctacttcttcctctatagaaccataatttcatcagatctcgctgattaatcatccccatttggatctgatcgaaactcttagggaagaacatg

SEQ ID NO: 4928 - DNA, 3000 bp, Unknown; identical to SEQ ID NO: 4923
  misc_feature (1)..( 3000): cDNA_ID_1826464_gDNA_ID_1620745_Annot_ID_49715 3000 nt of promoter + ATG

SEQ ID NO: 4929 - DNA, 3000 bp, Unknown
  misc_feature (1)..( 3000): cDNA_ID_1826460_gDNA_ID_1620745_Annot_ID_49716 3000 nt of promoter + ATG
cactttcttggagatgaatcctttcacattggttgatggaaagccttatcctctggatatgaggggtgagcttgatgacaccgctgctttcaaaaactttaagaagtaagttttgactcttccacttttttcaactgttccgaagtcaagagctttaagaagtcatgataagtcaagagtttgggcggtatgattaacctcttacgttttgcaggtggggcgacattgaatttcccatgccatttggaagagtgatgagttcaacagagagcttcatccacggtctagatgagaaggtatcataccaataagcgtagagtaattgacgcttctggaaacaccagtttctctatgacttatgacccttttgtatatgcagacaagtgcctctttgaagttcactgttctgaatcccaagggaagaatttggactatggtagctggaggaggtgcaagtgtcatctatgctgataccgtatgtttttatatgaacaccgagaatctcctgcatttttctgcttagaagccttagcctctaaagtgtttactgaaatgttatccaggttggagatctcgggtatgcatctgagcttggcaattatgctgaatacagtggagcacccaaagaagacgaggttttgcagtatgccagagttgtcattgatgtaagatgctgctttaacttctgccaataaagcatctgaaaataaagtcactcctgacttggtcgtggtgctgaatgataatactgcttcttcagtgtgctacagcgaatccggatggaaaaagcagggctctggtaattggaggtggaattgctaacttcaccgatgttgctgctaccttcaatggcataatccgagctctcaaggaaaaagtaagcaagaagagagtagaatcatccacaaacacttcattgccccttgactacaagtataaatgaaccatgctttaaccgtttacaggaagcaaagctgaaagcagcaaggatgcatatatttgtgaggagaggaggaccaaactaccaaaagggacttgctaaaatgagatcacttggagacgaaatcggtgtccccatcgaggtatgtagacacacaatgaataaactcaagacattcccgcttaatcagtttctaactgtttttacatgtctgtttgatttcaaggtgtatggtcctgaagcaacaatgacaggtatatgcaaggaggcaatccagtacatcacagcggctgcataagcctttacaatcttatcacttactttcaaaatactctttagcgtctcttgagtttgagacgtgtttggattatgtttcacttctaatgtatcttactattcataaataaagaacaagtatcttcttttttcttacttggtattttctcttttgattctcatcttcttcttgacttagatcagaagaaaacgtatttaatcaacttttatctagcaactccaaaaattctactaggaaataacgatatggaatcagaagcatttaagccttttacacacgatgcaagcaatttgctgaagtggatatcgacagtcatagacatgtccatttttagacttggctattcaaaaatttggaccatttttctattaatcagggcccgtttttagtgatagctctggatattttcattgagctgggccttttctggtcatggaaagagattgcaatatctatttagccatcccaagtgggcaaaacataatctacgcttacaaaatttgtgtaaacgaattcgtctacgcttacatttttgtgtagtaaagagaagtattatgttatcctttaatcaaaaactcaaaaaggggtaaaataattgaagcctgaaaaagccaacaagataggagacaggccatgaacgtgatctgcccatcaaaaaaaactttttttttttctcggtaactttttctaaaaagcaaaatattaaaataagagagagatgtccttgttcttatgttttttcttttatcatctatgtgacccatctcttcaatctaatcacatttttgtatattaaagtgttttcttgaaacatttgtccgaaagcagaaaataaaaaggattcaaactgaaatcatgaaaacataaacaaaaaaaatgtactattctttttacctcacagtaattttgttttatataaaaagcttataaattaacaaaacttataaaaaagtgagaaaaacagagagtctcttcttttcttgttattctgtcagtatctttctgtgtgtgtttgtggattttttggcattttcattttggattttgcttgtttggtccctttcttttcatgattattatttttaaattccttttttatattggtggtgtgaatgataagagtaggcagatgagagattagatgatttggtaatagtggtgtggaattagaagcaaaccttttttgaaaaaattaagaatgttatagagattagttattcaataacaactactaccaaagtcataaaaatgatataaaatataaaccaagaagcactattagtatcactcatcactcaatagctttttttttttcagatctctaggaaaatttctcagactttcagagcattttggtgcttttgttttgcttggtttctcgggaaaattctcttcacacttttagagttttctctctcttctctatctcttgtcacagctcgtttagcattcattctcttaatcgtttcttcattcaaaaattctctctttctaagctgagtaacttgcaagtcgtcatttttcaattggggtcttctcctttttacttcctttgaattgaaatcacagagaaagagaggttccattgctggaaaatggattgctcaaattagtttctgtgtctaaataaagacagagaagaagaaaagtagacaaaagctaagtttttttttcagatatgggagagagaaaaatgagttggtgggttctttgaaacttgtttttgttcagaccaaagttgattgctttaagaagggatatg

SEQ ID NO: 4930 - DNA, 3000 bp, Unknown; identical to SEQ ID NO: 4922
  misc_feature (1)..( 3000): cDNA_ID_1826456_gDNA_ID_1620745_Annot_ID_49717 3000 nt of promoter + ATG

SEQ ID NO: 4931 - DNA, 633 bp, Unknown
  misc_feature (1)..( 633): cDNA_ID_1826595_gDNA_ID_1620746_Annot_ID_49718 3000 nt of promoter + ATG
gaattcctacatctcagtgatgatggaccccaatgagatgtagatgagatggacacaaaaaaaaaatgggctctaaagatcccagcttataaaattctgattaaacaataataacaattatggaaattttccaatagtgacatagaatcatatacaaatagggttagtgtgtaactggtggagtcattatgaacattgtatccaatcaacgaacatttcagtgcgagaaaaaaaaatgacaacacacaaaattttaggccatttcaagaatacaaaatcaggaacaggtcatagaattaggcattagaaccagctaataaacttcagaaaatataatctcccttcaatgaggtaaaagtcaacttttattccctctctatctgtctctctatctctcgtgcacacaacttttagaaagattgtctcgcaagtcacaatattcctaagttgacaatgaaaggaatcccaagttcgtcaaaccagatcctaaaccaagatcttgttgaggtatgctatttgtgatgatcatgtttataatgaatttggaaactttggtcttgagagagtttgttccgcttttgaagcttgatgtgccgtaagatgataattttgcgtatataaatttgaggaatg

SEQ ID NO: 4932 - DNA, 3000 bp, Unknown
  misc_feature (1)..( 3000): cDNA_ID_2994827_gDNA_ID_1620746_Annot_ID_49719 3000 nt of promoter + ATG
taataataataataataataataataataattggatatttggattagagaaattattgaaagtaatgtataaactattgaaccatgaaaatatatttgcgaataaatcatcaaactgaaactatcaaaatgtataagattttgaaaaacataatttcacgaaatatttttttttttttaaatctatgttttgactttttatcaaattaacaaaagcactatctgattatctcaagctgatttagtagaccgaccaacaattttatcttttaagccaaacaagtaatatactttatcataccaaaaattaatatatttatgatactaaagaaaaaactttatatatctcctctagtatatagtaaaagcaacaaaaaaaattaaaaataaatgttaagagagcgttttatggtcggcttttcacgcgtttcactttccaattttcatttcactttataagaatagaagaactccaaaacattaaaaataaggaatcagaaaaaaaatctataataaagttgtgattaaatcattagttttttttatataataaaacgcaggtgatcctaaaagttttcaaagcccaaagactaattgtaagatccgataaattactcgaattttggtgactaatgttacttaaacccaaatagtggaattaacactctttaccagtagaccaaagcaacttggtttaatttattttcttcaatttaccagatcatgatgccgtttaggaccattggactagtccatgctgagtgaaaataattcactcaaaagaataccgtaaatcagaattttccacgtttatcaaataactgactaaaaagcacacataacaaaattttcatgcatcaacttgtactaaaatttatagaaaactggcgtatattggtaaataaatagcagaaacaaaagtggaaaagttttgtggcgccacttgcgaagtgaactttggagctggagcacagctggacacgagcagtggggctgcagctgctaagtgctgacccaaattggggtcacaacctttcctcttataacggtccaatatatattaccgttatgttacatacaatatagtaatttatatatatatatatattttttatatagtaatttatattattttttgcacactatcgatttgatttacaacaagtccttttgttttttgttttttgttttttttgcacaatatcgattgtttgaaccttcaaaattcatgatagaactcccggggtttttcctttttatttttatttttttactctcaaaataagaaaatcatagtccgacgactccatttaaaagacttaaaaaaaattatggtcaaaatatgaatattttatatagatacttaatgcagaagctatagttgcactttttcctcgacaagactcttgtctcttcaataaaaaatgcgttggtttagttttatactgtatttagtaagtatatatgcttttccccacggcccacactcatgcattgatacataccactttattggtctccagactaatctggttatatgtgcccatcattaattcaaattcattaacttacgtaagaataccacccttacaaaacaacttaaaaaaaaaaacttgaatcaacatttaattaaaatttgacaaacatcgttataaattttatataactattacttagttaatttgaaaaatccgttgcttaatagttaataattaatcaaaaacacattgatttactacatattctttttatgccctcggtttggtatcttgatatatcaagcggcttgtaacttgaattcagaatctacgttttcaatgttgtttcctatgatggtcaagtggccgctacttgatttcagaatctacgttctatgatggtgaagatattgaaatgaatgttggaatttcttttattaaatttttagttggtatgactgattagccatacaaaataattaggttgcagccacttattttaacttgtataaaaaataagtgatactactaatttaaatcacctattattactttttttttatgggcacaaaatcacctattattactaattgatacttttattgatttatttaatattattcaatcaatttggtgtaaatctatattaatttccgctaacatcatcctagtactggagaaacttgatttcgtatctacagcctttctagaacaatttttatccaaaacttaaatttgtttacgttcattttccttgttccaaataaataattttctttttttgacattatgcctttgttgaagtaatgcatgtcacatacagtacaagaaaacacgagtttcagacttcagtgtaaaacaggattacatgtattgtaagcgaaaataattaacatcaagtagtcaaaatattttacactatgtaatgttaatgatgtgtaagattagcaagacttacacgttcgcggaaagtaatctaaattatatatttccattaacaaaaggtaatctagctagaattcttaattgactttgatagctagttcttgtataaacaataattcttttctcgttgatatttatatcaaagtggttatcatctatctaaaaatctatacataagaattagaatatccttaaaaattctaccagtaactttcaatagagagttatcaaatatgaatcatgattacatcagtgtttattacacacatatttacacgtaacacataattagtttcatggtcatcgttaattactctgacgataatgtaaactaaaaccgggtggatttaaccggacccatttgccatcactctccataaatcctaaccgtccatctaatcaagcgtagatctaacggtggatatcaaatcaaaggttaattccctccctatatatattagaaaattgatcctgaagcgtgtaccgtacacacatccccatacgaacactcacaatcgttaaaaagaaagaagagaagagagagaaagcttaaatcggaaaaaatggtttcgtggatg

SEQ ID NO: 4933 - DNA, 456 bp, Unknown
  misc_feature (1)..( 456): cDNA_ID_3074936_gDNA_ID_1620746_Annot_ID_166661 3000 nt of promoter + ATG
gaattcctacatctcagtgatgatggaccccaatgagatgtagatgagatggacacaaaaaaaaaatgggctctaaagatcccagcttataaaattctgattaaacaataataacaattatggaaattttccaatagtgacatagaatcatatacaaatagggttagtgtgtaactggtggagtcattatgaacattgtatccaatcaacgaacatttcagtgcgagaaaaaaaaatgacaacacacaaaattttaggccatttcaagaatacaaaatcaggaacaggtcatagaattaggcattagaaccagctaataaacttcagaaaatataatctcccttcaatgaggtaaaagtcaacttttattccctctctatctgtctctctatctctcgtgcacacaacttttagaaagattgtctcgcaagtcacaatattcctaagttgacaatg

SEQ ID NO: 4934 - DNA, 3000 bp, Unknown
  misc_feature (1)..( 3000): cDNA_ID_1826593_gDNA_ID_1620746_Annot_ID_49721 3000 nt of promoter + ATG
accttttggtatcatgcaacctaaatcagatttggagttaaagccactttggtcaagtagtagtttgaggtcaaaggttagatttttctgtaagctttagatagaggaatcagatatatttgttgctgtaggaagtttctaatagactgttgttgtcttacaacagagcggcgaattgaccaaccgtaacttgttggcaatgccggtaggacttaagcaaaaggataatgttgatgctgttgtaaagaaggtaagtatgcttttgtctagatcagtgaattactgaaaattttctgtttctaatgttagttagtttgttgtattcagtttcttcctgcgaatttcactgtcattctatttcattatgatggaaacatggatcaatggtgggatctagagtggagctcaaaagccatacacattgttgcacataaccaaacaaaatggtatagtgatgtttccaatataaaatctatgaagatcaactatatatatggcttgtaacaatgatatttactcaggtggtttgcgaaacgttttctccatcctgatattgtctccatttacgattatgtttttctttgggatgaagatcttggagtggagaatttcaaccctcaaaagtaaaattccatttacaacttcacttgtgaatttacctgagatcaaatcttggagtgccttttctaagcagtctctctacaggtacctgaggatagttaaaacagcgggactggagatatctcaaccggccttgcacccaaactcaactgaagttcaccatagaattacagtccggtctagaacgaaaatatttcataggtgagttccttgtgattttgtgaaccactttgttaagtagttctcttgataatttgtgtcttcgattacttacacaaaatgataacaaaaccgcaggcgagtttacgatagtagaggcaatatgaaatgttcaaatgctagtgaagggcccccatgcacagggtaaaatttcttaagtagcataacagtttaagacttctctatatgccaaaacacagacattaatgtcattgttttgtctgttttttctctgttttttccagatttgttgaaggaatggctccagtgttttcgagatctgcatggttttgcacttggaatctaatacaagtaattttaagagatgaatgcttataaacaaatatatctgttcttctttaaatgaaattgcatcctacttattgtttttgcggtttgtagaatgatctggttcatggttggggaatggatatgaaacttggatactgtgctcaggtaaagactttttcttctttaagaccttgcaacatcactcgtctccattagcattgtgatccgattgcattctctagatgaatcggttttgaaaatgtcgtttttagggtgaccgtagcaagaaagtaggcattgtcgacagtgaatatatcttccatcaaggcattcaaacactaggtggaagcggttatcccgataagaaggtaagatcatctacttccccacctattctccttgtatgtatacccaaaaccgataaacgaataatctcttcctaatttccacagaactcagctcgcagcggagtaaatagggtaagctacgtaactatccaaatcctcatttgtttactgtaaaacaaacagaaagttcacaactttggtcacttttttcttatgtacagagacgcggttctgcgacttttgattcaagaacagaggtgagttattattacctgatgatgaatctgctttaggaactttctttcgtctatagagcaggagtgtaatgtgtgtgttttgtgagcagatacggagacaatcaacgtgggagctgcaagcttttaaagaacggtggaaccaagcggttgcagaagacaaatactgggtggagcggtcttcaccgagccggaaccgaataggcaataaccggagattaaaaagaagtagtatgattccaagtttattgcagaggaaagctgaagagactacaacataaacagatacagttttaatcagattaaatatagagaaatgtttttttggttggtctcattgttatatataagttaatagttaatcatttacctctctttgattagtgtagttttcatgatcttctttaatggttcagtctctctccattttgattaaattccaattatatgagcatatttttcttgaaaaaagtgttcatattaaaaaattaaggataaagttcaattctttttttctcaataaaccctctttttgatttagatataaagttatgaaatatcccattaaaggttctctcaatcagtttcatataactaaaaagatttaaaaacatatatcttcttgttataaagtaaaagctttcaatcaatcatataaaagacagagaaaacaaaatttaaagtttttgttttatttttctaaaagttatttttttttcaagcttgagcattttttcaaaattaatatcaatttttgtataaaacgaaattgtgccgtatgtgatgggttacttttcaaatgttcttagaagcagacaagatcattgaccaaaggaggacaatttcaattttttcctatgtgtgtgtgtgtactcattagaaaattcaaattatttgaaacttcagttgttgaataactaaaaaaaggctaatatttaatttgtcttacaatggtgataatgacatcaatgtaatgaatctacaaattttacaactaataaaattgaaatattttaaagtgtaaagtactaaggaggattaagaataaattcagataagataaatggtaattagcaatatagcaaaaaaagaacaattatttactaaaaagacacgcttttgtgtcttcatataagcttgtcttcaacgttcggctaatccttggtccgtgctaagatcttagatcgatttctaaagtcttcgtcttcttcttcttctgataactagctttttcaatcttctgaagctttaattttttcatacccatg

SEQ ID NO: 4935 - DNA, 3000 bp, Unknown
  misc_feature (1)..( 3000): cDNA_ID_1826589_gDNA_ID_1620746_Annot_ID_49722 3000 nt of promoter + ATG
atcgcagcagcattactgctggaagcacaaaggttgtggttcttcatcagaaatcgacatctccttctgtccgaacgagtctggcagctaaaaaaccaagaaccggggcgcaccctcttaaaacggttgtgcaagatatggcaaagacttcaagtaggggtaacaaaaggtctgttacggatttaccagtttctgctgtgaaatcctcggcagcgggtaagaagggaactgcggtaagaaaagacggtagacaagcgaatcgcggactcgaatctcctgcattgatggggagaaagcggaaccgggttagatgatttttgtatgaagggtttgtttcatatgttttttgtagttaggcagagaaagcttatttgatgtagtagtttatatttgggtcaatctaatctgcaggcatagacagtgatgaatcatgatcattggtaaaactaattgttaaagaaaatgtatattaatctcattgttagtttctctcattgtcaccttttaatttatttactaatcatagagaaaattgatagaaggttgttcaatagcacgtagggatgtaaatacattagttgtaagtgtttatgatcactaacagaccatttgtgaagtatataatggtttgcaacggtttacatttgcaacgattttgcgtttgttgtcgtgttcgtcgttacatagtcacaaagtagtattaacaacatcacaaatatttgcgactacaaaaagagtaaagttcctcttttagtcgagtcatttcatacctttttctaataagaaggctaaatcacaagaaaaagtcccaaattgcatgttttcttgtagtatttgtctttgccattatcgattaatccgcttccgcaagagacaataactactgaatatccagagactaacgactccgaagacgatgacttcgacattgatgaaaccgagaaaaacaacgtcgttttgatttatatctagccacgtcagcgatacatgtggtaatacagtcagcaaaacgtaatggttgactaacacgacaaaatcaatgttagttttgatctattgttgttaagtttagattgtaaatttgaatagtttatcagttcgtgtaagaaacgaccattcatctgacaaattgttccggttaattttgaccattttccattgcatgtagttaggttgataaatgaatgaccatgtgtaatcgaattttcttttctttttttgtagacgacataaaaaaaagaattttaccggtcaaaataaaaaagcacatcgttgttaacgccgtttagtgtgtcattaactacgtcgttttcattgacacgaccaaagcactactttcctttattattagactcgcgacgttctcgatccagatcacacgaatgcatctcctttggttcgcctacaactgtgaaggttagggctgcttcgatttgaggagcatcgactcgcagggatttagttcgtaactcgaacaaacacgaggtagttttgattttatatccagttggtcgttttggaacatggttttagttacatctcaaaagtgatactgttttatgtttttggttgattggaaagtgatatttgttttatctgttcaaggcaatggagctatatgtttttgattgaattatacattttttcttaacaatatgcttttgattagagagatgaatttgaagagcatctaaacactcggaaatataattattctgaatctgaaagtacttgttattgactaattgtaattagcatgttttgtaaacttgtataacaagaaatttatccaaatgttggtgaataaaaaaacttgatcttcttctctgttttcttcaaattagtttagccccattagttttaaactagatattagattggatcattgacttaaaaggttagtgtttttttactgaaaatgattaacacaagatccttttttcttggtatgaagattcagtaccgttttgctcaaaaaaaaaaaaaaaaaaaaaaaaaagaagattcagtaccgttcagggtgacagaaacattttcgaaaagagaggctataagcgggatgatgaatccgaccatgatggtgttgcagaaatttatgtatgatgtagttattgtccagggatcgaaacaccatcatggtcagatccgtcatcccacttatgttttcttaggtcaacaaatatggacaattgaaaagtgaagctctatttattacggtatgtttatgtatctcttagaagtatattctaaattaaactccctttatttgaattttatgttgatattagcagtttgagattaaccgcctcgataacaaacatcttgaatccgttgaggttgatcacgatgatgccacatccggtttcattcaaggacttctattcagaacaaacttcatgatttctgaactaattggatatgataaatggtaacaagtattcacttgcattcaagggacaaaaaatcattgggatatatgattatgacaaacacgattggaagctgaatggttgcgggaggcaagcagtgggataatgatctgcaagtggaaacttcttacttttatcatatcccatcagctcgaaagtcttgatgttagttttgaattgaagtgcttgaattacaccagatttattgtgctcgtgtatcccggtaaattcgactaatgaccaactcttttgaggtacgttttttttttggtggattaaagagtttcaagaaaagtctttgtcatttgttctccatttgtttgtcaaacgcacgttcttgagcctttcggcctgcaatctttccactattctcttttaaattattttcactattatgatattgtgcaaaatatttgtcgaaaactcgatacttgtatacaatttataagacatgatcaactctcgtttaaagatcaccaggcacgacattactctccactcatcaagtattcttctcgcctcatacacctgaggtcatctctatctccttcagttcacaatggttgaaatg

SEQ ID NO: 4936 - DNA, 3000 bp, Unknown
  misc_feature (1)..( 3000): cDNA_ID_1826585_gDNA_ID_1620746_Annot_ID_49723 3000 nt of promoter + ATG
aagcttcaattaataagttttggaaactaatagacagcgtactttctccaacttcgaaatgtagtttgttgtataattgaatatagtcgctgatgctatacagaaaatatgaaattgctaggattacaaagttggaagagctctgaatacataacaagtatttgatttgtttggcttttgtagaaggaagagcctcagatatctgggagagaggatgatggtgacatttgggagattttaatgcgaactcatagtgaggtcttaaacactcttcaatcacggttgacaaaattacaggtaaattttgtctctgctattattctttttaatatcgttttctcttgttctcttgtcctatttctgtttggtttttcctttacgtgtctttttttcctgcttgtgaggataaactaaatggctgatatcacaaccatgcagattgtaagacatttctgggaacgtagtgatattaaaggcgcgattgcggccttaagaaaactgtcagatcactctgtaagtaccccagtagatatacttttacctgtcttttttaatgcttagatgtttggaaaaagctgactcgcttaaactggaacaggttcaagcagatgtgatcaatattctaacagacaaaacagagattttaacattagatttattttctcaattagcacccgtcctcacaggcttattgggcagcaagactgagaggtaaattattttatcccatattcaaccttctttggtttgcttttagtttgagatatatagtcgtctccatcatttggcttgtgaatgagggaatggcaagaaaattcatttgtttattacagtcactgtttatatgttaatatgagcttttgacttaacagaggaaagcaacatgtgatttcaattttgtataggcctgtaaatgtctccttggaaatgctcttgaagcttgtagcagtgtttggcacagttatacaatcaactgtttcagcacgacgagttgtcggcgttgatcttcatgcagaggaaaggtacttatactttcggctcctcttatatcttcatgtcacacatatctctctttttcgagaaagtaaaacaaatcgagaactgcaggttacagatctgccaaagctgttctgcggaattgcaaaaggttcagaagattcttccactactgacaaggtaaaagaatactttttacacatcttattatggaccattgcgagcatgacagctcttgttgatcggtatttgctttcggttgtgtaattgtttccgtcctcttccatttattacagaagaggtggtcttatagcaagaaaggcacaagaactaaacctagttcttcaaacaccatagctcctggttcaaagtcaagaccactcggaatcacttgcgaactgtaaccccctcctgctgagttttccaatttgtacaatgtacattatcaagaaccatcttcatgttcctcccggtgcttttgtattgaagattcgctgaaaagtcgcaggttcttgtgcggggtttgatatagaattgtgccaggagaacatgaaaagtcactcggggaaaaactcggtatattgctgtaaatcaatctgtctgggattagagttgtatgtgcttcagattcttgattcagtgaatctcaaatgtgtagctgaaatggcaattacaatgtcgttctatgtgaatgtaatgtgcaatcctaatgagaagacgcaatcggtatatgaatttcacttggcaatccacttttggtccctcgacatatatctgatttttggaattggtcatgtgtcatgttgaggttagaatatagacctatcaaagattgtttatctaccaaatgtgataatgacatatttcagatagtagctagtcttcataattacagtctttgttattggtcttcgtctatctcaaaagtaggaaataaattaagtaggaaataaattaaggaatgtacgaagaaacttgttgtctcttttaaatagtgggacatacaaacgaattagcaaatttggattacatttagtatttctaaaaatagttgaaaagtatataaattatgatcaaagatttttttatttaatgaactttccgaaacttaaatctagtgattattaatcatgatattagtttggtgactgaattgaatgatgtattgaaattttgttatattgatcagattataaagagaactaatttaataatatccgttatatcattcattatattatcctcggtgaaactatcaaaaattaaaattattttggattttgggtatacaaaagcactattatctaacaataattattccaacaagttgtggtaatgacggaaaaaatcgaataaattaaagaaaagatagaaaaattctgtttaaattaaaaatttactttatttagaccaaaaaaaaaaacaaaggcacacaaatctagtctcaagtctttcttctttgttcaaaaacaaaccaatcttcttcttctttgccttttgaacaaaacaagaaaaaacaaataaaacaaaccacaaccatcaatttctaatttgttccatttcacaaacgtcgaacaaatccagacccttcgccaactctttctctcccacctcagatttttctttttctttccttcttactaattttgaattttaatttaatttttctcccccattttcttgtcggaaaacagcttttcgtgtaatttacctccgacacaaacccactcgtaacggctttttctggtttcttgtcttatcataccagattacaaacttttatcttggtcttggtttgttgtctctgtctctgttttttttgttttttttgagaattgagtggtcggagaaaaaaagggaaaattaggtggaaagcgctaacatgcgcttggggtgcgtaagttaagttttgggtttctttttctttttcaaaatcgaggagcgcgtaaggcacacgcgtgattattatttttgatggttatggtgatgatgacgacgacaatg

SEQ ID NO: 4937 - DNA, 3000 bp, Unknown
  misc_feature (1)..( 3000): cDNA_ID_1826581_gDNA_ID_1620746_Annot_ID_49724 3000 nt of promoter + ATG
ttccttgctttaccaacctatgccgcgtgtctataactcactgccacaacatgaaggatctgacttcgcttccacatgtgaatctaactctgtttctttttcttcttctttagacaggactaaacaaactttacgctggattcggattcctctctgtctaaaatcggaatccacgcttcttcttctattgctttatatttcttcttctagtgtgtgttgtgttgttcatttggattgtataatttctttatctttctgcagtgtgttgtgttgttcacttggattatgttattattatttttattgtattatttttgcatctctgttttagcttgcagcttgtttgtgtgattcatttgggtgatggtttattttgttaaatcgtgaaaatcataaactcaggtcctctaaacctagctagtatgcagatactaaaactgtgatctaatgtctagtgcatggtaggtttctgatttgggggcaacaacaagagcctgttttctcctgtagtgaatgggttcaccacatcaactaccatttaaaacaagaacttataccaaattcagaaactcaaatttcgatcaatcgttcactggtcttgaacctcgttcatccaatgttacaaatgtctcatagaatatcttctctcttttttttttttttgttcctgaattgtttttaacttgaattcttacaattcaaaacatgttaactactctctatcgtggacaacttttaacatgagacaaaaatttagcataattttctcaatagttaaatgaaatgagaaaaattgtccaataatttgataaattttattatgaaaagataacatattacggaacaaaatcaaatatcccacaacaatcaaatcactataatattatcttcttaaaggggaaaaatgtcgttttatacgcgaactttcaaaaagtggtcatttaatacgtgaacttcttgtgtggccaaataaaacataataaaaacgttgaccgaccatttcacacaaatgttattgttgaccaggccaaaattcccatgtcgttatctttcattaacggatctgttagttccgttaacacacgttaattagtttccattaatactcaaaacgacgtcgtttcattaaaataaaagaatcaaaattcccaaattgatttcaaaatccctaaattccaaaaaatccttaattccttaattcctaaattccaaaaaccaaatccttaaattctaaaaaccaaatccctaacagcctcttattttcagcaagtggtcgtcgtaatagtcatcgtcgtagggatcctcaagggagctaaagaaaggccttcgctttgatgtttcctccttgttcatcatcgatcttgttcctcctccttcataaattcaaacgaacaactgctgtcaatagtcaatgttgttattcatattcaaattggttctcatgtgtgtgtgttcatcatattttattcacaagacaacaaaacaaaacaaaaacagggaaacttccaacatggtaaaataagattatgagagtgagaaaagaaccttggacaacgggattgagattcctaaagaagaacatgttgttgccatgtgaagcagatggattgaagaaaaacgaattggattccattttggaatttagggattttgaaatcaatttgggaatattgattcttttttttcaatgaaacgacgtcgttttgagtattaacggaaattaattaacgtgtgttaacggaactaacatatccattaatgaaagataacggcatggggattttggcctggtcaacaataacatttgtgtgaaatgatcggtcaacgtttttattatgttttatttagccacacaaaaagttcacgtattaaatgaccactttttgaaagttcgcgtataaaacgacatttttcctcttcttaaaatcattttacttcatgatccggttattggttctactcacgcatctttttttttttacttaacacatctttatacaccaagatgttatctattggcacaagaagttaaataataaaaaaataaaaactgatttgtctgaatatgaaatgttgtcgatgtaatgaaacggctcataaactagcaaaatttggttgtttgaattccagttcctacattgatgtagctaaaccgctactttgtcttgaacaacagttgaaattgaattattcaagctcaatataattccatttcgtcaaaaaaaaaaacacacaattatcatcataatcttcttctttttttaacgtcagttagcatccatcatacatctatggattgaaattactataattcattcctaaggttgaaaatgtcttcaagaaacaaacaaaaccaagagatgatgacgtgttgcctcaccaatcaaataatattttcgacaaaagaaaactaacaaattatgatggagttggagaaaaaaactgtaccaatagaagtcaattggaagcaagggttcttttcgtaatttccactcgaattcaatgcccggacaaaagggtgttttcgtcagaaccgagaagaacgaacaacgaagaaactagaggtccactgtccaagaaaaatgcttaattatatttttaaattttttaaaaaattaaaaaacctaccgaccgattaaaaaaaaaaaaaactttcttcgctttatcaaaatttcttcttcttcttctctgtttctttcttaattctgcttcgtgtcactatttgaatctgatttcgtctcgtttctttcaatcttcttccccgaatctgattctctctcacgttttttggatttcaaatctcaacggaaagcgatctcttctcatatccctccctttgaaatctccctaaaatctcgacctctgtcgtttagtgacaattcggatttttgtagctccgattcaccgttttaaatcgattccggaagctacagattcgattccagattcaaatttctatttccccctcacggattcgctggaaaatcgagttaaaaaatg

SEQ ID NO: 4938 - DNA, 3000 bp, Unknown
  misc_feature (1)..( 3000): cDNA_ID_1826573_gDNA_ID_1620746_Annot_ID_49726 3000 nt of promoter + ATG
ttctttttcatgttccagttgttaatgaaaagatttgattttggtaaatcatgaagatcttgtactcagattctctagtgtcaatccctcaaacctattctgaatatctaaaattgtgatatactcctaagctatgtgttaagatttcaatatcgatacctccgattccttaaccaaaccggtacacactaacacaccatacaagagagagactagcacatcactagctcagctctcaatacaccatacgagagagactagcacatcactagctctgctcttaagtctctcataccattcaacaacaaacaacataaacctctctaaacattcagagccattatttatactcgaactgagtttgttcaagatatttttagatcctaaaaatatcttcttcttcaagcaagtttcttctcacgtgcctcctcacttgcacgtgtcttcttttgctttctctcattcacattcttcttgatacatcaatcgtatcactatgtctagtgtggtggcttaatttcttaattttgttgagtgttatggtaaactcttaatctttttttttgcatcttctcacttttgtcaagaagcatatctctcttcacgttctcgtatagcttccatctgtttatgatctttataactagttttaagacttagttcgttttatgcgctatcccttaagcatcaaatgaaggatttgaatattgcctcccctctcttgtctcggagaagttatctacgaatctctttggagccagcacgaaaccatctaaaaaccaaattttgtgctctttttaaacattcaaaacgatgaaaaggttactaatagatgttgactctttactttaaatcgtagattgcatgatcaaagattcaccacagccttctgtaaaagtcgctgaaaactgaaacgtttattttcttgtacattgtcttaacaaaaccttgaacatacctgaaatttcatagttataacttttgtgcaaacctctaaacccatttactagttgggccttaaatacatttgtggcccaaaagcccttttacacttaaaaccaaagtcttcttcttctccctcaatctttgacgcttcgtcttctgacgtcttctcttgtcaatcttcttcactttcccatctagtctcaatctctggttcctcaattcgaatttagataataatcatattttgattccaacgcaaatgccaatctattcttttgacggtagaacattctgttttcagatgaccaaatccttgacatccataccactgtatgttcaacttctcatcttctctagcttcattccacacaataaagctattggatatgcaaaaagattcatgagggtttccaattaaacaataactcaaaatgaaggtttcgttttcttcactagtcccttgagtcatcaaattcttcattgccctggagaagtctgggaatctctctatgagccggcatcaattttttcattaatataaatcttggtgttcattgtctaaatcattcacatctttgtcttcaacaaagtctgtaaaatcttcttccatcttctttctctgatccagaatcactaaagacactacttctgaagcttagtgaaggagctgcagaccttggtcctttggagcatcatctactagttctaaccatgacgatacctacatagttaggtttggatcaaacatttcggcggtcaaaggttggtgaactgcatcacttctctgcatattcatgcttttcaagaaaagctattcaatacatcatcactggctagtatggagaatcttcatcatctctatgtcgaaagtagtcatgtctaggagatgtatatattgcaggaaagctaaatggactagtctaatttaaacaatccgacaattccatgctttaccagtcgtctctcagacgtgcttatacctgagtgcataaatgatctggcttggcttctgtttgccttcagattagatgttcagattatgtgtcatcaatttttcaaaatttaaagaaagatgtgtattctactcttctaatgatcaaatctcacaaaaaaaaaatcttttcttttcctttcaaactataaaatcagttcagcttaaaataagtatagacataggatagacatatatggaggagaaaccttaaaataagttcagcttctttagatattaataagtaattaggtagatggggtgttagggatattcccagcagagaggttatacctctcaatttcattcagttccacaattgtcaagttttttttttgcttcttcttcttattctttagtgatgtgggttagtcataagttgttcactggctaaaagcagagtccatggcttctttttatgttgttctctctttcttcttgtaatttgtgatatcttcatttggatttctttttcactacttttcttttgcatttttttctttctccagtgtgttgttcacttggattatgtttttcatcatttccgtatcgtattacttcaaagttaaaacggattgaattaatccttttcaaactacatatttttacacaatcaacagtgtatgctttttggtcttcgtaatttagaggtcagttctattttcaatttatttagttacaagacttgatatcagagcgacaaaggacttacatagttctaccactttgctgtgggatggtaaaagatactagtctaatagtctacacgaaaatgaaagatttgtcattttgaaaagtcattagatgccatattattgccagacactaatttgtatggactctagctaccaaaaaaagaagagaaaaatcaaagtccttcatatggaaaatgggtggtctgaaaatcagtgacagcaatgtcttttattatcttctatctttctttgataatctcaacccacccgtattggagcaagatgttatctaaaacacttcttcaccttcagctttagctttagcttcgttgttgcttactgaaacttttctctcttaacttcaccatg

SEQ ID NO: 4939 - DNA, 3000 bp, Unknown
  misc_feature (1)..( 3000): cDNA_ID_1826569_gDNA_ID_1620746_Annot_ID_49727 3000 nt of promoter + ATG
ttttcttatcacaaaataattgatcgttgagaagaatgtgtctgtcagtgaactgtagtggtcatgagttttcatgaatatgctattgtcgacctgcctaagcctaatcatctttaagcccgacccaataagcaataaatggtaaagtatattgtacaatgtggttgtgattggtaacatacgtaacatgtgttcaatcataatattacagaagacaccatgatgtgtccccgagaaagaaaaaaactagatctagtcgtaaggttcgtcttatgtttgttctttttggtcaaatgattcgtcttatgttatgatacgattttattttagatctctgacataacctttatttctgaccttcattattatcattggtttttaaagaaacattctctctttttttttcttaaatcaggtcctctaaaaactccaaattgtacagaactaaactatatatcatctgcttttgtagagatttatttgtcaaaattattacctgacagcttaaggacatcctgacaaaaaaaatgttaagttcaatgatatatttaaaggaaatgaactctttgtgggcttgtttagatctctagccatttccgtgcatgtgagtcatgtgactttttagatctttcatttagacctttttcaatgacatctacaatatttatcttatagattttggatccgatcaaattttgaaggatgtaaatggatctcagataaaactcacattagttaaaaaaaatttttttttgtcaatttctacctctcaagtctcaacaacaaaatccattacatgatacatcattttttttttttggtcgtaagtacgtaacagtgtaacacacctcatgactaaaaagttatcataactttgaatgcgtaatatttctacgcattcaaacgtttttaatattcaaaagttttttttaattttcttgactaaaaagttatcataactttattaacgtcattatatcaagaaaattgaaaatttgcatggggtttaatcacagacataattgctgctgaaatcattataaactaaagctactttggggtagttgttgtataattattctttttactcatattatcaactgtcccaaaatattaacaataaatactctcacttcacaatcatcctctgctgtcaccacacaacacaaccaaggagtactactctctaatctccgatcaaacgacgtcgtctcttctctctctctctaatgggtaattgctgcgtcagctccggtaccaccgatcgggaaaacgagaacgtttccgacaagaacacaaccattgtcgaagaagagacagtagtcaaagaagtcttgtcagagacaaccttgttcactccttcctctagtttccgcacttcgacgttcaaagacccggtgaagaccaagatccgagaagatgaggagaaaaaacccggtttcttgaaaatggcttcagacccggttttgatccgacccggttcggttgatcctgaagaaggctctgaggtttcggagatttgtagcttgagtttgagcgagagtgtgtcttcaacggttgtgatgaatggttacgatgaggaacatgtgatgatgaaacagaggaaatctcagagatctccggcgaaaactcggacccaggtcaccggtaataattatccgacccggagaactgatcaatctccacgtaagagaaacaatggtacatgtaatggagcgagatacgggtcgggtgtgagagacccgggtgagagatccggaagaaggtcaagatcgccggcgacgaatagatcggtgatggattcgaatcagagtagtcgggtgggtggggcaaagactaggaagaataatcagtctccgggtcgggttagactagatccggctaaaaacgggttggatcagcaacagcatcagaattacggttataccacagaggaattgttagagaacccgcttgtttcgttagagtgtttcatatttctttgaaaaagaagaatatttcgatgggaataatgtcttctcatttgacgttggattcataattcgtaaagctacttacttaattacgttacctctgtaattcatttctgtgttgtatttgctgatttaaagttataattcggttgaatgatgtaatgttcgagtaaacgaaaattcaagattagaaatgaatacatatgtatgttttaaacaccacgtagaataatatatatccaaaataaataccactcatttataagttctttaattttggaaattagtaattaataatgttctttaaaatcacaaaaaaattactttcacgaagactcgaatctgaaacattgcaagtgctattaccacaaggtgaagctagtattacattagaatcggggtcagacgagaaattatgtaatcaccgaatcaacaatcatttgaataatcattcaaacggttacatgaaaattatattaaattgaaagttctcatcctatttgggatcgtcactagcagtgataggggaacacattattttttttgtcgtaagaaagtggaactcataattacactagttttgaatatttttcgtgttttgcaaagagaaagataatccaagacataaataattaattcaaaagtttgcttttctagatatgaacgttgcttttgtttatttatttattttactttaattatatctattgaaaatttctccaaaacagggcaagtttttttttggggggcaaactcaattgatttattcatagtcaaagcaaagcaaagatgacaagttatacaaacttcataatttaactatcgctttgattggtccaaaaaaaaaaaaaaaaaactatcgcttgacttctcctttcccagatctagagattgtacttagctcttcttctctcttcttcttctcattctcttcgcttgtaaccacagaactttgcagtggtcttgttccactaatattagcctcgtttttgcttactaaaagtttatctctattctcatcaccatg

SEQ ID NO: 4940 - DNA, 3000 bp, Unknown
  misc_feature (1)..( 3000): cDNA_ID_1826565_gDNA_ID_1620746_Annot_ID_49730 3000 nt of promoter + ATG
gaagatgaaaaaagagctccggattcgtgtctagtatctgcaagcatgggttcaaagaagaatcagattttgcttctttattacatcagaaaagtgaatgactactctccacacaagatatgaagaagcattgtacctcaggattcaaatcattaactttttcaatcgcatcctcgacatttccgttttgaacagcctttttaacagccattcgatcagtaatggtcgcaagatctatctctgctgtttctcgataaggaagttcaaaaggagtagataagctaaacatcaaacacaccaattccataaacaaaaactcaaaaccagaatcagaaaaaggatacgtttggttccagactccctttggaatttctcagcagcttcaacatatccttcagtcacaagaaaattcatcaccaaagtattcatatcttctttcctaagcttcacagcatttagtttcttctcccattcttcacgtgtgatcattttcttcgaagtagcctgcgacaagccacgattaaaactaggtcacacaacgtgcataaagattaaagttttccaaaaacccatcatcaagttgtatcaaataacacaaagaacagactcataagaggagtcaaaattaccatatcttcgtcgtcttcttcaagctgattgataaaaatacgaaacagtgacattagaacgccagtgaggctctcatatcttgaaatctaatctaatccactcaatacgaaattaatacctgttcgagcaacactccgatcagagctatttccaaaagaaattgactttgtgatcagatagtgatacaaagtaatttagggctttagtcaaaattcaagctttaatctcaaaacagcacaggagtggtagttctaagaaagagagagtgtgcgactattttcctcaaaaattgaatataacgatgtacctggagaagtggagaatctggggaagattatctgggaacgattcttgcaaataatccggagatttggcgatcgatttgcttctagattgcttgcgaaagtctcttccctaaatttacaatctgataaaacaaaaaaaagttggaggttttcgatagagaagaagagatcgggtttaaattattaggatgttgacgaaccgtcgatgaataatccggtttaaattattaagggaaccggtttgtttttggatttggttctttatataccggatagtattatgtaactcatttccaaatgattttaatacccaaagatttttaaactattttacctttgaagaacaaaatttcgatttaaaatcataatttttttttatttttttttttaaatcttggaggttgtgggtcaaagtccgtaatcccccaggcctgaaaccacagcataaaatattagtttcgtcccaagcgtcactcgaaccggcgacctctaagctttgcataaggtctttaccaattgagctaacgacacttggttaaaatcataattaaataagactgatgttaaaaatctctatattatttggaatttgatacacaatttaaaaccaataactgatactctattatactctattaaaatcaactattaggtaacaaatatgtgacataaacattttgcagtccgatgcaaaatatatctttcaatctcaacaatatgttttttcttggtcaacaatctaacaatatgtttaattgcatcttcaaactaaagtcccaaaacatgttttgttctttgcacatggttgtttgtgtggaaccacaataagacaaaggatcgattgcagaatttgaggtcttctagctagttgaccgactaagaatcaatggaccacttattctttaatattatttttcccaactggtttggaaggacttagtgaagaagttacactaaaacttctcgagtcaatcctcatatggtttcttttggcaattcctatctctgcaaaatcaaaggctcttcatatcaattaatatggcaagcaactactttgagacatggcaagaacggaattgttgatcacataataagcaagctctttctcatcaaactacctacaaagttttgcgctctacaagatatttgatcaatcataaaaatggtgatctcgtataatactagtcttcttttagggctaacaaatgattcagaagattacaaatgtgctttgtagaaattagcaatatagtgctttgtagaattttatgaccacaagattggtaagatcatttagtcaaatatatgttttatctcttcttattgattgagatgattatttttctaatgagtcgatccacatgtctaattccaattgatctttgtgatttagtttcatatttgttttctttaacatatgaaatttttttgttagtgtagaaaatctaattttcacacaattaaaaataatttttacaataaattatgattagcaaacacttcaaaaaaatctccattacttaaacacttcagtttcctactactaattaaagttgtttccttttgtttaaattgtgattttgctttaacaataaagatgacggcgcataaaatataattatatataatcatgcattattaaataatgaaaaaatggaaaaaaatgaaagaaaaagaaaaacaaatgttcgaccgttccttatttaaagccggaagtcccatagccttgtggtgtttactttttccaattcggagaaagccaaaagagagaacaaggcaataaaaagaagccaccgtcgctacaaaaagtcgcgatttttattttctctatcccaactgctctctacctttcctcgaaaattccttcaaaacccaattctcaagccttcttcttcgtcgtacctgaaaattctacaatctctggatctacgcgtctacttctgaatttcgatttgggtttcccgggagctgaaattccgtgacttttgggttttctgatttagggtttgttcctcttctcgttctttctcgggttagttttttttttttttttttgtgatttttg

SEQ ID NO: 4941 - DNA, 3000 bp, Unknown
  misc_feature (1)..( 3000): cDNA_ID_2124042_gDNA_ID_1620746_Annot_ID_166681 3000 nt of promoter + ATG
cactacccggcagttgaaagttagaaaactcttggatttgtcgattagtgtttccgtattgacatacaatatgaaaacgattactcgatggtgctaggacgtatagctaacaatctataagattttgatagattagttgtttatcttaaagattgttttacagcaataattctttaacagtctttatgtctttatgatatcctataaaatttaagttcatcaatgtaatcattattagataagtgctgatagaaaaaacaattgtaaaataatgaaataaagttgcaaaatgatactttaatattatttagtaaattggagagaaaataaagaactaattttgcttatcaaatcaatttgttttttttaaatcatactttctcatttaaaaattgaatattgtggatgtcggaatccgcaattaggaatttgtggatgttgcaagggccttaaaccttgttagtcgaactaagatcgaatcgaacagtatttcagttaatcggaatttttttgtatagtaattttctcgtcccctttacaaatgacgaatcaatcctatttatacaaactaatcgaatatctgcgaagtaaatggacgctcgaatcacgccgcgaatcacgtctcattaatgtttatgtttcacatagccacctcgcgtattaacgcattctcatttactccgcagatttccgttacgtaacgcttaaaatgattcttcaaatcgacctggctctggtgggcttatctcggcccactccatatttgacaatcctggattcatcgttaaggctttgacccaggcccattaaagaaatatgacggatcgcgggtcggagcaaatatacgagatccgacatccacaaatatcaaactttgtaatttttggccaaacaaaagaactactttaactagcaggtatgaaagttataatactgttaaaagaactcagcttgttcattgatttaaaacgatcaaatatcccaaatcttcatttctagtttccactggttttctttgttttcgatatcaattttagacactaagagggtgtattcaatctagtattttaagtgatttgtgtaatatttacaaattatatgttattcaaacatgaattttaaaaactctaatggaatacaatgtagttgaactaatgatttaaaaatctacctttaaatccattgttactgaaaacaatttgtagatttgattcttattaattttgaaagatttaagaggatttgaaaagatttctttagttaaaaatacaaaaattcaaatctcatggttttaggtgaaatttgattttttttttataataaatcatatcaacttctctcaaatcattaaaatctaataaaaactaactaaaattcaaatcattcaaaatttaagatccaatatactcccctaattcgtcttacatatcctaccttacactcttgtgtctcatcttctctgccatttgacacagaaaaaaaaagagttaggacggacatatccgaaacaaccaaatagactgtttttaaacagttatatacgaacacgaaggttcagctttgtgatacaccatttatcgtaacaattaaaatatggtaattttaggctaaattatagagtagatcttgtttcaaatattacaatttgcatgcaccaaattgttttacattttcattttccagagaaaaccaaatcattggttagtcacttcggaagtaccaatcccaatattctttacagtaaatacccggaaccgccgagttcgggtgtttcagaaatgaccaatgatgatcaattagtcacttcagagagcttccgggtgaaacgcgcttaaacgatggccttgacaatgacttcctagtactgatgagagagcggtggtgccaaacgctaggaagctgccgaggatgtgacaagattgaaggaaatctgaggttaagacttaaatctttatggaactggattacattttgaggttgatgaattgtattttgattgatattgaaaacatgatgatgtggatatgcaacggccaagtatcgagatttgaattgagatatggatttgatgcacaagtggtcgaagaaagaacgaagtggacaagtacattacctgtaatagtacataacttgtgtggttcactaattcttagagattatgaatcattgtagatgaataggcaagtctatcagacatctctaacttatggcaatcactagtttcttgtacataaagtactatttgcacccaaaaaataaaaatatgtatataaatttactactacttaatgcccattatttttctgttttcaatattgtgatatacattatgcaagtttacacagggatggatccatagcgacattagcattgtagattactaactacgaatattttttgttttttattgttttacaatcaatgtaactaatcaaatattaggaatttacagcaaatgtatcggtaaatatacgggacatagtcagacatatctcaatattttcctttttttaagtctcagtattgttattgtataaattatttataataataaaaaataataataataatagaaaattaagtgggtatctgtaatatttaaaaaatatattgaagaaactttgagatgagtcttttaactattgaagatattcatttaatttttattaatattttttacttttcattattgtagaactcacaaaaaattattgatacgagttatttagtatgtgactcactaaagatcatttatttagtatttatcacatgggggtttattcgttgtatctccatttattacttggaagaccaggagaagagtagaccattagaatattcaaactattcaaagtatttttcacatggttacatttagacgactcaatcatatgcatactcgattccttctataaaaacacacgcagattagtgacccatattttacactcaatctaaagaccatcctctagacagaaaactttttttataaaaacaatg

SEQ ID NO: 4942 - DNA, 3000 bp, Unknown; identical to SEQ ID NO: 4940
  misc_feature (1)..( 3000): cDNA_ID_2124035_gDNA_ID_1620746_Annot_ID_166679 3000 nt of promoter + ATG

SEQ ID NO: 4943 - DNA, 3000 bp, Unknown
  misc_feature (1)..( 3000): cDNA_ID_1826569_gDNA_ID_1620746_Annot_ID_166673 3000 nt of promoter + ATG
cgacccaataagcaataaatggtaaagtatattgtacaatgtggttgtgattggtaacatacgtaacatgtgttcaatcataatattacagaagacaccatgatgtgtccccgagaaagaaaaaaactagatctagtcgtaaggttcgtcttatgtttgttctttttggtcaaatgattcgtcttatgttatgatacgattttattttagatctctgacataacctttatttctgaccttcattattatcattggtttttaaagaaacattctctctttttttttcttaaatcaggtcctctaaaaactccaaattgtacagaactaaactatatatcatctgcttttgtagagatttatttgtcaaaattattacctgacagcttaaggacatcctgacaaaaaaaatgttaagttcaatgatatatttaaaggaaatgaactctttgtgggcttgtttagatctctagccatttccgtgcatgtgagtcatgtgactttttagatctttcatttagacctttttcaatgacatctacaatatttatcttatagattttggatccgatcaaattttgaaggatgtaaatggatctcagataaaactcacattagttaaaaaaaatttttttttgtcaatttctacctctcaagtctcaacaacaaaatccattacatgatacatcattttttttttttggtcgtaagtacgtaacagtgtaacacacctcatgactaaaaagttatcataactttgaatgcgtaatatttctacgcattcaaacgtttttaatattcaaaagttttttttaattttcttgactaaaaagttatcataactttattaacgtcattatatcaagaaaattgaaaatttgcatggggtttaatcacagacataattgctgctgaaatcattataaactaaagctactttggggtagttgttgtataattattctttttactcatattatcaactgtcccaaaatattaacaataaatactctcacttcacaatcatcctctgctgtcaccacacaacacaaccaaggagtactactctctaatctccgatcaaacgacgtcgtctcttctctctctctctaatgggtaattgctgcgtcagctccggtaccaccgatcgggaaaacgagaacgtttccgacaagaacacaaccattgtcgaagaagagacagtagtcaaagaagtcttgtcagagacaaccttgttcactccttcctctagtttccgcacttcgacgttcaaagacccggtgaagaccaagatccgagaagatgaggagaaaaaacccggtttcttgaaaatggcttcagacccggttttgatccgacccggttcggttgatcctgaagaaggctctgaggtttcggagatttgtagcttgagtttgagcgagagtgtgtcttcaacggttgtgatgaatggttacgatgaggaacatgtgatgatgaaacagaggaaatctcagagatctccggcgaaaactcggacccaggtcaccggtaataattatccgacccggagaactgatcaatctccacgtaagagaaacaatggtacatgtaatggagcgagatacgggtcgggtgtgagagacccgggtgagagatccggaagaaggtcaagatcgccggcgacgaatagatcggtgatggattcgaatcagagtagtcgggtgggtggggcaaagactaggaagaataatcagtctccgggtcgggttagactagatccggctaaaaacgggttggatcagcaacagcatcagaattacggttataccacagaggaattgttagagaacccgcttgtttcgttagagtgtttcatatttctttgaaaaagaagaatatttcgatgggaataatgtcttctcatttgacgttggattcataattcgtaaagctacttacttaattacgttacctctgtaattcatttctgtgttgtatttgctgatttaaagttataattcggttgaatgatgtaatgttcgagtaaacgaaaattcaagattagaaatgaatacatatgtatgttttaaacaccacgtagaataatatatatccaaaataaataccactcatttataagttctttaattttggaaattagtaattaataatgttctttaaaatcacaaaaaaattactttcacgaagactcgaatctgaaacattgcaagtgctattaccacaaggtgaagctagtattacattagaatcggggtcagacgagaaattatgtaatcaccgaatcaacaatcatttgaataatcattcaaacggttacatgaaaattatattaaattgaaagttctcatcctatttgggatcgtcactagcagtgataggggaacacattattttttttgtcgtaagaaagtggaactcataattacactagttttgaatatttttcgtgttttgcaaagagaaagataatccaagacataaataattaattcaaaagtttgcttttctagatatgaacgttgcttttgtttatttatttattttactttaattatatctattgaaaatttctccaaaacagggcaagtttttttttggggggcaaactcaattgatttattcatagtcaaagcaaagcaaagatgacaagttatacaaacttcataatttaactatcgctttgattggtccaaaaaaaaaaaaaaaaaactatcgcttgacttctcctttcccagatctagagattgtacttagctcttcttctctcttcttcttctcattctcttcgcttgtaaccacagaactttgcagtggtcttgttccactaatattagcctcgtttttgcttactaaaagtttatctctattctcatcaccatggggagttgtttttctcttcaagttagtgatcaaacactgaatcgtatctttaattgcttaattggtaaaagttatattcgaaccctcgagaagaatctcagagctctgcagagggaaatg

SEQ ID NO: 4944 - DNA, 3000 bp, Unknown; identical to SEQ ID NO: 4938
  misc_feature (1)..( 3000): cDNA_ID_3074922_gDNA_ID_1620746_Annot_ID_166672 3000 nt of promoter + ATG

SEQ ID NO: 4945 - DNA, 3000 bp, Unknown; identical to SEQ ID NO: 4937
  misc_feature (1)..( 3000): cDNA_ID_3074926_gDNA_ID_1620746_Annot_ID_166670 3000 nt of promoter + ATG

SEQ ID NO: 4946 - DNA, 3000 bp, Unknown; identical to SEQ ID NO: 4936
  misc_feature (1)..( 3000): cDNA_ID_2124007_gDNA_ID_1620746_Annot_ID_166669 3000 nt of promoter + ATG

SEQ ID NO: 4947 - DNA, 3000 bp, Unknown; identical to SEQ ID NO: 4934
  misc_feature (1)..( 3000): cDNA_ID_3074934_gDNA_ID_1620746_Annot_ID_166666 3000 nt of promoter + ATG

SEQ ID NO: 4948 - DNA, 3000 bp, Unknown
  misc_feature (1)..( 3000): cDNA_ID_2994827_gDNA_ID_1620746_Annot_ID_166663 3000 nt of promoter + ATG
tagatgaaataataataataataataataataataataataataattggatatttggattagagaaattattgaaagtaatgtataaactattgaaccatgaaaatatatttgcgaataaatcatcaaactgaaactatcaaaatgtataagattttgaaaaacataatttcacgaaatatttttttttttttaaatctatgttttgactttttatcaaattaacaaaagcactatctgattatctcaagctgatttagtagaccgaccaacaattttatcttttaagccaaacaagtaatatactttatcataccaaaaattaatatatttatgatactaaagaaaaaactttatatatctcctctagtatatagtaaaagcaacaaaaaaaattaaaaataaatgttaagagagcgttttatggtcggcttttcacgcgtttcactttccaattttcatttcactttataagaatagaagaactccaaaacattaaaaataaggaatcagaaaaaaaatctataataaagttgtgattaaatcattagttttttttatataataaaacgcaggtgatcctaaaagttttcaaagcccaaagactaattgtaagatccgataaattactcgaattttggtgactaatgttacttaaacccaaatagtggaattaacactctttaccagtagaccaaagcaacttggtttaatttattttcttcaatttaccagatcatgatgccgtttaggaccattggactagtccatgctgagtgaaaataattcactcaaaagaataccgtaaatcagaattttccacgtttatcaaataactgactaaaaagcacacataacaaaattttcatgcatcaacttgtactaaaatttatagaaaactggcgtatattggtaaataaatagcagaaacaaaagtggaaaagttttgtggcgccacttgcgaagtgaactttggagctggagcacagctggacacgagcagtggggctgcagctgctaagtgctgacccaaattggggtcacaacctttcctcttataacggtccaatatatattaccgttatgttacatacaatatagtaatttatatatatatatatattttttatatagtaatttatattattttttgcacactatcgatttgatttacaacaagtccttttgttttttgttttttgttttttttgcacaatatcgattgtttgaaccttcaaaattcatgatagaactcccggggtttttcctttttatttttatttttttactctcaaaataagaaaatcatagtccgacgactccatttaaaagacttaaaaaaaattatggtcaaaatatgaatattttatatagatacttaatgcagaagctatagttgcactttttcctcgacaagactcttgtctcttcaataaaaaatgcgttggtttagttttatactgtatttagtaagtatatatgcttttccccacggcccacactcatgcattgatacataccactttattggtctccagactaatctggttatatgtgcccatcattaattcaaattcattaacttacgtaagaataccacccttacaaaacaacttaaaaaaaaaaacttgaatcaacatttaattaaaatttgacaaacatcgttataaattttatataactattacttagttaatttgaaaaatccgttgcttaatagttaataattaatcaaaaacacattgatttactacatattctttttatgccctcggtttggtatcttgatatatcaagcggcttgtaacttgaattcagaatctacgttttcaatgttgtttcctatgatggtcaagtggccgctacttgatttcagaatctacgttctatgatggtgaagatattgaaatgaatgttggaatttcttttattaaatttttagttggtatgactgattagccatacaaaataattaggttgcagccacttattttaacttgtataaaaaataagtgatactactaatttaaatcacctattattactttttttttatgggcacaaaatcacctattattactaattgatacttttattgatttatttaatattattcaatcaatttggtgtaaatctatattaatttccgctaacatcatcctagtactggagaaacttgatttcgtatctacagcctttctagaacaatttttatccaaaacttaaatttgtttacgttcattttccttgttccaaataaataattttctttttttgacattatgcctttgttgaagtaatgcatgtcacatacagtacaagaaaacacgagtttcagacttcagtgtaaaacaggattacatgtattgtaagcgaaaataattaacatcaagtagtcaaaatattttacactatgtaatgttaatgatgtgtaagattagcaagacttacacgttcgcggaaagtaatctaaattatatatttccattaacaaaaggtaatctagctagaattcttaattgactttgatagctagttcttgtataaacaataattcttttctcgttgatatttatatcaaagtggttatcatctatctaaaaatctatacataagaattagaatatccttaaaaattctaccagtaactttcaatagagagttatcaaatatgaatcatgattacatcagtgtttattacacacatatttacacgtaacacataattagtttcatggtcatcgttaattactctgacgataatgtaaactaaaaccgggtggatttaaccggacccatttgccatcactctccataaatcctaaccgtccatctaatcaagcgtagatctaacggtggatatcaaatcaaaggttaattccctccctatatatattagaaaattgatcctgaagcgtgtaccgtacacacatccccatacgaacactcacaatcgttaaaaagaaagaagagaagagagagaaagcttaaatcggaaaaa

SEQ ID NO: 4949 - DNA, 3000 bp, Unknown; identical to SEQ ID NO: 4941
  misc_feature (1)..( 3000): cDNA_ID_1826557_gDNA_ID_1620746_Annot_ID_49732 3000 nt of promoter + ATG

SEQ ID NO: 4950 - DNA, 3000 bp, Unknown
  misc_feature (1)..( 3000): cDNA_ID_1826550_gDNA_ID_1620746_Annot_ID_49734 3000 nt of promoter + ATG
cttgagttttcccaaaaaagaaaagattttggtatgattttcccacgtgaaacaatattgtagattaaaatagtagtgtataatggtggcttagtgagtttggttaatatcatttttcacatacccgtagtgagtttttccttgtcgtggttaagtcaggcggcttagccgcagtgctaaggttaccatcagtgaggcgatattcatgcatgatccaatctgtttttatccctttaggaggctttccaccgtaaaaaacaagcgctttcttgacaccaaccttgtgactattgcacgtaaatatcggtttatcggttcccgttgctttccaataaccggaagttgctgcccggtttggcctaaccccatttggatacttccgatcccgaggactaaagaagtaccactcgtgctctccaaaactcgccttgcctaaaccattcaaaatattattatccacaagatagttactatatataccaaatttaaatagtggctagattacagtggtcatagtaaaattaaatcgtacattttaatcatatcattaaagcataaattaggaaatataaatacttggaagctcccaaggatcaaacttgtaaagatcaatctctgcgatgattgagactggaagtggaacagaatctgctttcttcttgaggtaatgaactactagttcctcatcagtcgggtgaaaccgaaacccgggagggagatgcggatggcccggccctatgctcgaatcccccatgttttccatcaacttctaatttgatataatgacgatattttcacgaaatcagtctcatgatcgtcaagagaatatgtaggaaaagtatagattattttggagagtgaatgtgtttcatataagatgcgagaagaaataggtgttaggtttgtgtgagcatatgagtaccgaactgggtccctcgacgaggaaattacacgtggctaatcgtagggcccaaaattagcggccaatgggcattaaattttggagaaaaggcagggttttttcgaactgccttatgtcatgcctttcttatgctacacatcacgcacatacctcattttggtttttgtgtaagattttataaaaactagaaatgtgggaattctctataaatatattttaaaaaattatcgtgttaccaaaatgtgtttttcgttcgcaattgaactctagtaaactatgaagataattaatacaaagaaaatccaaatagtcgactgtagtagttatatatatatatatatatatatatatacatgtataaactttgggtactagcataattttccaagttagtaatattatcaataatcaagagtttcaaattactgatgatgtttttaggaatcgatcgactcgttgcatggaactacacgaggtgtacgaagattcttcgtcgtcgaaggacattgttcaagagatatggtgaggtgactttatcaggagtcaggagatatgaggtcatggggtctgctaggatgttttgttacatttcggtggacatcactaggacgtggtataaaaagactggctcaccttgatatagattgaatctagtggacctcatcctatagtagtaggcccggccataggcatgcatgcgatgctaagactcaaaaggtaaggcccatgatcctttcatctaaattcctttgaagcctaactttaagagtttgggtgatagaattgaggatttgcttctgagatatggactaggctaggattttaggcctctaatggctaaatttttgagaaatttcttcttcttccccctcttcattcttgtgagttgtgacaattctttttgacactatgttagcaaactctccaaattcttcttcttccaactgttccatgagaggattcgaggagactcatatattagtattacacacggttgtggttcagattactgtccactcccagcccagcccagccccgacatctcgaacattaattctatatatatttcgtctcttttttttctgtacgaacaaaatagtttagtatttcacttataaaattaacgagagtaaaaactacgatataatacaaatggccattaaagattaaataaatataaacatcaaaacatatcaaagcggactggttagttatgttacgttgtaccacctttttataactttttttaaaccgttttatttatatataagctgttgactaaactgaaaacatcaaaacatatatcttcctaagaaattggtgtgtctatttaaatttaatatctgagttaatatgaaatttaattttattgatgaatttgtattttgatttaatatctttattctagatacagttggtcatttctctttgcttttactatgttactttttgagatggtgaccgtttcaaagatgtttacacttttacttacttctttcaacggggtttagtataaaaaagaacaaaggaaaagtagcgaatactttttgacgcaaatataactaacaaatattttttgattcaaaagtatatgtacgtctttgaaggtttttttttaatcttttcttcaaaccacacgagaaaagacaaaaatgcttgcaagtcaaagataagaataaattcactcgtttcttgaagtattttcaaatagacactagtattttcttgaagtccaaatgttagaaaaagaagtttgaattcttccttgagtattagcgcgagaagaatcacaatttttatgaatatttacaaaaacaaagtggcaaaatatccaagatccgacatggagttctcggaccttattcacaaagacacaaaccatagctaactataagcgtaaaacgatcacttataaatatagagacacatatctatttcttactaatctaaaatcatttcttcttccacaatactaaaagcaattatcaaaaatatatcaaaaccagtcttcatctctaaatcactctttcgcttaattcaatcatttcatttcttcctcgtctattcaaaactcttcg

SEQ ID NO: 4951 - DNA, 3000 bp, Unknown
  misc_feature (1)..( 3000): cDNA_ID_1826637_gDNA_ID_1620748_Annot_ID_49736 3000 nt of promoter + ATG
aagcaaaacgctgatgagtttatctgttctttattgcctggaatttctcaccctcaagtccaatactcacaaggaggattattagtgaagagtggaggaagtaatatgcaacatgtaacatctttgtcttttttgttactaacatactctaattacctaagccacgcaaataaggtggtgccatgtggcgaatttacagcttctcctgctcttctccgtcaagtcgccaagcgtcaggtaactaaactaaccaacattcctctgttttagcataatagagagattcattaacgtaagtgtttggtggcgtacgttaacataggtggactacatactaggagataatccaatgaaaatgtcgtacatggttgggtatggttcgaggtttccacagaagattcatcatcgtggcagctcggttccttcagttgtggaccatcctgatcgtatagggtgcaaagacggatctcgttatttcttcagcaataatcctaatcctaatttgctaattggcgccgtcgttggtgggcctaatatcaccgacgattttcctgattcgagaccttactttcagctgactgagcccactacttatatcaacgcacctcttttgggcctacttggttatttctcggcccattattgatttcacacctcgaactcgaacgaagcatgaaagtctatttttgttgtgaaacatttttagttgattgttaccgattagtagattcactagattctctaaatctacgaacaaataattgtataaattaatcgagtacacaataatcaatttttaatcatatgggagttaggaaaaacaaagagtaataatgagagaaagggggagacaagagtaattaatattttgatgaccaaactaatcaaaaatcaggaatttgtcttttggactttggtcggctgctttacgcttaacacaaaagaacgctattttgtctcctccacgcaattacctcttctcactctcagacattttgtcaaacagatggtgctcgtttctgaatcagcttaagaactaacaaggagacagacactaagcttggtttttctctccgattagacggaggaaaaagtgaaaacgaggggcttagacgagtgatgtgatagagatggaaggagttgagctagaattagaaagaagaagcaagttcttgaacagtttgatacagaagaagaaggctaaagaacagcaagatcagaaagatgagttcaatgttcgtgttagggcttcagatatgcctttgcctcaacagaacagagcctttagtttgtcgcgtgagattttgaatgctactccagggaaggctgataacaaaagactcgctcatgccctaaaaaaggttagatcttttgtatctctctcatgatttttctgtatttgggttgaattggagtcattgaagtctagtacttggattgagttttgaattttgacacagaatctaaaagtattgagctgcttttgggttctagggctacgtctcaaagtcgcatgctttttgtagaatgtggttatggtcttctctttcttgattggtttgaagatgtgatgaatcttgaatttggattttcgtttgtgtacttgcatattgttgaacttcatggatggtcccatatttgttaggttgcatttgactttgttccattgttgttgtcttttctatttgtagcttcggttagtctacttgactaggttgtttttgtattgcgaggataactgtagtaggagtctcgttgtgaaatgtcttgaaactggatgttcttgttgtttattgagatgattttggagctgtcttaggccataactaatgaggcatagcatgcaccatctgctaagcttctgtatctttgctgttagaaattagttgctacctaatgataactctgaagcatgcttgctttaggaagtgagccttgcctgaatacaaccttttacaaaggacttggttcgacaccccatatatagagttgtccatttatgcagttgtttctcgtgaggatattgttccttcttaaagcggctttgataattagcttttgattttaacttatggagcgaaatggagcagttccctcaatttatgcgactaggtagaggcattgattgatccatacattgattttatgaagtggttgagtaaaacaatttagtgttcacttatctgtgtgcagcttacttgtttgtctcagtgttcatcaatctcttaataatggctacctccctttggcttttaggattgacatacgagtcaatttctgctgttgtcttgttttatcttcttgttctggtaatatagatctcttatctcgaaatagatcttcatatgtttcttgtctctatgttttctcctaaatccagcttctatgttatccactgaagtgaatcttagactcccatctgtctaatgacatgttgcagctgatttaaaactatatattcacgaaacagttttccatctgtcttccatttcaggacttcgattcagcctacggcccggcatggcactgcattgttggaacaagctttggttcatacgtgactcattccacaggaggattcctatattttcagatcgacaaagtttacgttcttctcttcaagactgccgtggagccgttagatcaaaaatgagataaaacgttgatgatcagagcatcttcaatttaatccttttcttttagaattctctgtcttgtatcccacaatgtaattctgcctaagacaaaatctttgtggctcctattgtgtaattagaagtcatcttctctactgtgaatcgtttcaacttcacaatgcaaaatattgttcttctctttctcaaattctaattttgtttttttcgttgttgtgttgttgttgttgttgacattttcttctcttcaaaagagctttaaacccaaaacctctaataccaattttgctcctccgttttataagcatcaaagaaaaaaagaatcagtgaagaagaaaaaaaaatg

SEQ ID NO: 4952 - DNA, 3000 bp, Unknown
  misc_feature (1)..( 3000): cDNA_ID_1826633_gDNA_ID_1620748_Annot_ID_49737 3000 nt of promoter + ATG
agaaaattaggatgcaaagactttagatatttcaatcttattggtaaaaataaattctaataattatttttattattattaaatatagtttataaatattatttatgataagtatgaatttatttgaaaaatagtgactacaattgatttattaataattatttttttgaaaattaaataattcataaataaatgaataaataaaaaactcattttacaaattcactatttaaaatcttcaaatatgatttcaaaagaacagaaaagtaaaactacatttaatcaatcaaaattatttgataataaaatataaatatttttttaaatagttttgaaattatatggaaaaagaaaaaagtattttattttcttttattattctctcttaaagtgaaagtctcgtttatgagactttagaaagaaaaaaaaataaacgaaaagaaaaagagtttacaaacttttaaaattaataaaatcttgaaagggagattggttaaaaaataacttgaagaatttaaaatattttcaaaactaaaaatattaacaaagtcttctttgtcaccgttaatgtcctcttgttcttctatttcaattcgagtttggttatagaaggaattgagtcgggtctctttatcgtttcttggaaaaattcctttatggtggtgtttatattgatctttttcggcggtggcgacaagtgacgactcctctggattcatgtgaatgctctgtaaaagatcgaacacaacttcttttgtaagttcttttaatccctctaatactttctctatagtttctttcgttggcttcaatttttcggccactgaaactatcttcgtgccggcttttctcatcgttgaaaaaaaagctctaaaataacagaaagaaaatggttaaactggagaagaagacggacccaattcaattggaagagatatgtgtatacgttcatttatgagtctaaaagaaaatatccatacatttataactctacatccctaaggaaataatatcccatatctctactcatacacattagtcataaaatcttacttggtacttgtcaaattccctaattgatcataaactcctactaaatatctcataaatgatgtttatacacataatatataccataaccatcgatatttacgtcgtatcaatctcacgtcttaatcaatgcccatatcaaaacttcatgcataccttatatagctagcatctctcccatgttcgaacaacttcacatctcgaattaaatcaaatctttagacgatcaaaactattatacaattttatccaattatattagtattaattaaataaattatattgttataaattttagtggcctgttaaattagttattatccatactgaatgtttgttaaaatatataacatatgctaagtttaattcaccaataacacatataacaaaaagttgttaaaaaaattgggagatttgcaaaactaccatttttttactacctttttgcaacaatacttttttatgttgtccatttttaaaaataccctttcccttgaacaaaatgaccaaattaccctcatctaatagaaacatgtaattggaaactgaacttttcccaccaattttttggcgccaaaatttttttttcccgccaaaaaaaaagtttccgccaaacttttttcccgcaaaaaaaaaaattctgccaaaagaaaaattttccgtcaaatttttttttcgtaacaaatttttcctcagccaaaaaattgattttaaaaatccttataaatattttctggcggcaaatagatttacaaggaattttaaaagggttttaaaagatttacaagagatttaaaaatgttttaaaagatttacaagagattttaaaagagttttaaaagatttacaagggattttaaaagggttttaaaaaatttacaagtaattttaaaaggttttaaaatctcttgtaaatctttcaaaacacttttaaaccctttaaaaatctttacaaatcatttgtaaatcttttaaagccctttaaagttccttgtaaatattgtaaaccccttttaaaatccattgtaaatattttaaaatccttttaaaacaattttaaaccctttaaaaatctttataagacatttgtaaatcttttcaatccctttaaaatatcttgtaaatcttttaaaacccttttaaaatcccttgtaaatcttttaaaaaccttttaaaatcccttgtaaatcacccttttaaaatcccttgtacatcacccttttaaaattccttgtaaatcttataaaacccctttaaaatcccttgtaaatcttttaaaactcttttaaaatcccttgtaaatctatttcccgcaaaaaaaaaaattggcgggaaaaatatttttgaaaacaaaatttggcgggaaattttttttcgaaattttttggcgggaaatttattttggaatattttaggcaaaaaatattaatatttcattttgtaaacctaaaacaatttccaaataagagtaaaatggtcgttaaaaatttaaagagggtagaaataaaaatggataaaataaaagagtatagttgaaaaggggcatcataaaaaaggcattagaaataatttttcatgttttaaatgacaataatttaaaagttaactaaaagagtctataatgggtaataacaaacgtataacactagtgaaaataggacttgtcaatccatgaattaaatattttcatggatacggtcgtagggaaataaatctttccgtcagtcctaaaaagcctaaattattggatagacaaaaatctgaaaatcttaaatcacacgtaaatcaaacgtatttacccccacatggaacttaatccaatctattaaattcaggtggcgaccgttcattggttcttgtctctagaatcccaaaggactcgtttccgagtataaaaatacgttcctcaattcaaagtacaaaccaaaaacagaaccgaaacagaaaatg

SEQ ID NO: 4953 - DNA, 3000 bp, Unknown
  misc_feature (1)..( 3000): cDNA_ID_1826629_gDNA_ID_1620748_Annot_ID_49739 3000 nt of promoter + ATG
tttcttcttatactatccaagttacattataagaataattagtctcagggagaatttgtatttctcatcagaattctgaacaaccaagactgatttcttgagttgttgtgaggcttatacttgtacggatttggctttctcagttttgttctctcttgtttccgtattttggcgagtatactctcttaacatctaagttcattgatacctcaaagcatgctacgaccatccattgacaaatctcagagttgtctaattacttcaaatgggtactcatgaaaatgcaccctctcgtgttttggtttgatgttgcatggttttcaatgcatgataccataatatatggacgaaagccattttttattacttctcttttgaaaagtgggagagacgtcgaacttgaaaacgaaagagaataaatggaagattcaatatatgtatgtgttgctttcgaaacgaatatagagaattggaacaaggaaacccaaagatttggttagagtcgtacacaaccctaattctcccaccggaccttccatatctagaacgaagcttcattcaactttctactccacttaaaccacactatcctttatttcgtgtaagtatatctttcttatactcgatttctttctcttttgagttttagtatcaaatatttgtatcattgacctatcagtatatttcaaatccaaattcagacataatgagttctgtcaagtatcaataacatgtgactaattgagtggtcgtataaatcatattcatatacataatatatgaacgtgagaaaaaaaagaatttgattatataatcgtgcaatatattttgttttctcgaaaaagctatgcatatgaaaaagctagctagtgagagagttagcatgttctgttgatatgtccaaaaacaccaaactcatcttaacgaactaccactaccactacccgcactacttcggtctatcacattcataacacacaataagcaaaacaaaacctatatagtgactcaaaactgattctagtgaatcatagatgaagtaattaagtcgacttttaagtaacaaaaaacctcgaatcgatggaagacaaactcccactcccaatagtacgtacccacccccatctatcatctctagatttcaactagtggtcttagcttgtactcttaatttgttatcactttcacgattatgcatatatccatattgttggcaaatatttttttttgagataagttatacaatttttcttaaaacttcaagatttcattgtcgatatgaattcaagacaagtctttcgtaacattaacatctatgaaaatgtagctcattcacttacatttccaacactcacattcgtatttacaattgaattgattttgattttttttaataaatcacccaatctttcacaagtaacgtatatttcttttggtacaaattaaataatgatggaataccaaacaattagtaccaaaatatagtaacaagttaatgacgaattaaaagatgtatatttcctcatcgatgtcgacaaaaatattaatgagatattagttataccgccgtctatcaccattgttagtgtgggatttttttcctgctgtagtgaaataatatgacatgatcagaattatacttgttgtttattggcagtaaatgttctttccatgcaaatgaaatagaaatttgaatgtgaaaatgcttaactacatgtgtaaatagatcttctcaactgtatgttacgtagatatctctagcattcagttaccaaaatatatatgttggaaattttttttttctattgtcaacaaggaatttgaaagttagtcgtaagatttacatactttttggttaaactcatgcttaattgttatgatctaactacgtgacagaaattgcagaaaatgtcgcttttgtaaacctaaaccattaattaaacgatagagtaataacaaaacttgttaagtgagaaaacatattacaattcccacaaaagacggacttaatcaaacttttcatcaaaaactttaatttggtcaagctcacacgaaactcatgtgaaagctagccttttgacctttgattttgatatttacttaaaactctttctgggaaactccctaacgcttggttggtagatttcacatcattcaaaatttatattttcaatggtgatcgatatgtaattttgtggttggagctgcagatatagttgtaataactttatttaatcattattcacaaaattttgtattgttaccattatacgtataggcgttcttttagaaaaagaaaacaaaaactgaaaattaatacactaatttaccttggaacaaacatataaaaattaacaaaaaaaattgaaagagttttatatgctaaaatttttacatgaattatattaactgaaatagttaaatttttgctaattgttatactatttcaaatcacattttctgtacgtggattgttcttttccttatgatatgttatctttcatttggagtctcagactttctgacatgtggcattacgggaaaggtgtgtgtctctcaaacttcttacacatgtggcaggccattagccaaatctcatttgagtatctatactaatttgattattagcttgagttcctttcctacgtagttgttttaatttacataaagctctaaattatgttgtgttcaatgtttatgcaataagttcgaaccaatggccattgctaacttggattctataacatataatttgttcttaatttttatttttttgttcttaattttcgttttcatatgtttatatcaaacataaatcagacgctttgacgtggctgcatacgtgtatacattttcatttatgagattgaaagagagtatccatacatttgttacttatacatgcatttatatataactctctacttccctaagaaaacaatatcccacatctctactcatccacattagtcaaagatctctattggtacttctcaaatg

SEQ ID NO: 4954 - DNA, 3000 bp, Unknown
  misc_feature (1)..( 3000): cDNA_ID_1826625_gDNA_ID_1620748_Annot_ID_49740 3000 nt of promoter + ATG
ttattcgatgttttgtttttttcaggtgaaagaacaatgcatatgtgctctgtggaatctgactgtggatgaagaaattagggagaaggttgctgactttgatatccttaggctactcattagtttccttgaagatgatgatgtaaacgtaaaggaagcagctggtggcgtcttggccaatctagcccttagccgctcgactcacaagattctggttgaagtaggagtcataccaaaactggtaagaccttgcttttcaccttatagaatttaacaatatattagatatgttagattgaaatgattgctaatagtcaagggtgagaattgaaattactgaaaggatgtgaaattggctgagaatcacttaggctttaggacaatgatattatatatggaaaaccgtagaattgttggtcatgcttcagcttgcttattaccttcccaattggaatccaggcaaaattgttgaaagccgataatacagaaaacaaagggtctaaagttattagaaaagaagcaagaaatgtgcttttggagctagccaaagacgaatactacagaattctcgtcattgaggagggagttgtacccattcccataattggtgcagacgcttataagtccttcagaccggatttgtattcttggcctagtttaccagatggtataaatattgagcagacagcaaaagctccttcaagatttggtgcctctgagctgctccttggtttaaatgttgacaagaatgttgacgacgtagatgaagccaaaatgaaagcaatagttgggaggacaaatcagcagttccttgcccgtattggagcaattgaatttgagaaggaaattaagtccgaagggccagggaaatctcagcagcttacccttcttccttgtgtagatggtgtggctcgattagtcttgattcttggattggcagatgaattggcagctacaagagctgcagagtcaattgctgatgcatctatcaacgaggatatgcgggtttctttcatggaagccggagctgtaaagcctttggttcagcttttagccaacaacaacaaagagactgttaaattacccgtcatccgtgccttgaaaaatttatcacttaggtgtttatctttgagcattctttacatttttactaagcagtttctcctcagaggttgagattatttatacttgtaatgcagccgcactgtttgccagaggattgaagctgaaggtgcagtatggtttcttattaatcttctgaagcagccagagatctcactaaacgttacagaacacgtatgacttcattttcttcttcctttgttctttgatatctttgtctaggctattatggaataactggacgtgaaatggtattttgtgaactatgttatgcaggttctggatataattgctcatatcttagatcctagcaaggaaatggaatccaaggtgtgtttattttccaaggttgattattatacattaaatctgctttcatttggcttatgctatttctctacatgctacagttttatgaaggaccggtgaacggatcaaaagcagactccaggtcagtcttcttctcgatcttcctatcttcagctcattcattctttttgtttttttagaagtattaattactcaaaacatcggatgggaatgaacagaaaggaagttctggacgctgctgttttttctcggctcgtccagattgcgaaaacagcctctccgaacctgctaagaaacgcaatctctgtcatcgagtttggtataatcagtaatccaaacatggacacgatcatctccaaggatatcacaactgttcttgatcttgctctccggcagaaagtcctggaaggtacaaaacttatcttttgatataactctgtttgaattttataacagcatacaatactttttatggaaatgcagaacctgagaatgaagctgaggagttagagaaacatctgcttaagctagaagaagctggtttgacgatttccgctgcttcaaggctactgacaaaacttcttgactccgagtcctttcgccaaacaatagataccgcggtcttcatagaattagtaaggaagatcctaagatcaagcctccctctacactacaaagactgggttgccgcttgtcttgtcaaactcaccgctctctcctctccctctcaatccctcaacaatccgatcaatcttgaggtaactctgtacaaaacgatcccgagcctcgtggaacaaatgagcttttcctcatcaccagaaacgaaagaagcagcggttttagaactgaacaagatagtctccgagggagttccagaatctatccaaacacttgcttcacaaggaggtatcgaaccgctggttaagcttcttgaagaaaggaacgagcggtgcgttgaagcgagtttgtcagtattgtacaacttaaccatggacagtgagaaccacacagccatcataagagcaggagctgtaccagtattgagacgtatcgttatgtctcaacgaccacaatgggagaaagctcttcggttactcagaaatttacccgtttaagacatttttacagattattgtcatgtaaaattttggaatcaattagaataatataatgtatgatttgtcatgtgagacgaatatacgaaaagttaattacattaagataatcggattacgtagcacgtatattactattaccatattctagagattacacatgatcaatcaaatatttaatctttgaaatgttacgcaagcaaaaatgaatttaaaatctgaaaatacaatccaacggctgagattttcttactgtgtcagtgaaaacgagagaaacgttctagttcactcacttggttacacgtgtcttgggatcgtttagcttttaagcaagcttctcttttgcgtaatttatttaagagctgcttgcttttatcatcatcactctctctgcgtccaaattttgatctttgttcttctcaaagcgaatatg

SEQ ID NO: 4955 - DNA, 3000 bp, Unknown
  misc_feature (1)..( 3000): cDNA_ID_1826621_gDNA_ID_1620748_Annot_ID_49741 3000 nt of promoter + ATG
atttagacaacttgaccttcatgtatgatcttcgtatgcatattataagcaagtaggtccatatatatatttaaacgaaaacttacgaatgataaaaattattgataaaataaagaaataaatcattgattctattcgttaatttctagtaatgtgaaagatgtggagaaaggaaaggcgatgatgttttacttcactaaactcgaatccatcactccctctggcttgcctgctcgagtcgccagcagtagctatttaaagagcaactatttcaagaaccgtccatcaaactggtattactcttacacaagccctgatgaagtcactctatgtccagacaacaaacaaaatctctactgccatttgctttgtggtctggttcaaagaaacgaggttacaagaatgggttctatcttcgcctccgttatggtccgagcaatcaagtttcttgaagattcatgggaagagttgtgttcaaacatccgatcagggcagctcagcgagtggatcacggacattggttgtcgagattcggtgtctctagttcttggtgggcctcatcctgaagcggcagacaccattgaacaaatatgcaaccaaaaatgttggaaaggtataatcacaagactttggccaaaagctaaatatattgaaactattgttactggttcgatggtgcagtatgttcccacattgaactattactctaataatatgttacctctcatttcaacaatctacgcttcttcggagactcaattcgggttaaatctcaatcctatgtgcaagcctgaagatgtatcgtacacattcatgcccaacgtgtcctacttcgagttcataccagtggatggagacaagaacgatgttgttgaccttgctgatgtcaaacttggatgttgttatgaggctgtcgtcacaaatttttcaggtgagctaaataataaaacattatgaatattaaaaaccatgaaattaattaatccttttctttgttgttgtggatgtgaatgttttttcatgctctttcttgcttcaggcttgtatagaataagagttggagacattctagtggtgactggtttccataacaaagcacctcagtttaggtttataagaagagacaacgtggttttaagcattgacttggacaaaactaacgaagatgatctgtttaaggcggtgaataacgcaaaactcactcttgactcatcacatctcatgctaatagacttcactagctatgctgatatctccactatcccgggacactacgtagtttattgggaagtaaagaacaaaaacgaagacaagaagagcaaaaagcacatagagctcaaagaagagacattctcggagtgttgtttactaatggaggattcattagacagtgtttacaagatttgtcggtttaaggaggaatctgtaggaccattggagataaaagtggtgcgtcaagggacatttgattctctcatggattacttcatctcacaaggtgcttctattggtcaatacaagactccaaggtgcattaaatctggaaaagccttagaggtattagaggaaaatgtggtagccacattcttcagtacctgatagataataatgttgctaagttatcaataaatatgcatgtgcatatgctagctgcgtattagttttctaaattgttggagtttctttttctttttctctttattggaaaaatcaatgttaaagtgtttttagtccatacaaaaacaatgtcgttttcgatagaatttcgtatgaatatttatgagcttaaagcctcaatcaacaagtttgagcctaattttaacaaaaaagtataagccataaaagacctcacatgatccattaatttctttttgattggcgtatggctaatatgatagacaaaattccaattcactacatgcaaacacgtaagtaggataccagttcccatatttttttttgtcacaaaaaccagttcgcatgttattatcacgttgtgttcacgtacttattaaatttaattagtttgtcacaaaacgtaagtagtgatgaattagagagtcaaaaccacatgcatgctggttttgttatttagccctttaattttgttgacattatgagagagtaattgtttggcgcttgcacgaagtcacgaacttcaacaccgttcaccaccaccgccaccggcaccaccactttccatttttctctttatcactaaaagtcatcttgacaaaaaatcaaaaaaatcaaattattaaagaagacaaaaatttttattcgttaatttgtataattgaaggctgtaattttctagatcttgctacggaaacaaatgtaggtaaatattaatgagagtatattgcagagcaaaatagcaaaatgcgaataagagtggtggaggtatccaaagaaacaggttttcaagatttgacttttacagttttactaaaaggtttctacatttatagcaaaatataaaatgatttttcattaaaaaaaaattagaatttgcttgtcagggaaattctaataaaatgttccaccttttaaaaaataaacatataattttaaataattgtctatcgattataaaaattacatattgatacatatgaaaagatttggactaaatatggatatttatccagattcggatcgagaaattcatataccacactttaagcattcttatgatataattttgttattccgactatagtaaatattgtttcttattttggtcaaacagtaaatgctaataaaatacatcacattatcgacaacgaaaacaaaatataaaataataattgtcatattatcgacgtcataaaaaataatataaaatgtcatatttttttgaataaaagatattttaacctatttatacttctccgtccagtcatcaaagtcgtctcattgtcgtcgtcgttatttttatttctcgccgggaaacgaaaaaacagaaaaagtttgaatttttaacttcgaaaagctatg

SEQ ID NO: 4956 - DNA, 3000 bp, Unknown
  misc_feature (1)..( 3000): cDNA_ID_1826617_gDNA_ID_1620748_Annot_ID_49742 3000 nt of promoter + ATG
aaagattatagttatccaaaaatcaataatcattaaacgaataattatatggtttatcataattatttattttaagatagtctaatagtcagaaaatctgaattgaactgttacgtgtatttcgcttatgcatacaacaaaacaaacttatcacaatttaaggttgttttgagtttttctctatttacttaaaatacggtaaaaaaagcaaaacgcgtttaacaaaaataaaatattcccaaaaaaaacttttatgccctaaagttgattaaagacctttctacacgcatctaatcatctcttctcatcaaaatcacaaaatcacaaattcgattttcctcttctcttcttcttcctcctcctcctctcggattcttccttaaagtttccacctttcgccaccgagaaaacattccggcaaaccctcgtcggaatacttaatctctttgataatctttctctctggtgacgttttgtgaatggtggaaactaatctgattggtgataatcataggctcaccctttcaactaaaagggcgagctttctcatcatccctctctctcaagactctgttttctcattcggttcttgcaaagaaggctggtacttccgttgcattggccttgacccgtgaaccaatcaatcatcatctccgatcatattttcaataataatttctgtgttttgattttttgagaattttgaaaaaaagatgttgctttacaagaaaaagaatcagattgttaaaggaaacagaatcttgatcagcgtaacgtttcttggtagtgctggtccgatccggttcgttgctaatgaaggtgatcttgttgcatctgtgattgatactgctttgaaatgttatgctcgtgaaggtcgtcttcctattcttggatctgatttcaacgattttgttttttattgtccaatggttggacctggaggtaacttgtcaaatacgcaaagtttctcctctgttttgtgattatataaagattgttttttttttaatttttagttttcttggtgtagctttgagtccatgggaagcaattgggtcggtgggagtgaggaactttatgttgtgtaagaagaaaccagaggagaagaaggttgaggaagataagggaagatcgaattttccgattaatggagctagaaaaggagctggtggaagttttaaggcttggattaataaatctttaagacttaaagtgactacccattagagagactacttatatgttgtcttctctgtttctttgaatgctcatgtttggtttgtgtctttgttcttttgatcttcttattttatgaacttttgatttgttttttttgtttcttatgatggtttcaggaaataaaagtttcaagttcatttgaacaaaaaaaaagaagtttctttcgctatagatttttagtatttgtcctttttgtttacaaaattagtttagaactttgatcaccagaaatgtgaaaatagcattgcttaaattagttaataaatttagatttacgaaaaatgtgaaaattgcatggttattctttagtatattcgactttgcaagtggttcagaaaaaatgagaaaaaggcagaattttaacaagagaatcacaactttgctttaggcgcaaattgtggaatggttgttggggaaatttgatcattttcttctccaagagtagactttattggttattgagatttgagatgagatactaaaatagcagatattaagggattcgaattttgaattctttcaatgtttcttttctttattatctgtagacagttagttaaaatatatcccttggagtaactaatcaactactttcattttataaataaagtctatattacataaacatgacatatctgatatctcctaaggccctatttaaaaatatatatatctggttggtcttcctctaatacaaaattcacaactagtaatattttgagagtagaattctcctatattagaatatagaggtaaaactgtgacaattatattgaactcggatgtgaccttacaagtgaataaatacattatacaagtagatttggtcggtttatggcgtgtgaactcgatccatcttcttataactcttgaaaatctcatgaggcatctacttcaaatgatcatttgggttttctacgagaagtttatttgcctcaacaagaagccactccaaaaaaacaaaagaccaactaataagacaagttgttgtagtgttgtagcaaattaatgacgagttcataaacgaatattgaccctttcatattacccttttaagttgtaacaaaaaaaaaacattgaccttttcatttttggacgcagatatcgtaatgaattaatggaaatggataaagatgaatatcgagatatactagaagatttcaaaaaaacaaaaactagaagatttcaagaagaaatccaaatggatgaaaaggtactatacaatgtgatgatctgttagttctatccaactaagcttaataaaccaaatgtacctcaataatgtttgcgactaatatactcaaaatagggtttagaaaagacagaaaaatattaatgaaacatgtatgtgtgatacactcaaggtaattttcattcataatttactgatatgcatgtgattggtaagttaagataatattagtaaatcaatgtaaagtttaagcttccattcatttctctcatatgcatgtgattcggaggatccgaggaatttgagtccataatatagaatttcttgttttcagagatctcagattgtcaagcatatgttagtatatcccaagttcttaaggtacaaacatgaagaatcttttggtagcttaagatctttccaaaatcgtttcacacgtttcccaatatttctgatttttaatcaaattttcaggtgcttcgtgatttattaatcttttgtccttgctctatttatagaagcaagtgtgcagttcttagtttcatgtgaattaaaggtaaccaaatatg

SEQ ID NO: 4957 - DNA, 3000 bp, Unknown
  misc_feature (1)..( 3000): cDNA_ID_2052198_gDNA_ID_1620748_Annot_ID_166716 3000 nt of promoter + ATG
agacgacgtaaaaaccaccctattaaccgtactgcattgctagcttgtagagtcgtagaccatataacatataatgacaaaaacaaatttttaacctctttgtttttaattgtcaaactaacaaagtgtagcttagaatctaattagcagaatatatatatatatatatatatatatatacatcattttacaaaattatgcattcaacataataaattagtaatagcaattattaatgaaaataaattagaataatatatagacaagatggtaaattaatgtttagtaataaactaaataaatggatagagtttcacaaccagtcaaactcaatcttcttaattatataagaagaagaaagaaggctaattatgatggaatggccatttttgaatgattcaactgggtttatatatatttgtataggcatatagccaatgctttttttgataacttttgagctaaaggtgatagatatttgataatttgcttggcatattagcacatgtaagaagataatcaaaatgttgaattaaattttgaaggaaaatgagaaggtgggacaaaggcggcaaatgtcgaatgagacaatgtgttatcttaagtctgaattaacgctgattagcaaatattcaaataagtgtgaaaaaaggaagaggtcaatatccatttccttgcaagttgcaaccatacaatctgaccggtgtgacccaattgtccaatagtaaaatatataggtccctaaaaataataatgcgacttgagatagtgacgactgacaagaacggtcctccgattttattatttcaaccttctttcaacccctattcggaaccaacttgatagtacatcaaaccacttatacggatttgtctttgatatgtttttttggtttttgcattatcgtgatgtgttgatgcaattttggtttttgtttgttagcatcacgttcttatcttcatgaaaatatacgtaactgtgaccgaaaagagctgtacgtgggtttcatccaaaatgtgatcaagtcctaacactttttttctttctttttttctgttgttgacttctactatagaacattatacttaagaatttagatgctgtatttttcttttcatatcttctactacatataaactgtacatatacaacctaaatcgtcaaaccaatctacccacaatcataacaaataagcacgaactcaaatggtcttaagtgaaacatgacatagacttatatactagcgtggcacctcaagaaagaacttcaaacccaccaatgattaaaacttggctcttgtcctattaggcttcgtgaatgatctcctcctaatcttccaaagtaaaaaggtcggtgcacgatgcaaggcttgtaatgttctctttgaatttatggtgagattcgatacgatgttagtgtcaagatccccttttttcttttagactcttgcttggatgataattaaggtgaatatttatgctatagtgcctatccatttcttcatcattgtcacgagatctaaaacccatacttattatactttagggacctcctaaaagacacattgagcttttgatcgcgtgttgctttgttatcatctttgcccactttagggacctccaagtgtcagaatttttcttttgaatagttagaggtttcttatcaaaacaaaaaaacaagaatagttagaggttttgaccccaaaagagaaagaatagttagaggtagggacattcaatacaatttttcgtttaagctctttagttttgaaatttcaagatggatataaagttgaatgtacttttggataagtttaacacggtttggattttttcgtttcaatatttttgaatcattattttccaattggttgtcaattcatttaatttagagctgacctagagatatcactatgtaataaagtaattgttctattcaaaattgttagctcaaacctatgtggtctaaaatgttttgcatacgtgcattatttttccacaaacttttccatcgatttagacatcaatggtctgctgaatgttgacgacatctagttttatatttgtattcaatgtctattttttgaaacgaacccgcaaccacaacattgagtattcgaagtattttttttttaactgtaaacccaaacgcaaaactcatgaaatatttttaccggctgagcaaactattatccatatttaaataaattttagatgttgagagctgatctcggattgcgtcactaatggcaacaatgatttacactttcacgtttgggagcttcaattggcaatcgaataagcttgactctttgtagttcagtatggagatacaaaaacagttatattttgctagtcaagcaagttccacaaaataagctttttgtatctccgacttaatattttcacgtttgggagctcaaacctatgtcttcttccgccaaggcatgttcctaccattgattatattttgttttgtggctttcttttgtaatatgatcattttcgtaaatttcgatttttgttatctattcgtagtgtctccgtttttcttataaaaagaacaaaaatggaagattataaaaaaatgaagtggttttatgatatgacgtgatgtttagtaaaataacgttttatcgaacggtttcacaaacacattgtacataaattactgaacgagaaatgttatttgtctacatcacgagtaaaactttaatgcatgtcaataccattgacctaattaatgaaaaatgttgaattaattaatgcatataccctactttttattaacatgaaacgagtcaaataaaaagggattgactcaataattttagaaatactgaatgggcctgggccacgtaaagtccaagtaaccttaataacctaaaaacccggaacacctgttgtgcttaaaccctagaccctaaatcttagcgaaattaagcagagcaacattttcgtaatccgatctccgtcgtcgtcgtcgaatcagataaaaatg

SEQ ID NO: 4958 - DNA, 3000 bp, Unknown
  misc_feature (1)..( 3000): cDNA_ID_2052200_gDNA_ID_1620748_Annot_ID_166715 3000 nt of promoter + ATG
atattataaataaacgtttgtgtttaccaatagcatagttccagaatatgacactgccaactttgccaaactctccctcatgcaaagcacatccctggatgtcaggagtggctttcgcaacatcttgtggtcttccagagagcatgtgatggaacttctttgccgatgctttgatctcaatatctacctcaagttccccttgtagagaagactgacgcgtagcttgtgccatttttcttatacggatgttttgcttctctaggttttaatgagagtgagtgagagtctctttggaaattcatagccacttttatagaggaaagaataagcaatctgtggcaagagtcattattctaaaacaacagagtttcggaatgttggaatatatatggtcccttacggaagggaaggaatcagaccaactagctgataacaactacaatttcttttagtcagttgtggccttatgggaatcgattcagtgatgtgtccacaaaaaaaaaatatgtttcaagattgttataggctgctattatcgaccacatataccaacgacaaaagtaagcccgttcagaagaccaatatcgttattcgaaagcatgtacgttgtcttgaagccctgcttgtagaatctgcaaattaaataacttctcgtatagtactattcacatatcacaacacaacttccattaatcgatttttgggagcgtcatgtgtatttttatctaataactctaacaaatcattgtaaggaaggatgagtaattcctctaagctttttacgtagaaacttttgcatgtaaatacttatatgtaaaatttatagcgaaaatgaaaacatttgagaaatgtatattagtaaaagagaatcacttttttcatgtcaattttctcttttaggaaattcggtgcatggaattcatgcttagttagctttaggaatataaattcctcatcattgattaatcaataaaatagatagtataataccatactattagaaaataaatttatccaataaatagagtcatttaaaaaaaagacgattgtgtaaacatttaaaaatttaatggttggccatttgtaaaagtaagtgcacacaacaattgaaataggtactttgtgtcaaggatatgatatccttgacacttcagatctattctgtgagtaaaattaatactgtattttcatattagttaatatgcgatttgtttcatgtcatcatttatgaaaatttataaaaatattattttcatagcaagatctgatttatttgacaaggaactcggagacattgatgatatattcatgattcagacaacaatctagtctcgaggtcgcgtgtgtaatcttcaacgaacgcagtgtatctggtagggggaggaacgtcgtcatttaacttctcgtattcccatgtccactttgcaatacaaactttatgatccttaggaacaacgtcaagtgttatcttatagctcttatattgctttaacacatctccttcaagagctaagaaagacaccgacttgttctcttcatctacgtctatcttctctttgatctgctccatttttccatctataataaacccaaagtaaccgatggaattcaagaattagaaaaaaaaaaaaaaaaaaaagagagaaaaaaccctatttttcaagactccttaaaaaacatagacagctagttatagtacataccaacgatgaaattccagatctgaatagaggagttggatgtgggatcgtcacgatgaacataaactgcctctgtcttgtccgtgaaatttccttctttcttcttgaaagtcttgaagaatctctcggcggtcatattcacttggatctctaattcgagagtctggacaccagccatggctctaagataatccagtctctcacgctgacttttctgttgtttatctttaccataacaaaaagcatagagtagaaaaccaagagaagaaaacaaaaatagaggtaggcaaggtaggtgccttatgcgtagcagtttcttgataagcataacacgtgttgttaattcatattttaagtattgtctaagtgtattatacaatatgtattttcatttttgtgtttggtaagaacagtatttattttcatttaacaagtaacaggaagcgtaattttgttgttggtaaactaaggaagcgaaaattattttattaactaagaacaatatttaaatgttttcttttcaccataaccaaagaggacacatttcataagaatgaatatgcgacacacactacacgttggtcttagcccatatttggcccagacctataaagtataaaccatgcatgacgctgactctgagatacgttcttggttcggatcaaaatcaaaccggtatataaaccggataaaaccgggactggtaactgagtaagaatattgatgaagagaatatgccgtggaacagagagagttaaggaaaaagattcgtgagtcattcgcatctctctgactctgattctctctgcttagttctcctcgttccttctctctctctctttatagcatttcttctccaacaattcttttcgagtttttacggccattgcttcaggttctatctttctctataggtttgcatgttttctatgcaatcattttctgtaatatagctatgtgtgtttgcttcttcttagcttttccgttgaattttatcgaaacgctatatgctttgtggcccttattcacataaaattcatacgaaatggaaaagagaaaaagcagatacaattctggtcattgataattcagcatatcatgcagcaatcaaattttaggtgttgacttgtaaccaatatttctctctggaaaacacatgtatgaccaattattatggtttaatttatgaatacatttttatttttgtcatcagaacagaacaagggagacaacaaagtagtttgattattctggtggcgtatagataaatgttggttgtctgtggtttagcaagattacc

SEQ ID NO: 4959 - DNA, 3000 bp, Unknown
  misc_feature (1)..( 3000): cDNA_ID_1808979_gDNA_ID_1620748_Annot_ID_166714 3000 nt of promoter + ATG
cctaaatcttagcgaaattaagcagagcaacattttcgtaatccgatctccgtcgtcgtcgtcgaatcagataaaaatggcgaagcgtttgatcccgactctcaaccgtgtattggtggagaagattctcccaccgtcaaagaccgtctccggcattctcctaccggagaaatcatctcaggtaaacgaatttctttaaaattctcatctttacccatttcttcgattggacgaactagaaatttgttggatttgattaaacacagttgaattccgggagagttatagcagttggtcctggagctagagacagagcagggaatctaattccggtttcggttaaggaaggagacaatgttcttttgcctgaatttggcggtactcaagttaagcttggagagaaagagtatgttcttaacctgttcgatgtaattcctctaagagtgaaatttatcagtattttcgatttctcactgtgtgtttcgttctctttgcaggttcctattgtatagggatgaagatatcatggctacacttcacgagtgatgtgttaaagagatagaatttatgattcctctttgttttgttgtctgcaattgtctgacatttggatcaattgttatgattgttcttcactgttggcaacaagttcttataattcaataatctcttttgtttgggaatgatgatgatctacttcttacatagagattactgactataagtctagaaatgcttcttagtaatgtcgactgattaggagaaacagagaaaccatttgtttcactgttctaagaatagcaattttggaaatgatctactcaagaagtttattgcatgttccaactccaatggctgcagcgaggtgccagcctgcgtgaaggaaaggtgtctcggggaagaaatcatcagctatgaacagagcacctcctagcaaggaagacatcttgtgtacgttatgagctgttttgagatctggatcctttaagcttcttttagcaaatgcgacctccatcattccagtgtgaacggcagagaccatgagaggttgaaaaggtagaactaaagctgatgcagccatcagaaattttgggttctcattccttagagcccttgagagacactgtccacataaccagatttaatcggttatatttggttaaagaagaatttggagatgggttaagaagagtggaacttactattgttgttgtggctatcattgtgtaatctacccatctcaggtacttcctcaactttcccctagaggcatgatacagactcgacgcaattccaactccaattagggagtttgcgtacacctttgtgttcagattcttcctacatgggatagtatcttgtcagagaaactctacttgaaatgatatttgcaaagagaacattttaccttggtgcctgcattccgaggaagatgaaaggaagtgaagtagccacattagcagctgtttctaagacactctggtcacctgtcatatgtttcgattgcataataaaaagaccgatcaaccatcttgagattggaaagataaaagatcgaaaacaagaagcgtaccgcgaatgctgcaacagattggccttaagcatggaggtctttgctgccaaaaacgtctgtaacagagaaactaaatcagtaactgaaaccgtttcaaaagctgagaatgtcacaacctaatgttatgtaacatactcgatggaaagtctttgatttgattccatgacagaggatttggtgttggtctgaaagtcactaacttgagttgtcttctcaaatgagaaaggagaatgagacgtgacatgaaccccgtggataccctcaagggcattgctcgactttgatacattttgcagactcatggtaatcttgctaaaccacagacaaccaacatttatctatacgccaccagaataatcaaactactttgttgtctcccttgttctgttctgatgacaaaaataaaaatgtattcataaattaaaccataataattggtcatacatgtgttttccagagagaaatattggttacaagtcaacacctaaaatttgattgctgcatgatatgctgaattatcaatgaccagaattgtatctgctttttctcttttccatttcgtatgaattttatgtgaataagggccacaaagcatatagcgtttcgataaaattcaacggaaaagctaagaagaagcaaacacacatagctatattacagaaaatgattgcatagaaaacatgcaaacctatagagaaagatagaacctgaagcaatggccgtaaaaactcgaaaagaattgttggagaagaaatgctataaagagagagagagaaggaacgaggagaactaagcagagagaatcagagtcagagagatgcgaatgactcacgaatctttttccttaactctctctgttccacggcatattctcttcatcaatattcttactcagttaccagtcccggttttatccggtttatataccggtttgattttgatccgaaccaagaacgtatctcagagtcagcgtcatgcatggtttatactttataggtctgggccaaatatgggctaagaccaacgtgtagtgtgtgtcgcatattcattcttatgaaatgtgtcctctttggttatggtgaaaagaaaacatttaaatattgttcttagttaataaaataattttcgcttccttagtttaccaacaacaaaattacgcttcctgttacttgttaaatgaaaataaatactgttcttaccaaacacaaaaatgaaaatacatattgtataatacacttagacaatacttaaaatatgaattaacaacacgtgttatgcttatcaagaaactgctacgcataaggcacctaccttgcctacctctatttttgttttcttctcttggttttctactctatgctttttgttatggtaaagataaacaacagaaaagtcagcgtgagagactggattatcttagagccatg

SEQ ID NO: 4960 - DNA, 3000 bp, Unknown
  misc_feature (1)..( 3000): cDNA_ID_1826607_gDNA_ID_1620748_Annot_ID_166713 3000 nt of promoter + ATG
aatcagtaactgaaaccgtttcaaaagctgagaatgtcacaacctaatgttatgtaacatactcgatggaaagtctttgatttgattccatgacagaggatttggtgttggtctgaaagtcactaacttgagttgtcttctcaaatgagaaaggagaatgagacgtgacatgaaccccgtggataccctcaagggcattgctcgactttgatacattttgcagactcatggtaatcttgctaaaccacagacaaccaacatttatctatacgccaccagaataatcaaactactttgttgtctcccttgttctgttctgatgacaaaaataaaaatgtattcataaattaaaccataataattggtcatacatgtgttttccagagagaaatattggttacaagtcaacacctaaaatttgattgctgcatgatatgctgaattatcaatgaccagaattgtatctgctttttctcttttccatttcgtatgaattttatgtgaataagggccacaaagcatatagcgtttcgataaaattcaacggaaaagctaagaagaagcaaacacacatagctatattacagaaaatgattgcatagaaaacatgcaaacctatagagaaagatagaacctgaagcaatggccgtaaaaactcgaaaagaattgttggagaagaaatgctataaagagagagagagaaggaacgaggagaactaagcagagagaatcagagtcagagagatgcgaatgactcacgaatctttttccttaactctctctgttccacggcatattctcttcatcaatattcttactcagttaccagtcccggttttatccggtttatataccggtttgattttgatccgaaccaagaacgtatctcagagtcagcgtcatgcatggtttatactttataggtctgggccaaatatgggctaagaccaacgtgtagtgtgtgtcgcatattcattcttatgaaatgtgtcctctttggttatggtgaaaagaaaacatttaaatattgttcttagttaataaaataattttcgcttccttagtttaccaacaacaaaattacgcttcctgttacttgttaaatgaaaataaatactgttcttaccaaacacaaaaatgaaaatacatattgtataatacacttagacaatacttaaaatatgaattaacaacacgtgttatgcttatcaagaaactgctacgcataaggcacctaccttgcctacctctatttttgttttcttctcttggttttctactctatgctttttgttatggtaaagataaacaacagaaaagtcagcgtgagagactggattatcttagagccatggctggtgtccagactctcgaattagagatccaagtgaatatgaccgccgagagattcttcaagactttcaagaagaaagaaggaaatttcacggacaagacagaggcagtttatgttcatcgtgacgatcccacatccaactcctctattcagatctggaatttcatcgttggtatgtactataactagctgtctatgttttttaaggagtcttgaaaaatagggttttttctctcttttttttttttttttttttctaattcttgaattccatcggttactttgggtttattatagatggaaaaatggagcagatcaaagagaagatagacgtagatgaagagaacaagtcggtgtctttcttagctcttgaaggagatgtgttaaagcaatataagagctataagataacacttgacgttgttcctaaggatcataaagtttgtattgcaaagtggacatgggaatacgagaagttaaatgacgacgttcctccccctaccagatacactgcgttcgttgaagattacacacgcgacctcgagactagattgttgtctgaatcatgaatatatcatcaatgtctccgagttccttgtcaaataaatcagatcttgctatgaaaataatatttttataaattttcataaatgatgacatgaaacaaatcgcatattaactaatatgaaaatacagtattaattttactcacagaatagatctgaagtgtcaaggatatcatatccttgacacaaagtacctatttcaattgttgtgtgcacttacttttacaaatggccaaccattaaatttttaaatgtttacacaatcgtcttttttttaaatgactctatttattggataaatttattttctaatagtatggtattatactatctattttattgattaatcaatgatgaggaatttatattcctaaagctaactaagcatgaattccatgcaccgaatttcctaaaagagaaaattgacatgaaaaaagtgattctcttttactaatatacatttctcaaatgttttcattttcgctataaattttacatataagtatttacatgcaaaagtttctacgtaaaaagcttagaggaattactcatccttccttacaatgatttgttagagttattagataaaaatacacatgacgctcccaaaaatcgattaatggaagttgtgttgtgatatgtgaatagtactatacgagaagttatttaatttgcagattctacaagcagggcttcaagacaacgtacatgctttcgaataacgatattggtcttctgaacgggcttacttttgtcgttggtatatgtggtcgataatagcagcctataacaatcttgaaacatattttttttttgtggacacatcactgaatcgattcccataaggccacaactgactaaaagaaattgtagttgttatcagctagttggtctgattccttcccttccgtaagggaccatatatattccaacattccgaaactctgttgttttagaataatgactcttgccacagattgcttattctttcctctataaaagtggctatgaatttccaaagagactctcactcactctcattaaaacctagagaagcaaaacatccgtataagaaaaatg

SEQ ID NO: 4961 - DNA, 3000 bp, Unknown; identical to SEQ ID NO: 4956
  misc_feature (1)..( 3000): cDNA_ID_2052218_gDNA_ID_1620748_Annot_ID_166708 3000 nt of promoter + ATG

SEQ ID NO: 4962 - DNA, 3000 bp, Unknown; identical to SEQ ID NO: 4955
  misc_feature (1)..( 3000): cDNA_ID_3074958_gDNA_ID_1620748_Annot_ID_166707 3000 nt of promoter + ATG

SEQ ID NO: 4963 - DNA, 3000 bp, Unknown; identical to SEQ ID NO: 4954
  misc_feature (1)..( 3000): cDNA_ID_1826625_gDNA_ID_1620748_Annot_ID_166706 3000 nt of promoter + ATG

SEQ ID NO: 4964 - DNA, 3000 bp, Unknown; identical to SEQ ID NO: 4952
  misc_feature (1)..( 3000): cDNA_ID_1826633_gDNA_ID_1620748_Annot_ID_166701 3000 nt of promoter + ATG

SEQ ID NO: 4965 - DNA, 3000 bp, Unknown
  misc_feature (1)..( 3000): cDNA_ID_3074947_gDNA_ID_1620748_Annot_ID_166725 3000 nt of promoter + ATG
tgatagaaaagtttggtctcgttcaatatgtaagtcaagtgattcggctcttcttgcaacctaattattgcatgtttttgagtttttgtgataattgtgtcagatgatcctcaaaaccttttgtgccttcttgacatttttgttggagcttcttggtgtctatggtgatggtgaattcaaatggtattacgggtatgtgaattaactattatatcatagtatttgttatttcatcagatggaaagacaggtgatgagtctttgattctgtagatatccatacatagtggtggtgctaaacttcagccaaatgtgggctctgttttgcttggttcagttctataatgtcactcatgaacggcttaaagaaataaaaccgttggctaagttcattagctttaaggctatcgtgtttgcgacttggtggcaaggcttcggtatcgcgttgctttgttattacggtatacttccaaaagaaggtcgattccaaaacgggctgcaagatttcctcatttgcattgaggtaacttaaaagctctttcccaagtgccactcgaactagcgatctctattctatatgagctctttccaaacataattatgtttctaaggattctactacttcttggggtgtacactggcagatggcgattgcagcggtggctcatctctttgtttttccagctgaaccttaccactacattccggtatcagagtgcggtaaaatcacagccgaaacgagcaagacggaagtgaaactagaagaaggtggtcttgttgagaccacggagactcaggttgaagcatctggcacaagcattaaggagagtgtacaggacatagtgattgacggtggccaacatgtcgtgaaagatgtagttcttacaataaaccaagcaataggaccggtagagaagggtgtaacgaagatccaggatacgattcatcaaaaacttttggattcggacggtaaagaagaaacagaagtgaccgaagaagtgaccgttgagacttcggtgcccccaaaagagtgatcgttgaaatttgccctttgttgtgtagttttgtttcacagttttcttttaacgatttgtatcttttataaaagatagtatattagtacttgcactgatttttatttatttttacaactctcatacttatcttatattgagaagtagaacaactactctttgacttctacaataaatctatcttccgtaagcctgaaaatcttcaataaatctatcttccttaatatgcataattcacagatcaatttcgaatttggtaatacaatttcactggacttctagaaaatagaagagcttcaaagtgagaatcatatgcaaatgagctaaatatggtatacgacttcgacttattcctgcaaccgcgggagaagtcacatgcaattgccatgctataagtctcttaccaaaaacgacatttcttattaatgttatcacatgcttggactgtgataaggtctcaattattatgtttccttgttcactctccatgatattattagtcctaaatggttttctatttttatcatatagcactaatattattttgaccaatagataaatgatcatgatgtatatataatttttatatatgaccgacgcaataatttggttcgtattgctaacgttatcgtgtcacctaaaattaaatcgacataattattaatgttgttagaataattaagtttataaatatacattaagcagatgtaatggtccgttagatttggaaacacttgaacatgtcgtttgtgctttgttgaaagtatccatacgatcaaagatccataaacgatcgaacggttgatcttgatgttaaaaaaaaaaagaaaacgatcgaacggttaagaataattgccatcacattggaaactctcgacgttgatcatgaccctccgaattaaacggccttgataatggagaacgtgagaaacgtccgttcgagaacaagacaaaacaaacaagaaacgaaagcacatgtgacatgacatgattcatgaacatgattatttgattagtcagctttctttgccaaatctgaattcgacgttttacttacagacttctcttgtccaagttcctcattcgtgctccaaagttacttcatcaaattcgtatactactctctgttttttaatgctctttgctccaacatacggactcttttaggtatggttttgattttgggttctttatttattttcttcgacaaaaagatattaaactctgcggacattaatctcaactcgtcgaacattttactagattatataatggcgggagaggtccaagatccgtttaacctaagccttttggtaatttttgcaactttattgtttatttcatttccagatgatatacgttcaattcaattattattaattatgaattgaacatatataatctagggcacccagaatacttctatagtagcttgatatacacgaaacttatttccagtttatatatgcatagacgtttttcagcaagaagagtgttcctcatctttttctaaatgatttcacaatcttaaacatcttgaaagaaaaaaattcacttttgattcgttcggagctttctttattcagattagctaggagcggctgataagcctaacggttctaaaactattttgcaaaaacagtttattcgagtttaaaaaggaatcattttatttgtatgtgtgtgtagatcttttagtaactctgttttatgaaaaacagagaatgttttctattccaatagtatgatttccttttcaagtttttttatacaaacgaaaacattgtgtttgaaacaatgatatttattttgaatgggctctgcaggagaattctatacactcgggatcagtatcatttggaagattcgagaaggaatctttatcatgggagaggagatcatccttctctcgcaatatatatcttgaagaggcagagagattctctaaaccaggctctgttactcag

SEQ ID NO: 4966 - DNA, 3000 bp, Unknown
  misc_feature (1)..( 3000): cDNA_ID_2990883_gDNA_ID_1620748_Annot_ID_166721 3000 nt of promoter + ATG
tcttcctaatgccgcttttcgaatacactcccaatgtggtcctcggtgccatcattgtgaccgcggtcattggtctcatcgaccttcccgcggcctgtcacatatggaagatcgataaatttgatttcttggtgatgctttgcgcgttctttggtgtcattttcctatccgttcaaaacggtctagccattgcggtggggctatcgttgttcaagatattgatgcaagtaacaaggccgaaaatggttataatgggtaatattcctggaacggatatataccgagatcttcatcattacaaagaagcacaaaggatcccgggatttcttgttttaagcatcgaatctcctgtcaatttcgccaattctaactacctcactgaaaggttagctatgaaactacgatcctttctatatagattttggaagttcggatacattagactttgatctcttaaatgtttatgaaccctgatgtttattagattgtaaccacatttcttaatacattttttttgtcaacaccacatttcttaatagctatgtttcatttactaacattctctgcttttgtgttgcataaattttttgtagaacatctcgttggattgaagaatgcgaagaagaggaagctcaagagaagcattctagcctacagttcttgattcttgaaatgtcaggttagtcttgatagaatctattagaaacccgtataggaaatgtgattagacttaaaggcaaattcactcattgctaattagttttaattttctaatgcaaaaccataaaactcaagaaaaccaatatatttcaactagctaactttgcttttatatatgttaaagccgtgagcggtgtagacacaaacggagtgtccttttttaaggaacttaagaaaacaaccgccaagaaggacatcgaggtaaaaatagttgttttcacaatccgattttgtcacttatccaaggaaactaattagattttgatctaaactggatatttattttatgtgtgaagcttgtgtttgtgaaccctctaagcgaagtggtggagaagcttcaaagagctgacgaacaaaaagagttcatgaggcccgagtttctcttcttaaccgtcgctgaggccgttgcgtcgctctctcttaaagggccatctctcagtaacgtttaactataattttttgtatcggtccaatattgatatttaaccgatggttaaatttttctttttgtctctttttcatcttttaatttcagtacagatgtaatattacgttcttctctctctttcttcagtgatgattttggtcaagatatgtttgtatgatttcgccattttgtagtttactaggccatgtttagtctccgagaataaaattgatctagaatcgaattgatatcttagctagatcaaacggatgtatatccaaattatttatgaaataaactgattaaataaaaaaataaaaataatatttttatttaagataattatgttttataatattagaaaatatgaccaaaccatgagcagaattgtgttaagaactttgccaagttagagcttacattatatatcaaaagtcaatgtgtaattgtcaagagggataaaccgacgcggatgaatcgaagaagcaattgctttcaagaagacttcaaatcagctatgtgtctgcgattataattgtgtaaacgttataagcaagaaatttatctcaaaataaaactggtctataaatcaaatcgaattgaaaatttagctagattaaaagatgaaatgaactgataacataaactaatagatatttttaataagatgttactacttttgtgaaatgataaaatatttctgaagttaatcgaattcattcaaagctatgataacattgtgacttctaggaaaaaacaattcttgatacggtcgcggaaagatcttgataacattgtgacttccagtcttccatatggcataaggtattcttttacactaatactttcccgacaacaacaacgaaaaactccaacctttttttaaaaggccacatagaatgcatgatagaccatctgaaagaaaatggacagggtggcttaaaagtgagatttcttgggattgcataggatgttataattaaccctagcttgaaaaaaaaaagacgattagacaataagaaatagaatttaggtcaacttagttcggcgaatatgatcttgcattgcaccttctttaccaatttatagtgatcttttgctccttataagcacatgtttaaatcaccactacgacattgtttctgtttgggccaaatgcacacttgtattttatctcacaacgagcttatgagaaatcaatcctagtaatacgttaagtggcccaagaagttttggaccggcatttacgtgtatataaaaaaatattatgattacttttagatgaaaccacacttaatttcttcttttttcttggtaaaccacaatatctctttattgtttttatcaaggattcacaaaattcattgaatggaaattttcatttatgtgtgacatgtagacagtcagtccactctaaaaaatctcagtcaatttcgtaacaaattcataacctatttcaaacacaattcataaccataacttataaatactacataaatgatatttctttatatcatcttaaatggtacataaattaggggaaagctaagatatatatagtattaaaaagtacaaaaatagataaggtttataaatgtttaaagaagtaataaaatagaaataagaactaattaggtcgtcatgtgtttgctgtataaaaagctgtaaagggacatctctcgtaaatctaaaaatcatcaaatcttctccttctctctctctctctcacacactcactagcttctctgttaaaagcttccgtcatcacatagagaacagagactgacactaactcacttcctaacggtttccacactcaaaattacacttttgccactccggcgaacaacaat

SEQ ID NO: 4967 - DNA, 3000 bp, Unknown
  misc_feature (1)..( 3000): cDNA_ID_1807205_gDNA_ID_1620748_Annot_ID_166720 3000 nt of promoter + ATG
gcacccaaccaagacaacgttataagaacttaagaagagcaaaccataagcatacttagttaaggtttttaacgaggacaaggaaacgaggaaattaacagtgcataaagaatatatagataccaaatggaatgaatgttttttttatatataattaaatcgaataaatgttattagtaatagtattactaaaacaaaactggtgaaacgaaacagaaatgtgatttaaatggatataataactagaaaatttgatcaaatgcttcgtatgatttacctataggcaaaacgttcgtgttcgatacaaaactaaaaacaaaaatctttgaaaaatacattgttatatcaagctaattttctaaagatgcgggagctagtggaaattgtgatttcaaactccttggttgatcattgtaaagaataagaaaaaaaaaacacgatcagaaatcataatgaaaccaatgctcactttttgttccaccattttttagatggacccggtaacaattagtggatctagaatcttcagtttggattataacttatcgaaaacagtttagtattttgactcaattctgtacattggaatcaattatgaacaaatttcattatatatagttagctcatcttattcttcttaatttgtgttccgacataaaaaaacatagaaaccgaaatagattcagttagcattcacttcttattgagaaaatatgtaggttaaaattgtaggtttttgccatgcatattaccgacgtagataggtttggtcggaattttttctacttctttaataagtttggttagatcattcatcttatatgaatatgtaaagaatgcttttaattatggtcgtttcgtttctttcaccagaaacaaggaatgtccgagattcacttattaaattaatatatacttgatctgattcacacgaaaagacaatcttggagtatcaaactataatatcacttattatactttgaattactaggaatttttatcctccgatttcataatgatcctactaacattggatcacaacaagttggctcggttatgaatttggtttgcaacatatacagtttttcaaccgctgttaattttagtgttaatcaattatcttggataattgttgatgcaagatcagacattatatccatatatataaatatgttatatagatatgtattaatatctttagccaaagacgataagtctaaaatcatcaacattttttgtccgggtcaatgtaacaactaacaactcctactgtagactagctagttggtcgtctgatcgtctctctgtttgttagcgatctcaacgggtacatgaacagatagttatgcattattgatactcaaattttcttagttgttatgtttttaatatgtaactagattttaatccgcggtacaccgcggagataatttatttttttaagttaatatatataaaaattttgcaaattatatctatttataaattatttttattttatagtttacaattgttattaagtaacgtccttccaaacccgttccgccaaacccgtcctgtaaaaaaagctcgcggtaccccgctaatttaaatttataattaaaataaatattttacgggattgcaattgtgttttagtttgtcaaacaaaattttgttttaaatagttgtcgaaatctagttcaaattttgaagaaataagatttagtgaattgataaaaaatgtatttagttgcgttttgctcattttaagggattgcaattgtcttttgggttgtcaaacattttttgttttaattagttgccgaaatttagtttaaattttggaaaaatctgcgtgatatatgggattggaatatatttagaatgtttttcgtttgttaatcaatttattgctaaaaaactaataattaaaagtcagtggcagcctttgtaaataagttccaactccaggatttatttcacaaaatggctgcaaaaatgtatatatagattcacccatttatttattattcatagtattatagtactatcttcgtgtctttttacttggtgtttaaagtttttgtacaccgattgaatcatttttaattttatttttttaaacatcaatttatctaattaaccaatagaaaaaattatctgtatattataaatcatcaaaaccaataaaaaaaaactaattaatattgcattaaaaattaaaaacatcatctaatttagaacattttttcctactataacattaacatcaactaaatacggagaaaacgttgtactgaggttcttgcattttaaaattttggaaactaagaatgttaaaaaaattatggttacaaatatatatatagtgttataattagtacttatcgtacttaataaaaaagatactaattagttgttgttatattattttctacaaaaataaaatcattcaactaaaatgttctatttgtcagtcgcttcacaaaactatgcatctaccataccagtgatcataattataaaactctgtttttgttttttgtctttacaaccacttaaatacgtcatagctatatatgcattattacaagttctcaaggtggcgcgcgaatgttttaattaaaatattatgtttttcttatgtatttcatctttaatcgaacatagaaaatgtgaaagatttggagcatagacacgaatcagttttttttttttacacgaatcaatattcatagggtaaataatagacaaacgccaacaaaaaaaaaaaagagaaattcacaacggattatcggctcaaattacaaaacaaaaaaaaaatacagagacaacagtatacgtgtaactttccgaatttttttttttttcatatcaaaaataaaagataggccaagataagaccattataaaatgtaaagaccgacccgaaataatactcatgtttaaattatcagcaaagagccaagagaggaaacatcacacattggtgacaaaaattcttaggaaaaccaatta

SEQ ID NO: 4968 - DNA, 3000 bp, Unknown; identical to SEQ ID NO: 4951
  misc_feature (1)..( 3000): cDNA_ID_2161213_gDNA_ID_1620748_Annot_ID_166699 3000 nt of promoter + ATG

SEQ ID NO: 4969 - DNA, 3000 bp, Unknown; identical to SEQ ID NO: 4960
  misc_feature (1)..( 3000): cDNA_ID_1826607_gDNA_ID_1620748_Annot_ID_49745 3000 nt of promoter + ATG

SEQ ID NO: 4970 - DNA, 3000 bp, Unknown; identical to SEQ ID NO: 4959
  misc_feature (1)..( 3000): cDNA_ID_1808979_gDNA_ID_1620748_Annot_ID_49746 3000 nt of promoter + ATG

SEQ ID NO: 4971 - DNA, 3000 bp, Unknown; identical to SEQ ID NO: 4967
  misc_feature (1)..( 3000): cDNA_ID_1807205_gDNA_ID_1620748_Annot_ID_49748 3000 nt of promoter + ATG

SEQ ID NO: 4972 - DNA, 3000 bp, Unknown; identical to SEQ ID NO: 4966
  misc_feature (1)..( 3000): cDNA_ID_2056946_gDNA_ID_1620748_Annot_ID_49749 3000 nt of promoter + ATG

SEQ ID NO: 4973 - DNA, 3000 bp, Unknown; identical to SEQ ID NO: 4965
  misc_feature (1)..( 3000): cDNA_ID_3074947_gDNA_ID_1620748_Annot_ID_49751 3000 nt of promoter + ATG

SEQ ID NO: 4974 - DNA, 3000 bp, Unknown
  misc_feature (1)..( 3000): cDNA_ID_1826842_gDNA_ID_1620751_Annot_ID_49807 3000 nt of promoter + ATG
acaggcgttagctcaagaaggcctttactatacccagcgatgcatgaaaatcccgagctccggtggggatttatacgcaaggtctactctataatcgcctttcagcttctagccaccgtcgctgtcgctgccacggtggtcaccgtccgtccaatcgctctgttcttcgccaccaccggacttggattagctctttacatagtcatcatcatcacacctctcataggtacaatcatcacgcacacttgttttacaaatcaaaagtttcaatctttttcgaagtttggtaataatctcaaaagctgaaacttggatttgtgtttctctccgatgtatagtgttgtgtccgttgtactattaccatcagaaacatccggtgaattacttgctcttggggattttcactttggctctggcttttgttgttggattaacatgtgccttcaccaatggtatgacttgatcaaccacttttggttacctgttaaggatccattaggcaacaaagttctgtttttgctattggggaactagctcttagcaaatttcatctctcagttttttctatgattctgattgtgtatatgtttaaagcttattctgtgttggacacagggaaagtgattctcgagtcagtgatcttgacatcggtagtggtgctttcgctcacattatatactttttgggctgctaggaaaggatatgactttaatttccttggacccttcttgtttggcgctctcaccgtgcttattttcttcgccttaatacaagtaaagctacttattccaatttccattggagagagtgagagttgtagtctttagcttatgaaatgtggtagttttggtatcattctttaggctaaacagttaacaacttcattttatattagacattagagagcacaagatttaagcgtatcggatatggtagcatttttacgagactaagaagtgagatttcacattagacattacagataagggatttagcctatgaaatgtgttagttttggcagcattgttttacacttagaaattagaaaggcttgatttgtcactgctaaaggcagtacagagaatgagagcttttaactttttgaatgtggtgctctttatagtaatctttaggctagaatttgacacttgatatcactataagcattgcataaaatgagaaacttgaaacttgattttaaatgtggtagctttttgattgcataaccaggtttcgtaacttaatttggggtatgttgtgcagattttgttcccattagggagggtatcagtgatgatctatggttgtttggtatcgataatattctgcggatacatagtttacgatacagacaatctgatcaagagacacacgtatgatgagtatatttgggcagcggtttcactctacctagacatcatcaacctcttcttgtatcttcttactgtgttgagagccttacagagatgatgattattaggatgaggtatttagcttatcggtctctttaaaaatatgtaaataagaaaataaaactgtacatttttgtggttacagttcacatgttcatgtgagtgattgtagagggaacacaggaactgtggatcatgtaataatttataacgaaaatgccaaggatgtgtcatgtgtgtaatgtcgcgaaagacaccacgagaagtgcaagtcttttgttttttctcataagaaaaaagggataattgaagctttttgttaataatatttatttcaaacttatgtagaccatattacattttatggttaaaaaaaataagagttataagggtttaggatttatggtttagtttttagagtttagtttaggtgtagaatttggagtttcggattttaaattttgacaattttagtaatggaaagcagattatttttacaatttgatataaaatgaagaatattttgatattgaaaacaaaaagagaagcaaaacatgggaagcctcgaagtgtgtgttgaggaaaagggaaacgaatgtttgaaattctggaatgctccaaatgcaaatggacaaaacaataatggtaacgagagtgatcaatccaaattggggaagtcttgtaagttgtaacagctcatgctgctacttcgttttaatcatgtatcttaattatttagtcttcgcataagtctaaatttgggaaaacaagtaggaaaataaataactagatttagaaactcaaattcctttgataattctttttctttctatgtgtgactggattttggactttgtggtcgcaatgcaaatgttatgatacattacggtcaaatgtatgtgtgtaaccactaagccaaggaggataatgggcaagtggtctctggcgtgagggttcgacccatattctttactatgatgaaaaaaggctcacgccatattctcgatcaacataacaatatcattgaattataactattattgtcaactggatttgtagaatttgggggcaatgcaaaatatgatgttacattacggtgaaatgtatgtgttgaccaatatacaaaaatgccacacaaaaaaatacatttaactgtgaaagtccctttaacattcttgtttttttttctatatgtaactggatatatatataggtcgcaatgcaaataggatgatgatacattacggtgaaatgtatgtgtagccaatacagaagagtggatccatattttctcaatgagcttaacaaaattatgggttacaagcatttctggattcgtacattgcaatattttcttatgaccatttcaaaataaagttaccatggttttgttctctagatatgaacaaaacaaagaccaataattttgtgggtccaatgaaaatgcaatcatgaatcacctatgttcccttcctatataaaccctatcttccttctctcttcctcatcacttccaaaatccaaatgagactttattagcttttgatcaatctcattaatccaaattaaatagttaaactagaagatg

SEQ ID NO: 4975 - DNA, 3000 bp, Unknown
  misc_feature (1)..( 3000): cDNA_ID_1826835_gDNA_ID_1620751_Annot_ID_49809 3000 nt of promoter + ATG
tctgcacaacataccccaaattaagttacgaaacctggttatgcaatcaaaaagctaccacatttaaaatcaagtttcaagtttctcattttatgcaatgcttatagtgatatcaagtgtcaaattctagcctaaagattactataaagagcaccacattcaaaaagttaaaagctctcattctctgtactgcctttagcagtgacaaatcaagcctttctaatttctaagtgtaaaacaatgctgccaaaactaacacatttcataggctaaatcccttatctgtaatgtctaatgtgaaatctcacttcttagtctcgtaaaaatgctaccatatccgatacgcttaaatcttgtgctctctaatgtctaatataaaatgaagttgttaactgtttagcctaaagaatgataccaaaactaccacatttcataagctaaagactacaactctcactctctccaatggaaattggaataagtagctttacttgtattaaggcgaagaaaataagcacggtgagagcgccaaacaagaagggtccaaggaaattaaagtcatatcctttcctagcagcccaaaaagtatataatgtgagcgaaagcaccactaccgatgtcaagatcactgactcgagaatcactttccctgtgtccaacacagaataagctttaaacatatacacaatcagaatcatagaaaaaactgagagatgaaatttgctaagagctagttccccaatagcaaaaacagaactttgttgcctaatggatccttaacaggtaaccaaaagtggttgatcaagtcataccattggtgaaggcacatgttaatccaacaacaaaagccagagccaaagtgaaaatccccaagagcaagtaattcaccggatgtttctgatggtaatagtacaacggacacaacactatacatcggagagaaacacaaatccaagtttcagcttttgagattattaccaaacttcgaaaaagattgaaacttttgatttgtaaaacaagtgtgcgtgatgattgtacctatgagaggtgtgatgatgatgactatgtaaagagctaatccaagtccggtggtggcgaagaacagagcgattggacggacggtgaccaccgtggcagcgacagcgacggtggctagaagctgaaaggcgattatagagtagaccttgcgtataaatccccaccggagctcgggattttcatgcatcgctgggtatagtaaaggccttcttgagctaacgcctgtttccacgtcatctttccggtacggtaagttccactgatacattatttacgatagcagagtctttataaagtgaaggaacgcgcgggaaaattcgaatcctttcgattactactgtatcacgatctacagagagagaaccacaagcgagagagaaaagttgatgcggtgctttgcttgagcttcttcggattttcctgggagaagcggtgatgccaagaggaagaagaaagttcatgaaagctctcggctaaaccgtagatgacgcgtggcaaccggagatgtcgcataagcggtgacaaggatttgatgtgtccaaagggaaagtgttcttttttttggctcaacacaatacttgcttaaccaaacttcacagtacatttcaaatagtaacgaaattttttatatatatatatatatatatatatttttattactatttaaaccgtacaatattttatctataattaatttgcatttttccaattagaacttaactaaaaaaaattagttgatcaatagtatcattcttgcatttaatatagagggttttcaatcaatatatgtaagatatttttaatcaattatttaaactgaaataattaaaagtaaaaattgatttgaaatttggataaaaagtaaacaaaaataaatttttagagaaattaatttgggatatattttcatcgttgataaataatattgaaactgaaattacttaaaatgatgcagttttaaattttaacgctagtttttataaactttttttttggttttggtggtgttaaatgattgagttgatagtttaacttgttaaatgaaaatataattataatgtagattcttgactaatcatagtttatatttttaatcgtaattgagacacaaaaggctgttatgcttgatcatttttgtatacattattgtagaatgtaaaaacttataattaatagaaaaaataataatttagttcaaaaaatagaatttttcacaatctcttgaagagtggcctaagaatccgatagtggtggttactgtttgtgttgagatatagcatatgagcaaaaacaattgaaaagaagaaaaactttcccttttaccaatgaaacaaaagagctctcagataattagaaaagtgtcaatttgtataacatttcccactctctctctcacttcgattcacttttgctcaaacttgacaacttgtccgaatctgtccatagcacacctctctctctgttttagggttttctcttcactggtgctttcttccttgtctcgctggttcaaagattcttactttttgatgtctaagacatcttagatttgttagactctctttaatttttctgggtttagccactagattatgttatactgctagaaggttagggtttggtcgagaaagctctaattttggtgatttatcctcttaatttcgcaaagggttatcttttcaatggcaattgcgagtgagttttgttattctcacttatgtatttagtaattgttccgtcagctgtacataagtggttggtttcatagagaaatgcttttagctttaggtgttgtaagatctcataataccaaagttcagatttttttgtataggattccattaagtagcccatctccacttagtttctggtctgggtagtgtgtaaccgacaagaaaatagtgttttgactatcctctggctatcctggagatctgggatttgtttcatctgttatgtcag

SEQ ID NO: 4976 - DNA, 3000 bp, Unknown
  misc_feature (1)..( 3000): cDNA_ID_3075075_gDNA_ID_1620751_Annot_ID_49810 3000 nt of promoter + ATG
catctccgaaaaataattggcttaaccgaaacttgattattcgttattcttttgtgggttttgatagtgttgatggatagtcggaaagagagagaggctatcacagagttatcccgagctatcgcctttaaagcagatcttcatcttcttcacttacgagcggctttccacgagcatatcggtgatgtcacgagtgcgttgcgggactgtcgtgcagcgctctcggtcgaccccaaccatcaggagatgctcgaactccatagccgtgttaatagccatgaaccttgaaccgcaaccacacacaaaagagcttcgatatgaaagtaaagtgtgaaaaattgtaatactaaaagaatcattgttggaaacttgtaatctcttgtaactcttttattctttgttgctgttttccatatatcgatttcgtattttgtccttccatcgtaaacttcaaatttctctgggcctaaaacgtaaacttgatttaaaacaataagtagatcgtttgagttcttggtgacaaacctaaagcattttcctttattattcttgcacctaataaagccccaatgagctatcttattttcaagctttaggtttgaaaatgtgaaaaagctttgggtttgtcaccaaagactcaaatgatttcgattacgttttatagaaggttgaatgtttgtactcttgttacattaacccatgacatacattacatatacatataatatataagagcttttactacaagacctattaacatgggcttagatgggcttctagagttgtagtgttaataacttgggcttaatgggtactataatactgatgactagttttctttgtcctcaaatgatctagtttcttccctgttttactttaaaatataaaattttccctttgtttgttacaagaattcgaatattcatgtgtttatttccttcgtatagcatatatattttcagaatatttcacaattcaaaaaagcctttatgaaaattttaaaagaagaatattcggtgttgcatgggttttagttacgctcgtgtctcataatggtcacacgttttgttttgttttggcctaaagggattccatcataaactgaattttactacagtagacacgcctatcccaatgaatcaaatggtacaagacacgtctaaggacaaaatcgacttaacaaaatgttcttcattggaatatttttctatagaaaaatttcaacagataaaaagttaaagaacggatgaaagagtgcgaaaaattcttgttggtggggtaagtattttctttttggacatgaacaattttcaaagggatatattaagaatattaatcaaaaacttataaaggttggaaaaaaaggaagaggaagatagcacaaagccacaaagtcatccacaagagtaaatcatatgaagacgaaacaaaattcaacaaagtgatatattccattttgatattcaaagccaaaatgcttttagggcattggttgctttgagtgtatgtatttttctcccctacaaatacaactctcttttatctttgtgagtgattcaaacttaagttaggaggcatgtaaggatgttgtataatcagaatttaaatttaaattagagaaatagacaataaagttgtttaattcgtctttagggcgaaatagctttaaacctaaatttgttttttttttgttagaatctttgtatgatgttccctttttacaatgagtttctatttccttacgttgttttaatttattttatagcttatgataagtttcattcaaatcagtgtgcctttttaagaattttgggtatattatgggaatgagagaaactataaggaaaaaaaaagataaagctttagcagccttggtagagaaagtaacatcactcaaattcataataacacacaagtaaaatataataatatttaaagacaaattcagaagaaagttatagctttttctacatgaaataaaatcgaactagaatccctagctaaagtaataaggaaatacaaatagaaaatagcacaattgaacaagtatacttatactcttggcaataagtcaaacaatttcatcttggatacttaattttccagtagatagtttcctattagatattcctcaatggttgtattactaaatttagttcttctattataagaacaacgtttattttggctaagtaattgtgtgtttagattctctttacaaacttaaacaaaacaaaaaaagtttccattattcaaaccccaataaattgaaaagaggcacacttttcttgatataaaagtgattattacttccatttaaggaaattaggcctgataagtctcatctcacaatattttccattaattgcacaaattgatagcttgctttttttctttctgggtctactcttcttttttagtagacaatttcaagtaaatgcttatagtctgaacctgtaatcatcactcttctctgtaatgcagaacacttaaaaaattacataaaataaagaataaaactgaggaataaaaaataaaaaacagttaaagatatatgaaaacaaagtcaaagtctcactttcaagcacaatctctttcctctgtggtatttatctgcacatagaaaaactaataaaaatgggaatcaaacagtctttgcatttattgtaagcacacacatatatgtgtacatgatagtgacattggagaataatccatcatggtcgtcttcttgcttttgagactatacatatacatgtgcattatatacactactcaagtaactaaattatttaattttgcatatatagccaaagaatgatgtctttctgtgtacacttacttcttactctctaggtacttgcagttccttattttaagagatcagaagaaaccaaagtttggatctttttatagttttcttccaagttttgtttttgttttttcttttgttggagtttccttcttcatatagctataaccatatagctagccatggat

SEQ ID NO: 4977 - DNA, 3000 bp, Unknown
  misc_feature (1)..( 3000): cDNA_ID_1826829_gDNA_ID_1620751_Annot_ID_49811 3000 nt of promoter + ATG
atagagcgttttgtgatgcattagcagaagaaagtgcaagactccactcaacttcttcctccaatctcacaaaccctaaccctaatttccaaggccatcattttatgttcaataaatcttcctccttgctcttcacgtcatcacctcttttcatcgaaccatcactttccaccgccgctctttcaacgcctccaacggcagctctttccgcgacggctcttctccaaaaggccacctctctcagctccactactttcggcggcggaggacagactcgatccattggtcatcaccgacatttgacgaacgtcaacgagtttcttggtgttgaccgagtcatgatgacgtcagcttcttcgtctgagtacgaccagttagttgttgatgggtttacgtccacgtggcagaaagctgaccgtttgaccagagactttcttggactcacgggtcatgggggacacgttagcgtcagacctggggatatgctagagtacgcgggtggagtggcgtttcctatgtcggcgtacgataccgaatctcatgatcactcgtttcagaaggcttacgatcatctgggattctcaggggcccatcgtatgtaaaagggcaaaactggaatcttgttactttctttattttgtttctctcaaattacttaaataccctcgtggacaaaaaaaaagacacagagcatttctttctggggattattaattttctaaaattgttgctagctttgaatttttgtctcgtttacgttggattttcttgtaaaaatatattcgtacaaggaagtaaggaacatttagaatttccttagtcaatattatgtccgttaaaaaacctaaaaaagtttttacttggacattacatgaaaaatcaaaaataatatgattttccttaaaaaatggatcggtaaaagtcccacaaaactgcaacgtctctagggattgacgaatgtgtcctctcaaagccagcttatttgactgtgatagatactatacaagtatacaacttctttcatcatatccacgttacatgtatacatcatgtaatatgcacttttgtcttctgaagatatatattgccaatcttatacacattgagaaatacatattcatcgtaactcaaatttggcaataggtgtcgacaaacatatttattgttgttctgattgttgttaacaagtttctatcgtaatcactaatcagtgacaaggagcttatactattgatggtcatttatgttgccactatggcattagtaacgaacactaacatgtatgtatcattttcatactgtgatgaatagtcgctataccaatcacaattaatttagtgacaaatcattacaatcttatgtttttttttaatagacggtttaattacgtaccacaaaatcaaaaggaactgaaaacacataaagatatgagggtgaggaggaatcaaataaaaaagatattatatagaaaactacgaggaataatataaagtagaaaagattaaagaaacgaattaggtcaaagagcttgttgatgaggacacgcatgaacatgcgaacactttaaaaccaaaaaacgaaaacaaaaacaagaacatgcgaccactaaaaagttaaaaagatagattaaaagaacattgttaatggtatcaatatagtttccttttatgtttttacgagctcttatagtccccattctatacaactttgttttgctttccttttttcttttggcttgtgattggaaattgaaggttggtataaaatgtacaattcagacatcttatatatctccagagtatcctttggtttggctgatatataaatgatttgcaatactgttatgatcattgtgtattgaaacttaggatgtgattggtaatcgtgggtttaataaagcaaaaatgaaaaaaatggaaaataaagaaaataaatatttaaaaatcagctcaaactaagtattctttggtttggctgatattagtatagtgagatgatgaattaatttaaaatatcatctcttttctgtttttttctaaagtcatcataaactattctcatgtagatttgaaaccagaagataattaacacaacacaaattctattacaaactactagatacattctaaaacattctacattagagaaaaatagttggtatataacactcaagcagtcaagctatttcaaaataattggtacaacaacatccatgattaaaaaataacaactatttgggttcctaaattttatctttaacaatcaagctatttcgaaattttatgcaagtaatttcttaatagttaatagtaatataataattacgtctagatggaccccaatgataatttaaagacttccgtggttataatatgaaatagaaatatttcaggggcaataatgaaaacaattaggaacttaattataattagttttgttttaagtatctattttagggaaattaaataaggaaaatcgcgtgagtgagggagaaagtgagacgactttgactatgtttgaagcgagaaacaaggcgcggagacacgaagacgatgatgatgatgaagaacacagcacaaaaaccaaacgacgaaattgatatttatttttttatttcgttaatcgatcaatgaaatagttttcttcagcgtaaatcgatctctaaatctcgattttctgcgttctcctttcaaaatctgtttcagtattcttctcagattatcaaggaggaaggagaaatgaacttgttgttggtggtgtgaatctcgctaatcgcaattttggatcttagattttgttcttgctaccaaaccctaatctcacacattgcaccagcatacatagttttgatgtctgggttgttgttcgtctttattgattccgtttccttaatcaaaagaaacgggttgatttctgagccccgattcggatccgggtcgtgtccgaccgattcaggagtggttatcggatgaatgaatctggaatcgaaactgtggaaca

SEQ ID NO: 4978 - DNA, 3000 bp, Unknown
  misc_feature (1)..( 3000): cDNA_ID_1826825_gDNA_ID_1620751_Annot_ID_49812 3000 nt of promoter + ATG
tttttgtggtaaatttagatttttaaaaaactccatatattttttttttataatttaggcttgtctattgtaaatttgtaatatagcttagtgatttatttgtttagcttctggtgacattttataaatttttaatgaccagtataatatagtatttttttataaattaaaatataatctaatgttttatgtcaacttcgttgttcattgaataaatcaaactttgaagaataattaaataacaatgtttgcaaaaactgttacgttttttcatgtaaacattagtggacgttatacaatagatatttaaattataaaaactattcaaagaatattgtaaagaaataaaacagaaatgtgtaagaaaaaatgtttattttattgtacgtaataaaaaaagagaatatacttgtgtgggtggacctaaatgcaaataggcaaagtaccgacaaaaaaagaagaatcagaaagtgaaaaagagagcgagcgatgaacagtatcttctccattgacgatttctccgatcctttctgggaaactcctccgattcctctcaatcccgactcttctaagcctgttacggcggatgaagttagccagagtcaaccggaatggactttcgagatgtttctcgaagagatttcttcgtcggcggtgagctctgagccacttggtaacaacaacaacgcgatcgtcggtgtttcttcggcgcaatctcttccttctgtttccggacagaatgatttcgaggatgatagtcgatttcgtgatcgcgattcgggaaatttggattgtgctgctcccatgacgacgaagacggtgattgttgattccgatgattatcgtcgtgttcttaagaacaagcttgagactgagtgcgctactgttgtttctcttcgggtgtgttgttaatcttctatttttcttatctatatgtgtaatttgtgcgttttgatctaaatctgaagctctgatgttctcttcttaggttgggtctgtgaagcctgaagattcgactagttctccagaaactcaacttcaaccagttcaatccagtcctcttactcaaggtaagagtctcttcttagtttcaccaggatagatgagcgatgataaacctgcagattcgtttctctgttctgtgtttgttaatttagatgcctaggttaaggaattagaaatagaaaatggtacttttgttggatcaagcgcctagttttatccgtcaagtttcaatctttttgtgactgactttctcattgaaattaaactgctttctggaagaacaataagcttgggattgagatgagttctggtggttagttcaatatatgggaaatcattatttcagcgctcgtctttctctttcagatatctcttctgagtcttagacatagtaagttttaatcgtggtaggttctttgatgaccccaggagaacttggtgttacttcttccttaccagctgaggtgaaaaaaactggtgtatcaatgaagcaggttactagtggatcgtcgagagaatattctgatgacgaggaccttgatgaagagaatgaaaccaccggttccttgaagccagaggacgttaaaaaatctagaaggtaatcattactttttctccaatttcttgtcgtttgaagattacatttatagagccttgttcttccttttaatatttgtaggatgctgtcaaatcgtgagtcagctaggcgatctagaaggagaaagcaggagcaaacaagtgacctcgaaacacaggttttgtgttgtatcctctcaacacctcatttttgtgttgaaggatattaatgagacctaatttgtattttgataggttaatgatctaaaaggtgagcattcatcacttcttaaacaactgagcaacatgaatcacaagtatgacgaggctgctgttggcaatagaatactaaaggctgacattgagacattaagagctaaggtaagaagacttaagtattatcctcctctcctttttctgaactaccctttttttgtatacagttttagtaactcccatgttatgttaaggtgaaaatggcggaagaaaccgtgaagagagtaacaggaatgaatccgatgcttctcggaagatcaagtggacataacaacaacaacagaatgccaataactggtaacaacaggatggattcttctagcattattccagcttatcaaccacactcaaacctaaaccatatgtcaaaccaaaacatcgggatcccaaccattctacctccaagactcggaaacaatttcgctgctcctccatcccaaaccagctctcccttgcagagaattagaaatgggcaaaatcaccatgttactccaagcgccaacccgtatggctggaataccgaacctcagaacgattcagcatggtaagctaaaacatggctctttcttttaagaccattgaacaatttaaaaccatttgaagtactatgatccctgtttatacatatcagattcctgtctcccctttttttgctcattttacaggccgaaaaaatgcgtggactgatcaaacaagaagcgggtttcgcactatattaatgtctatgcatctgtaatttgtaagtgttattaagttacgaatcatgagaaaacatcttgtgaaaatacagtctcatggcttatatatatatataagctctgtcttataacattacaagattcttatttgagaatcgtctttctatttatagctaataacagagtgtatatctgtttttatccaattttaaaaaagatagctcacatggctttactaatttcccctatcattaaattccgacaacctcggcgatttccatggtagatcgatcaagcattcacattttctcgtcagaaaacacaaaaaaaaaaaacagaggagaaaaagagacgacgacaaacaagtgaaagaaaaaagtcgtcgttcttccaatttttttctcctctctcttcctctgtttaacggcgtacgtaagtcaaaatg

SEQ ID NO: 4979 - DNA, 3000 bp, Unknown
  misc_feature (1)..( 3000): cDNA_ID_1826817_gDNA_ID_1620751_Annot_ID_49816 3000 nt of promoter + ATG
tgtttctttaaagcttaagtgagatgtgactgtgtctgattataagcagcgctttgagtatttaaagttcaaatctttcactttttttttttctttgtgttgctttagtgcaaatttgtggatgtatgatgaatcattttggtgaattgcagagctgatgttgttagggtttatatcgctgttactgacggtattccaagggctcatttccaaattctgtgtgaaagaaaatgtgcttatgcatatgcttccatgttctctcgattcaagacgagaagctggggcaagtgaacataaaaacgttacagcaaaagaacattttcagacttttttacctattgttggaaccactaggcgtctacttgctgaacatgctgctgtgcaagttggttactgtagcgaaaaggtaaattcaaataccttcagggcctcactatagtcatattaggtgttgctcttgctattacttgattgaatcagtacttacttctctccctcttgttttcagggtaaagtaccattgctttcgcttgaggcattgcaccatctacatattttcatcttcgtcctcgccatatcccatgtgacattctgtgtccttaccgtgatttttggaagcacaagggtgagcacaaaccaatatagaaattttctacattcaatgtatatataaattaagttctcaggtgtgaaacctctggtttatctatgttaatgcagattcaccaatggaagaaatgggaggattcgatcgcagatgagaagtttgaccccgaaacaggtactaaatcgattatatgctagcggaacattatgcatattgtttgattatttattgtgctttgttgcagctctcaggaaaagaagggtcactcatgtacacaaccatgcttttattaaagagcattttcttggtattggcaaagattcagtcatcctcggatggacggtatggtatctttaaattacattactagttttatattggttatttgtcctttggaactacccgatgttgagagtatgttgtttgcatgacagcaatcctttctcaagcaattctatgattctgtgacgaaatcagattacgtgactttacgtcttggtttcattatggtaaaatcttgattacttacaaaaattgagatttggtaatcaagaacatttgctttgatcttttagtctaacaatctatatggtttaaatacagacacattgtaagggaaaccccaagcttaatttccacaagtatatgatgcgcgctctagaggatgatttcaaacaagttgttggtattagttggtatctttggatctttgtcgtcatctttttgctgctaaatgttaacggtatgcttttcacaaaactcaaatctttttcttatgtctagtttcaatagaaatgaaaagaaattgttattacgtttcctttgatatcgaagctacaattatgtatcttgcaggatggcacacatatttctggatagcatttattccctttgctgtgagtcatttgtttttgtcctcattttacttcgttggaatgtgcttaaatcttctttcagttgagctgaatttgttttttttaatgtaaaatttgaagttgcttcttgctgtgggaacaaagttggagcatgtgattgcacagttagctcatgaagttgcagagaaacatgtagccattgaaggagacttagtggtgaaaccctcagatgagcatttctggttcagcaaacctcaaattgttctctacttgatccattttatcctcttccagaatgcttttgagattgcgtttttcttttggatttgggtaagtctggttctttaagaaaagaaaaaacaaaattttaagattcacctaaaatggttaagactgatgactttattttaggttacatacggcttcgactcgtgcattatgggacaggtgagatacattgttccaagattggttatcgggtaagcataaagattcgacattttttcttttgttctttctcatattgtttcgttgagtataactcattgtagactggtatctttcttcttctctttagggtcttcattcaagtgctttgcagttacagtacactgcctctttacgccatcgtctcacaggtaacaagctaatttttactaaaaagcttgagaatcttttggtttggttttttggattctttctgaaaagttgacccttttcttatattacaacagatgggaagtagcttcaagaaagctatattcgaggagaatgtgcaggttggtcttgttggttgggcacagaaagtgaaacaaaagagagacctaaaagctgcagctagtaatggagacgaaggaagctctcaggctggtcctggtcctgattctggttctggttctgctcctgctgctggtcctggtgcaggttttgcaggaattcagctcagcagagtaacaagaaacaacgcaggggacacaaacaatgagattacacctgatcataacaactgagcagagatattatcttttccatttagaggatcatcatcagattttagcttcaaggtccggttttgtggtttatacataagttatagtgacttgatttttttgttttgttacaaagttaccatctttggattagaattgggaaattgaatctgtttgtatattgtattatttggaacattgtggatgcccatggatatgtttctgttcaattattttggttttgggtaatgaaatttgaaaccaacgaaaaaccaaaaatattcttcagttggaatttggtttcttacaatgtgttggaaaaagtacatttaaatttcaagactttggatttgttgtacagtaagcaatcaaatatgatttaggttaaaccggttaattttactttggtttggatgattaaaccggctccaaattaatattccttttatctctctgctttttacttttgtacgagagttaaagccacactagtcactcgcgctagtctcttcttcgaacgcttgcaatg

SEQ ID NO: 4980 - DNA, 3000 bp, Unknown
  misc_feature (1)..( 3000): cDNA_ID_1826813_gDNA_ID_1620751_Annot_ID_49817 3000 nt of promoter + ATG
tctaatagcttctggttctttccgttctcatatatctagcagatccactacctatctaccatgacgccaagtagtgacggtactgtccgtcgtacttattgctctctatttttagaacatgacgaatgaattgtagttatctattattgtatccctcctaattctaattaatgtattcaactattagaatgtattgaaaaaatcgcttatttttctgtttgtaagttaaattttcctatatcacttattgagatgtttacataattcaaaaacgtcacataattatcttgcgagatataatcaaattcgagatatgcgctaagcaaacaagctccaaataaagtatttcaaattcaaaagagacaatttagtttcctagaaaatgttttctctcttctatcacaattcaggttgattcccaagcttgtcgatatggaagattctgtttgctagcttatcaatctcagcgactcctctctctaatttgagtctacaccaacaaaaactaaagggttcacatcattatgcctaaatggagctcatttataaaggaacaacttgtgcttaaggaggtaattctcagaccaaacacgaacatccaacataagaagtaataaaagctaagaaaaacagttatttacaaaaatcaataaataaaacaagttttgttttggatgaaaaaaaaaaaaaaaaaaaaacaagttttgttttgataatatattaacacaaaaaaaatcagttaatcaacttaatagtttaatatattaattattatccctttaagaatttttttttctaatgcccttttcatgatgccctttttcaactttacccttttgttttatccaattttatttctaccctctttaaatttttaatgaccattttacccttatttggaaattgttttaggttaacaaaatgaaaaattaatattttttcgccaaaaatattccaaaataaatttcccgccaaaatttgttttcaaacatatttttcccgccaattttttttttttggcgggaaatagatttacaagggattttaaaagagttttaaaagatttacaagggattttataggggttttataagatttacaagggattttaaaagggtaatttacaatagattttaaagggatttcaaaaatttacaaaagtcttttaaagatttttaaaggctttaaaattgttttaaaaaattttaaaatatttacaagggattttaaaagggttttacaatatttacaatggattttaaagggctttaaaagatttacaaaggatttgtaaagatttttaaagagtttaaaagtattttgaaagatttacaagggattttaaaaccttttaaaattacttgtaaattttttaaaacccttttaaaatccattgtaaatcttttcaaactcttttaaaatcttttgtaaatcttttaaaacctttttaaaatctcttgtaaatcttttaaaacccttttaaaattctttgtaaatctatttgccgccaaaaaatatttacaaggatttttaaaatcatttttttggctgaggaaaaatttgttacgaaaaaaatttttgccgggaatgtttttttttgtcgggaaaaaagtttggcagaaacttttctttttggcgggaaaaaaaaaatttggcgccaaaaaattggcgggaaaagttcagttttcaattacatgtttctattagatgagggtaatttggtcattttgttcaagagaaggggtatttttaaaaatggacaacataaaagggtattgttgcaaaagagtagtaaaaaaagtgtaattttataaatctcccttattttaatatacaaacaaatattatttttacttgtgtataattttgtcttttgataattttcattttttgataatgttaacaattttctagttttgttttaaatatattgtttaatttagatttgacatgtaatatatataaacagatattattttttacttgtataaatctaatattttaattgacacatgttccggtcattttaaaaaccaaactttatataataagataaaaatgataaatcttattctatttataaatacattttattaatttataaagaatacaacacatatacattcgttctaaccgtatcaattttaaagacacaaatacaaactaaaaccaaattaagttcaaccgaaccaaacgagataaaccgatctattctaaaaaaaaaaaaaaatacttcctttgtagccttttgattgttcgagcatcatcaagtttacattgttcgagcattatccaatccagtataaaatattattcacaccggagaacggtacaattcttcaataaaagatgagtcgacagcgaccgctctaatcagtggaactctgaagtttctgtatttttatctttcttacatgatctcattttttttattttttattttttcacaatcttacatgatctcctagtatcacttaattatatacaacgaaacatgtgaactggaacatagttgatagaaaggaaaaagagggaaaatgtgatttgattatagatttaactcattaacaatgtgtgattgtgtgtggatgctttaagtaaacacggaatagaaacgaataatatggaaactggaaagttgaaaacgcgtttcctaatttgtctcacagatttttaatactaaaaaaaagtggaatatataaactctataataaggtcgtaatcaaattacatgaagataatagagatcatttaccataattaatctaatcaaaagcaattagtattattgacaatgacaacaaatcatcaacacaaagaggaaaataaataaataaaaaaactcagaagaatctgtctcactgatttcttcatcttcttctcttcctggacccgacattccagtgttggtacataaaagactcttcctttgtctgttttttgttcccagattcatctttacttattgactaaattctctctggtgtgagaagtaaaatg

SEQ ID NO: 4981 - DNA, 3000 bp, Unknown
  misc_feature (1)..( 3000): cDNA_ID_1826805_gDNA_ID_1620751_Annot_ID_49820 3000 nt of promoter + ATG
ctatgagtaaaatgtcactaaacaacaaaatgagaggtaaaataagtattattcgacacataaaccaaaacttgcctctgtttcagaagcaattgactctgcgaatcaatttgcgaactgttacgattttgtttcttcatagcttggattttcgcaaataacttggtccaccttgataacaaaccttttgccctgtttgatatgtctgatcttcaaatcagatgatgaaatcgaataaatcacaacaagaactttggcattgatgaaagctacgcagcatttaggtttttcagaaattacacctgatatcctatagaaacgaagtccattaacgctttgtaatatggcagacatattttcaggagatgctttgtggagaggtaaatgacaaagaacctgcgtgttaaatgtcaattatccataataaaacaatctgcatatttttacagccatccagctgcaagtaaattaatctcgtaccttcaggataagaagtaagacacttgtttgctcttcactagcagcttgacttaaccatgttgtaagtatcaaaacccctccttttgataaaaacctgtggcacatatagaaaatgactgtcaagacgggaatataataacaataaaataaaataagacagtgggtgaaagagaacccccaactagtaccagatcagcacagaagcatcttgtatctgcatgatccactccattagtttcacctggcctgaaaatgtttcctctttacgcagcagagaaaatatattctcaacaaagtatttgtctgaatcgctgatgtcaggtggaatatcttcaggtggaataagtgccactgtttcaccttcaccccagcttatagaacatgcctccggatgtatagagttcaagggaacgggttcaacatgatttgtggcattgttattttccggaacaccatcatcttgtaaagcatgcgtattggacataactactttctcccttgaaagcctcacctgtttcctcactcttgtcttttgagtaacaaaaaattctcgaacctgccattgaagaaaataataaagagacaaaccaaagtctcatgagtacctcaacatgacagatctaaactgacatggaattctaaaagcatggcaaaaaagagtacatatcatgtagaagaacaatacctgggcgactgtgatgccaaataaagcacttatctcccgagattccctcttactaatagcatctttaattgcgaaaactgcttgtagatacttaacagccttaggattcaacaagtctcttggccgctttcctgaaatatttacaaattcatcagatactaggcatcgagcacgtaaaagttgggtatgcctttaatgaacctagagagcaacaatgaattgaaacattctctgtgatatacgtaattatgccaaaagatctcacgaatcctaagatgactcaccaattttaatggacaaagcaccagcagcctgaaacaacaaaaaaattaaacagattaatgtctttaacagagatgattacttgatcagagaaatgacatataaacagttgaagcatcaccattacagttcacagaagaaacggagaggtcgagctatatgaatttataccaaaaacacctctaatttttgctagactcaatacccttcaaagaatttattccaaaatccgaatgacctgtccctctcagctttgcccatatcaccataccccaataaaacacgaactttagataccaaaaaacatagaaacaataacccaccatttcttgcgcaaggggattaacgccggtaagtttgcattgcgcaacgacgacatcttggagctgatcgatctggctatgaaaaagcaccttctgcgaatccaatagctccattaaagactccaccgagctcccgatttctatctcctccttgaacgcgtccatggccgccgacggaaaactcgaagaccaatacgcaaaccgaattcaaaatgtgcatcagggaattaaactgaaacgtaggactcagtgattcgaatgtgttgaaacgataaattcaatgaacatggttacctaatttcggattgtcaaaaagccgattcgggttagggtttgagtaaggaaggcaaaataaaggggcataaaagtaaataagttactttacaaagaaaaattataaaacgcagcgtcttgatgtagatctctgaaaaggtaagaaattaaatttgtttaatattatactaatatattagttgacataaaataaaaataattaaatctataagacctgaaaataatagaatagaagagaacgagtttgtttcctgagatatcttttcaccgcccttctcataggtctcgtctctctttctctctattttacgcttttttcctgaacgattcttagggttttgattctctctctctctcgcttctttttcgatcgcagcagctctcgccgatcctgtgtaatcgggaatcggtaatcgtcagggtctgtttggggtacggcgacgcgattttctgattattagggtttaagatctcgaggtatcactatttctgtcggattctcgcttgttttgttccatacgacagttgatttttttatcattctgttgattgttcgtctttctaggtttttatttgaatttttgtgggatcgagattgttagggttacgtcggagtctctggattgcgtttctactgtgtaatttcgtgtttatctcatggattgattgtttctcgagtatattctgatgcttatgtcctcgtttgcgcacaatctgatagtttgggtttgatttgggtgataatactcgtttcgcattcgataatgtgggtgttaacgtgttattataacctctgaagaatgataaatattgttgactctctcgcttcagtcatttcattgtgttgcttaatactgctgttctaaattttggttttctccttgttctttggttaacttaggttgaggagagcttgaaaagttgtttgtcaacatg

SEQ ID NO: 4982 - DNA, 3000 bp, Unknown
  misc_feature (1)..( 3000): cDNA_ID_1826801_gDNA_ID_1620751_Annot_ID_49821 3000 nt of promoter + ATG
agagttatccgaatataacaagtaagataatatgaacctgattagtagccgtgtcttcggcctgttggacaagagcgttaccctctgctgtgacatgctgtgaacgaataacaagttacagttaatgtcatacagtaattaagagactgcaagtagaccatgaagaaaagactatccatttgctaatcataaacaaaagaatgaagataggtaataaacctgcttaaagatgtttgcaacaggttccaagcctcgcaaaattttatggtaaagcctgtacatcctggagagatcatccacctgaaagtagacaaatataaccattaaagaaataattaagtcactaactactcaacaataaaaacaaaaatacttgctctaccttgtcatctcttagcaatgcacggcaccctgagtgttctttttctagaagctgacttgcaaacacaaccagcaattcatgttgtactttctgcatacaaaagattactatacaagtcaaacagatatcaatctttaaaatcaagtatgcctggactacgcatttaaaaagagtctggaaagtatctcaatacaaataacaaaattcaaaatcaaggcttatgcaagatctatggtttcttcatcaaacctacaagtacaggcataattacatagtgcataataaccaacctcaaccagctttggctcactgcttgagtgtaggtagtgagccactctctccctctccttctttagacattcttcagactgtaacatgaaagcacagaagttaataaataatttcaactattgtgaaataaaaacaaattttagaaaatgatatcacgagtcatgccttcaacatgtaatcagggcaagaatcttcctgaatccagcttgatgccttgcgagaataatacgaagaagtatcttgaagcatgaagctttcaaaatcttcttcatacctctccatctgccccattccaatctctacatagatatctaatacgtttttcagcagggccctatcaatctgctcgccctcccgttctttatcaacctgacagaagaacaggtcatgttagaccttgaatcaggcaaaagccagagttggatgtaactgcacaacaatattgacgccatacttacaagagctattacagcttgtttgaccttagaatgtagctcattataaacctgaagcgaacagaatcaaggaaaagttaaaaatatttcaatacaactgaaagctataaagccacaggaatgaatgccataccaggtcacggaagcatgtcaggccaacttcattcagtggtggaagtgatctccgagcaatgaagtaacggtcaaggtagtagaagaagcgggatagccatctgaccattactttatggtttgaccatcttttaaatagctcccgcagcataaactcatcatgcttctccctcaacgcaggcaaaacctaaccacagacaacaagagagcaaacattcaaaaccgtttgaatcaacttaaaaccaagaggggacaggacttcttgacatatgaaaccatgcacaaaagtggcatcttaaaattcagaggtagtaaaaacgagaagtttataagaaagaaactaaatatcaatcagactcactgttgagttaatatattcctcaaatgcttcccgatacttgtcataaagctgctgtgagtaatcatgaggaggtttctgggtgcacatgttgtagatagtcctgagaatcaaataaattccccatcataagtatcaggacaaacagccaaaccgctatataaggtaataaacaagtataaaacctacgtataaagcatcatatattgctcagagtcaaatgctggctcattcaatccttccagaatccgtttcagcttagtaattccagtctgcatatagtcccatccttgctccaagtcaatagtcttgcgctccatgttgacaaacaacttttcaagctctcctcaacctaagttaaccaaagaacaaggagaaaaccaaaatttagaacagcagtattaagcaacacaatgaaatgactgaagcgagagagtcaacaatatttatcattcttcagaggttataataacacgttaacacccacattatcgaatgcgaaacgagtattatcacccaaatcaaacccaaactatcagattgtgcgcaaacgaggacataagcatcagaatatactcgagaaacaatcaatccatgagataaacacgaaattacacagtagaaacgcaatccagagactccgacgtaaccctaacaatctcgatcccacaaaaattcaaataaaaacctagaaagacgaacaatcaacagaatgataaaaaaatcaactgtcgtatggaacaaaacaagcgagaatccgacagaaatagtgatacctcgagatcttaaaccctaataatcagaaaatcgcgtcgccgtaccccaaacagaccctgacgattaccgattcccgattacacaggatcggcgagagctgctgcgatcgaaaaagaagcgagagagagagagaatcaaaaccctaagaatcgttcaggaaaaaagcgtaaaatagagagaaagagagacgagacctatgagaagggcggtgaaaagatatctcaggaaacaaactcgttctcttctattctattattttcaggtcttatagatttaattatttttattttatgtcaactaatatattagtataatattaaacaaatttaatttcttaccttttcagagatctacatcaagacgctgcgttttataatttttctttgtaaagtaacttatttacttttatgcccctttattttgccttccttactcaaaccctaacccgaatcggctttttgacaatccgaaattaggtaaccatgttcattgaatttatcgtttcaacacattcgaatcactgagtcctacgtttcagtttaattccctgatgcacattttgaattcggtttgcgtattggtcttcgagttttccgtcggcggcc

SEQ ID NO: 4983 - DNA, 3000 bp, Unknown
  misc_feature (1)..( 3000): cDNA_ID_1826797_gDNA_ID_1620751_Annot_ID_49822 3000 nt of promoter + ATG
taatttagccggccaagatatggtaaaactgcttgatgtgattaagactggtgcaccaaactcaagcagtagctcaaataaacaggttgaagaaagggtcgaagtttcccttccatctcccactccatcaactaatcctggaatggtgcgttacttgaaacctattcaccccaaattcctcggacatatccaaaaccctattaatagatcatgttgccaaattgaatctcacgacatatagaaaaaaggaaagaactacaacaggctctagctaacaccaaactggattatgaattccagctgttagatctaacctgatgagtacaatgcccccattagaagatgttaatgtctgtttcttattctcttactgagttaagtgtattgttccaattttacagagtggatggggacaagaagggattcggaatccattttcaaggcaaaaccaagttggtactgcagttgctagatcgggtacacagcttcgtgttggttcaatgcaatggcatcaaacaaatgaacaatcaatcccacgacatgctccatcagcatacagtaactcgatcacattggctcacacagaaagagaacagcaacaatatatgcaaccaaaacttcatcacaatttacattttcaacaacaacaacaacaaccaatctcaacaacctcgtatgcagttagggaaccagtaggacaaatgggaacaggtacatcgagttcatggaggagtcagcagagtcagaacagttactactcacatcaagaaaacgagattgcatcggcttcacaagttacttcataccaagggaatagccagtacatgagtagcaatccaggatatgaatcatggagtcctgataatagcccaagtaggaaccagcttaacatgaggggacaacaacaacaagcatcaaggaaacatgattcttctactcatccatattggaaccaaaacaaaagatggcgttaaaccatatataagactatggttctttggtcctcaatatttgcttgtcatggttgaattagcattatactctgttcagacacagattttcatttttaactcacaacagattcatcagagataataaactaaaagaaagaatgaatggataaagttattactgtctcaattggcttcaaggcttttcaaaaacaagtcttgtcttcatcattattcgactaattccaaatctgattcaatttagtaacagtaacactggctaaactggactgcttcggtaattggagattttggtatacaatatccatttctgtgaagattgatagaatgtggatactgttcttattcgtacacaatttttgtttacaaagggaacactatatactgttcctattggtactctcagtttaaaccgatatcttaaccggttgggatggataaccgggtttacttttgataactaaaagaacccagcatatagtttaaggccacaatctcaacttgcaaatacagagttaacagccgtttaattatcgttcttatgatttgttctttgttaaatgataggtcaaaaattatttatgtcttttctaatttcataactgtgaatgtttattgaatccacattactcgtcaccgaactaagtaagcagtctctaaattaagacggtgatagacagtgctcttcataaatcgttcataagtcgttcaaacttgtattagccaaatcattcaaaaaacataattaagagatccaaaaacagaagattaaaattaagaataacagattaatgagagaaagagccaattagtcagataattgtagtctgagttttggtcgacagaataaattaatatatccgaaaaatcgttatcatcattccatcggctctttctcatcgtcatcaatcttaaacagtaaaaaccaaaccctaattttcccgagaaaactgaattgtgaatacaaataagcagtgaaggctcagaaggatccattggtaaattttctaatcagagaattactcataaaataggtagtttttaatcatcactgccttcactctaaaccctaatctagccgaaatcgaattgaaaacaaaaatggattcaaatcttcagagaaaatcaaaaattgaaaaccatcgaaccaaatcaagcaacgaaaaaagaagagaaaaaccgaaacatgaaagaactactttgtggaataatcgatcattagaatgagttgattgagaaaagtaatcacaggcggcaatatataagacaatggaggaagctagggtttacgttttcgaaagaatcgggtcggtcccgttaacccgatgagtttgggctttgtgaattacatcaaactcggcccattgagtatctagtttcgggtttgacccgttatacatgatgccacgtagaccgagacgaacaaaaaaagccagagaagaagaagtttcagagaaattttccgggaaaaggcgcaagaaaatatcagacaaaaaccgattattattctgggtccattttttcaaaggtttattaaaaacgcaaccgttttgtcaaaagcgataatgagaaaacttcttcgacgactctgggtttctcgggaaacaagtactcagagagagagagatatttcgagaaaagaagaaacactcctccgatccatacgaaataagataaaggggaaaccaaaccctaaatcgagcttctccttatcggaaatgtcgcacttccaccacttttgactcctccgttcatcggcggcgatctgaatcaccgtcaatctgatttcgtttctgtgaaggtatacgcatttgatttctactactgagagctgatttgagttcttttttaaaaatcattagctaagttagtttcagagctcttcttcgaatatctggaagagagacgagtttaggtcgatcgattttgaaaatggtatagagcttcgtttatttgtgagaacgaccaagctttttctattgtgatgttatggtataatgatatgcatagaattctacgtgaaccagga

SEQ ID NO: 4984 - DNA, 3000 bp, Unknown
  misc_feature (1)..( 3000): cDNA_ID_1808696_gDNA_ID_1620751_Annot_ID_166807 3000 nt of promoter + ATG
gggcccttacttaatcgtgaggcccaacatttaacctagtctgaatgtttcatttgctaaaaactttgtttgttgctactgggcccaaaggtttgaaaggccagttcaattgaaatatcgcataatcaaattgaatttaatctgcaagaccaattcgttaatcaataagagcatactaggatttcaaaccaaatgattcagttcaacgatgttttaaattatcatctagaaattataaaatgtgtaataaagcattttttttttttttaaacttgacaaaatctctaaatgtaaagtctaatataaaccttaaaatctaaaaactaattatgcttgtttttgagaaatttttaaaaaattgtgaaaaagaaaagtaatgaaaaaaatattgagagtgagtgattggaggaaaataacacaacgcaacaatctaacaaagagagaccttatcatcatcagcatcaccttaacccatataacattcctcttcgaaaatgccaacaacaaatttcatagagaagcagaaatggcgaaatcactcctttgttcatcaaccttaaaccctttcttctccaccactctctcctcttcgaagaagaaccaaattgcatactcgggaaacagcaagaaccagacatcgtcgtctctgttatggaaaagaagggaactgtcgcttggatttatgagcagcttagttgcgattggtctcgtgagtaatgacagaagaagacacgacgcgaatgcagcgattcttgaagctgatgacgatgaagagcttctcgagaaagtgaagcaagatcggaaaaagaggattgagagacaagctgttcttaattctgctgtcaaggaaaagggtacttcttcaattttcctctaatctttcatttatgttcctcccctgctacatgaagtaaattgaacaaattgatggaaaagtttactcttttatggaaaaatgtgtgttctttgtgttatggttcctaggctagttacattgaaccctagtctggttttgtttcatttatcttggctacatgaagtaatcagaacaaactgatggagaagttttactcttttgaggacaaatgtgtgtcctctttgtgttatggtcccatggctagttacattgaaccctagtctggttttgtttcatttatcttcattcaaggccgtatgaagtaatcagaacacactgatggaaaagttttttactcttttgaggacaaatgtgtttcctctttgtgttatggtcttcacagaatcatagttaaatggtttgttccagtgccatttacattgaaccctagtttgattttgtttcatttttcttccttcaaggccacatgaagtaattggcacatattgatggaaattttgtgaactcttttggggacaaatgtgtttcctctttacgttatggtcgacatagtaaaatggtttgttccagtgccatttacattaaaccctagtctgattttgtttcctctatcttcatccaatgctacataagtaatcagaacaaattgatgggctcttttggagacaaatatacttaggtcttcttggttctctaactaaaagtatatagtgtacagggtatttgcaggatcttgtttacaagttgagcaaggtaggacaagccattgagaacaatgatctaccagctgcaggtttggttttggggaaaggcattgataccgaatgggtcaaaaccgttaatctggctttcacaaaggtctttcttgctcattttaactttcactaaggtcaaatctattggtccaatgtagaaacaactggttaaaacatcaatattgtctctccctctctttacataaggtagacttttttttaatgtttatgttactgtttgttgaaaagtccttgtttgtgttcttggaacagttgagtacaagcccagaagagaatacagaggtggaagcattcaattcatcattggcttctcttatcacatcaggtcttgtacttgtacttgtacttaactttttcattcacaagaatcaaaattgtcattaaaacattgcagtgatctctttgaaatgtggttttgattccttttttcgcagtgaacaagaacgatatagagtcatcgaagctcgctttcgtttcatcagctggtgcatttgagaaatggactactttgacaggtcttttggaacagcttaagggactgtgataggctggctacaaattctttactctttttttgtattttccaacagatttgtcaaagagggtcttttttttctccaaataatcctttgaataatcatcattcactttcttaacttctttggttattatttacctttatacattttgttcatacttactatgcatcaatatcaacaaggttgatttttccatcgaattccaccacaccaaaaggaaccaagaaaccataccaaaacttctttggttatttatctgaaactaattcaaaaagatctgatcagtaaacctttgttctattgaatctcacattaagagaaacccttttaacttgagaaggcatacagatatagagcatcacaaaatccccgaaacaaaaccgaaccagtcataaccaagaagggggaaagctactagatgaagctagtaggtggaagtttgagtcatttggcctattactacgcactagttatgatcttttctctgatacattgaatactttattaaaaaccattacataaccaatgtaaaagcaaatatttaaacgttaaacagtccaattcagctttgaaaaatcctcccagaagaagaagactagtcaatattggttgcgatggccttgtagaggcattattatctgttagataatattaaacattaatgagaaagtagaaatgcttctgtataaataccttcattacttgtgtcttatttcatcaccttcaccttcaacatcaaacatcacatttcttcctcttttctctcttttttctcagtcttcaaagagtttcttagtaacccaaatca

SEQ ID NO: 4985 - DNA, 3000 bp, Unknown
  misc_feature (1)..( 3000): cDNA_ID_3091622_gDNA_ID_1620751_Annot_ID_166806 3000 nt of promoter + ATG
catgtgcaactttcacatattttctggagaaatcaaatataataataatcattatcattgattgaatgatcatttttgacttttgatggcgctcctcctatcttccaattagtagtaacttttaagggttaagttgtatactagtcactttttaaaatttaattgaaaaaatagtcactttactatttataatttgcaaaatagtcacttttcactgtttgattcgtacacttagtttgtacaccacttttagtgatcagatgtatataaaaaatacacagcgtacactttacatttgtacaataaaagtgatgtacaatccaagtgtacgaatcaaacagtgaaaagtgactactttgcaaattatgaatagtaaagtgactactttcctaattaagtttgaaaaagtgactattttgccaaaacaccccttgaacgagatttatttaataaatactgtattaattaacgaaagaaattttaaaactttaatgacaaattgggtcaagtaagaggaacctgagattctttcgaaacagtattctctctattcgtcgaaaattgggactaagaacatcattattggtagtatcttaggttagtcttagcttagttcttaggatttttttataattgattttgaaaattttgaaatgaaagctaagaacatttcattttatctcttatgtaaaagactcttttaacaaatatatgattaaaaagccaaaattttctaataattaacctaagcaactaccaataaatgtgttctaacgttttgatttaatctggtatttagggtattttgtcattttggtttatctcttatggatttttgtttccatgtttgttgtgtggcattgcttaccaatacatagaatagaaacaataaatgaaactatgatgcttttcttacttaaagagtctgaggtcatcaaaattcaatatgtagagtgagtgagatgcaatttctatataaccgaaatccaactgcattattgtttgcatctggaagctcctctctttctgatgtattttatctacaaactaaaaattcatttgtctatcttgatgatggttcttttcttctttatcctcattttaacaaatattcgagaatcactttcgctatgaacgtgtgctaacatggatatatttctttttaatattcaatattgtgattcaaaccaaccatcgaattatatcagccttctttttaccacagtttggctcaaccaagtttcttccttttatttcaaatgagattgtttgagagattttgaatatgactgtatgtaacgtattgtatgcgcttaaactaaacttagtgctctccatatctgtttttactcgcattttgtcaactattgagttttatattgcccccttagctagtggatcttgtcgtggtgtatgcttattttgagataattaaaatcgaaagcatgatatcatcttgaagtttacagactgtccgagtgcaaagtctacgaaagatttaaagattagaaacttgaagaaatcaatgtgaaaattaatggtcatttacacatatatatatgtgttggggaaacaacggacaactgtacagcaataaagttccaccctacatatttatgtgagtttgtgaaaaaaaataaaaaatattttgctagcaaaaaagtaaaaaataaatgagacaccaaattatacgtaaaaatcatcttaatgtgaagagtaaaaactatgggaccgtagtacactcaaaatttcagacacgaccagcaaatgtccaaacgttctacacaaaaaaacctaacagatctatttttctcctcctctagatcttaaacctctcttttcttttgtttcttatacacaaacaattaggttaagagtgtttatatactccctcataacccttacccaaattccaatctcatggattaataatataaatggttgaactccaagtttggttctccaaatcaaaacccaatttggttcccaccactaggaggaaaaccaacagactcccctccgataaagtactggaggaaacaacaatcctgactatgataacatcgtatttttgcatgttttagatatagattttttatgttttaaaaaagtttttgtttgattttcaaatttttttagtactaatgtagtttatacgagattaatattgtagtctttaatggactgtatcaaccaaacctgactttgttggggcaatttgtggtaattgtatatatgaaaaaatggtaatgggcttgaatatcccacgaagccttttaccaagaagtttcacgcatcccacatcggaagggtaagagagtttgatagtggaaacttttatataaatagacttcactctccctcagattcaaatttcgcagctatgtggtgagcacaaagcgaactattctttcgccttttactaaagaataccgtgtgctctccacgccaagtggcttacgcctatttttggagggcccttacttaatcgtgaggcccaacatttaacctagtctgaatgtttcatttgctaaaaactttgtttgttgctactgggcccaaaggtttgaaaggccagttcaattgaaatatcgcataatcaaattgaatttaatctgcaagaccaattcgttaatcaataagagcatactaggatttcaaaccaaatgattcagttcaacgatgttttaaattatcatctagaaattataaaatgtgtaataaagcattttttttttttttaaacttgacaaaatctctaaatgtaaagtctaatataaaccttaaaatctaaaaactaattatgcttgtttttgagaaatttttaaaaaattgtgaaaaagaaaagtaatgaaaaaaatattgagagtgagtgattggaggaaaataacacaacgcaacaatctaacaaagagagaccttatcatcatcagcatcaccttaacccatataacattcctcttcgaaaatgccaacaacaaatttcatagagaagcagaa

SEQ ID NO: 4986 - DNA, 3000 bp, Unknown; identical to SEQ ID NO: 4981
  misc_feature (1)..( 3000): cDNA_ID_3075060_gDNA_ID_1620751_Annot_ID_166798 3000 nt of promoter + ATG

SEQ ID NO: 4987 - DNA, 3000 bp, Unknown; identical to SEQ ID NO: 4980
  misc_feature (1)..( 3000): cDNA_ID_1826813_gDNA_ID_1620751_Annot_ID_166795 3000 nt of promoter + ATG

SEQ ID NO: 4988 - DNA, 3000 bp, Unknown
  misc_feature (1)..( 3000): cDNA_ID_3075067_gDNA_ID_1620751_Annot_ID_166791 3000 nt of promoter + ATG
catataaaaagatgagttttttggtaacgaatttacctcatcggcgatcattgcgatgagggcagagttgcgagcagggatcgtagctctcccagccatatttgattcaactacacacgataaacaattccagaacaaaaatcaatccagcgaagaagacaattatcgaaattgggtaaaaaccctgatcaattcctgatcttagattcgaagataaagcaaaagctcatagattttactcattacctctttttctctgttcttctctccttcttcgatttgatttgatagatagatttgtgtaaatcacaaccaaagaccacgcgcaaaaaaaaaacttgttcagaacacgattcaattgacaatattacccctgactatacctttaataacgatactaccctcctttaataattgctcattaacagtaaaagtggcaaaagtgtaaatatatactaaaaataatgatgagtgcaagtcccatcaaagccagcttgcctcttcgagggtacgtttgtcttttcgacatctcttttcttgtctctacttcagaaaaacctcctgtgatgattattatatgtgaagcagaacaaaagcaaaaagagagagtcagaggaagaagaagaagaagaagagtcagtgagctgcaatggcggattctcactcagtcaacaatcagctctcgagacacacttccatttttggtttacgtttatgggttgttctcggcgtttgcgttggagccgcgatcgttcttttactcgttctcatctctctctggttcatttaccgacgaagcaacaagaacaaatctcttgagtcttcttctaaatctaaccatacgattgttcccgttgtttccaaggagattcaagagattcgacctccaattcaacccgacccaacaccggagccacaccaaaaccaacaaagagaagacgataacaaaattcacatcgaaattggtaaagatcatcggattgcgtacccggaacgaggaggttggactggttccgggtctgggtccgggtcgggtgatcagggtttacttatgttgtcgggtcctgaggtttctcatttaggttggggacattggtatacgttgagagagcttgaggtttctactaatggatttgctgacgagaatgtgattggacaaggaggttatgggattgtgtatagaggtgttcttgaggataaatcaatggtggctataaagaatctgctcaacaacagaggacaagctgagaaagaatttaaagtcgaagtcgaagctattggacgcgtaagacacaagaatctggtgagattgcttggttattgcgttgaaggagctcataggatgttagtttacgagtatgttgataatgggaatttagaacaatggattcatggtggtggtttggggtttaagagtcctcttacttgggagattaggatgaacattgttcttggaacagccaaagggttaatgtatttacacgaaggtcttgagcctaaagttgttcaccgagatattaaatcgagtaatatcttgcttgacaagcaatggaactcgaaagtttctgactttgggttagctaagctcttgggttcggagatgagctatgtgactactcgtgtgatgggtacgtttgggtatgtggctcctgaatacgcgagtaccggaatgttgaatgagaggagcgatgtttatagcttcggtgttcttgttatggagattatttcagggagaagtcctgtggattatagccgggctccgggagaagtgaatcttgtggaatggttgaagagattggtgacgaatcgagatgcggaaggagttttggatccgaggatggttgataaaccgtcgttaaggtcattgaagcgtacccttttggtagctttaagatgtgttgatcctaatgctcaaaagaggccaaaaatgggtcatatcattcatatgcttgaagctgaggacttggtctctaaagatgatcggagaaactctggaggaggaggaggaggaatagaacagggaaggtcaccgcggaggaagacaaatgtgaatgaatcagaggatgagagtggtaattctgttctgatcaacaatgaccaattagctttggagaataagcagaactagtaaaaaagaaagaagctttggcattataattttgtattactatttttagaagttttttcttgtgtgtgtatatttatgtgtgtagattcttagccctttcacaaaaaaaaaaaaaatgtgtgtagattcttgtaattttgcaataattaaaactggggattgcttgaaaaatatatatatggtttgtttttttgtattcttttggttcgttctctattgtaatatagcctacatagtggtgatttgtggtattggtgacactatgttaaggtcaaaaagaaatagagagtaaattccatatatatgaaaattgaaaatgactgtttaaatttacatatggcgcgaaaaaatgatctagttcgttaattatttttagaagctttttgtggtaaatttagatttttaaaaaactccatatattttttttttataatttaggcttgtctattgtaaatttgtaatatagcttagtgatttatttgtttagcttctggtgacattttataaatttttaatgaccagtataatatagtatttttttataaattaaaatataatctaatgttttatgtcaacttcgttgttcattgaataaatcaaactttgaagaataattaaataacaatgtttgcaaaaactgttacgttttttcatgtaaacattagtggacgttatacaatagatatttaaattataaaaactattcaaagaatattgtaaagaaataaaacagaaatgtgtaagaaaaaatgtttattttattgtacgtaataaaaaaagagaatatacttgtgtgggtggacctaaatgcaaataggcaaagtaccgacaaaaaaagaagaatcagaaagtgaaaaagagagcgagcgatg

SEQ ID NO: 4989 - DNA, 3000 bp, Unknown
  misc_feature (1)..( 3000): cDNA_ID_3075075_gDNA_ID_1620751_Annot_ID_166788 3000 nt of promoter + ATG
gttcatcatctccgaaaaataattggcttaaccgaaacttgattattcgttattcttttgtgggttttgatagtgttgatggatagtcggaaagagagagaggctatcacagagttatcccgagctatcgcctttaaagcagatcttcatcttcttcacttacgagcggctttccacgagcatatcggtgatgtcacgagtgcgttgcgggactgtcgtgcagcgctctcggtcgaccccaaccatcaggagatgctcgaactccatagccgtgttaatagccatgaaccttgaaccgcaaccacacacaaaagagcttcgatatgaaagtaaagtgtgaaaaattgtaatactaaaagaatcattgttggaaacttgtaatctcttgtaactcttttattctttgttgctgttttccatatatcgatttcgtattttgtccttccatcgtaaacttcaaatttctctgggcctaaaacgtaaacttgatttaaaacaataagtagatcgtttgagttcttggtgacaaacctaaagcattttcctttattattcttgcacctaataaagccccaatgagctatcttattttcaagctttaggtttgaaaatgtgaaaaagctttgggtttgtcaccaaagactcaaatgatttcgattacgttttatagaaggttgaatgtttgtactcttgttacattaacccatgacatacattacatatacatataatatataagagcttttactacaagacctattaacatgggcttagatgggcttctagagttgtagtgttaataacttgggcttaatgggtactataatactgatgactagttttctttgtcctcaaatgatctagtttcttccctgttttactttaaaatataaaattttccctttgtttgttacaagaattcgaatattcatgtgtttatttccttcgtatagcatatatattttcagaatatttcacaattcaaaaaagcctttatgaaaattttaaaagaagaatattcggtgttgcatgggttttagttacgctcgtgtctcataatggtcacacgttttgttttgttttggcctaaagggattccatcataaactgaattttactacagtagacacgcctatcccaatgaatcaaatggtacaagacacgtctaaggacaaaatcgacttaacaaaatgttcttcattggaatatttttctatagaaaaatttcaacagataaaaagttaaagaacggatgaaagagtgcgaaaaattcttgttggtggggtaagtattttctttttggacatgaacaattttcaaagggatatattaagaatattaatcaaaaacttataaaggttggaaaaaaaggaagaggaagatagcacaaagccacaaagtcatccacaagagtaaatcatatgaagacgaaacaaaattcaacaaagtgatatattccattttgatattcaaagccaaaatgcttttagggcattggttgctttgagtgtatgtatttttctcccctacaaatacaactctcttttatctttgtgagtgattcaaacttaagttaggaggcatgtaaggatgttgtataatcagaatttaaatttaaattagagaaatagacaataaagttgtttaattcgtctttagggcgaaatagctttaaacctaaatttgttttttttttgttagaatctttgtatgatgttccctttttacaatgagtttctatttccttacgttgttttaatttattttatagcttatgataagtttcattcaaatcagtgtgcctttttaagaattttgggtatattatgggaatgagagaaactataaggaaaaaaaaagataaagctttagcagccttggtagagaaagtaacatcactcaaattcataataacacacaagtaaaatataataatatttaaagacaaattcagaagaaagttatagctttttctacatgaaataaaatcgaactagaatccctagctaaagtaataaggaaatacaaatagaaaatagcacaattgaacaagtatacttatactcttggcaataagtcaaacaatttcatcttggatacttaattttccagtagatagtttcctattagatattcctcaatggttgtattactaaatttagttcttctattataagaacaacgtttattttggctaagtaattgtgtgtttagattctctttacaaacttaaacaaaacaaaaaaagtttccattattcaaaccccaataaattgaaaagaggcacacttttcttgatataaaagtgattattacttccatttaaggaaattaggcctgataagtctcatctcacaatattttccattaattgcacaaattgatagcttgctttttttctttctgggtctactcttcttttttagtagacaatttcaagtaaatgcttatagtctgaacctgtaatcatcactcttctctgtaatgcagaacacttaaaaaattacataaaataaagaataaaactgaggaataaaaaataaaaaacagttaaagatatatgaaaacaaagtcaaagtctcactttcaagcacaatctctttcctctgtggtatttatctgcacatagaaaaactaataaaaatgggaatcaaacagtctttgcatttattgtaagcacacacatatatgtgtacatgatagtgacattggagaataatccatcatggtcgtcttcttgcttttgagactatacatatacatgtgcattatatacactactcaagtaactaaattatttaattttgcatatatagccaaagaatgatgtctttctgtgtacacttacttcttactctctaggtacttgcagttccttattttaagagatcagaagaaaccaaagtttggatctttttatagttttcttccaagttttgtttttgttttttcttttgttggagtttccttcttcatatagctataaccatatagctagcc

SEQ ID NO: 4990 - DNA, 3000 bp, Unknown; identical to SEQ ID NO: 4975
  misc_feature (1)..( 3000): cDNA_ID_1826835_gDNA_ID_1620751_Annot_ID_166787 3000 nt of promoter + ATG

SEQ ID NO: 4991 - DNA, 3000 bp, Unknown; identical to SEQ ID NO: 4974
  misc_feature (1)..( 3000): cDNA_ID_1826842_gDNA_ID_1620751_Annot_ID_166785 3000 nt of promoter + ATG

SEQ ID NO: 4992 - DNA, 3000 bp, Unknown
  misc_feature (1)..( 3000): cDNA_ID_1809497_gDNA_ID_1620751_Annot_ID_166809 3000 nt of promoter + ATG
agagacccataaggaacccgaagcagtaaacaacagccaaatcagcttgagagcaaggaccttattccaagaagataatctttttaaacccaatccaccactctccttagaagaacacactatatcccaagagatttttgcttcacgagctgagtttggagctccggaccataagaacgcgttgcacatctgctctaacttatgaaggcattggttggggaggataaatatcgaagcccaaaagttgattgtggagtaaataacagatttcaagagctgcaatctaccagcaaaggagaggtgccttgcagtccaagacgtgaaccttgaatttatcctatccacaagaggctggtaatcgtgctttttcattttttgggacataagaggcactcctaaataacggacaggcagagaaccttgtgaaacaccaagactagctgccataatccgattcctttcaaagttaccaccatctaaaagtaaggccgtcttctgcagattaattccaaggcccgaacctttcttaaacacgtctagaatatccaggatggcaacaagagaagacagagacccatcacagaaaaccaaaatatcatctgcaaaactcaaatgagtgatcataggagccaaacacttgggatgcagaacaaaccggccctccactgctcccaaatccaaagatctggccagaatatccattactaacacaaacagatgggaggacataggatctccttggcggatgcctttctttcctacgaagaagccaatcaattcaccattataagcgatgctataagagggagtagaaatgcaaacccatatccaatttataaaaatgggaggaagattcaaggctttgaggatattgatgagaaactcccaattgacgttatcataagccttggttagatcaacctgaagacagcctctagaagtatcaccttcagcttggaagttgtccactagctcagacgccaagagaacattttcacagagaagccgccccttaataaatccaacctggttggattgaaccgcttgatcaatgaacaggttgagtctcttagagataaggcgagtaatcaccttgtagattgtggtacaacaagccaccggacgaaagagattgagctgatcagccccgggaaccttaggaataagagtaatggcagtggcattaaaccctttcaacaaatgacctgtcaggaaaaattccttaatagctgcaataaaactttcctttacaataggccaagcttccaagaagaattccactggaaacccgtctggaccaggcgccttgttcctaggcatagagaataaggccatagtgatctcttcatcactaggaatagctgttaactgagtagccaaggaggagtcacacctaaaaggatgaagagactgaattcgttcaacggagaagggggtcacatcatcattagggggcctaacagatgagtataataggagataagcatacccttaagagactggtttgatgtttttcatgatataaactttttcgtaatgtaattagtggttaatgatttttgattgttttataattttcatgatgtaatgataaatagtgatttctgatattttatgagatatttttttcattatgtaatctacatatacatttttggagccattttaccaaataaatcctagatttgaagttatttacaataatgccattagcattaaatctttttttcaaactaattaattttactttacattcttaatttaaattgtcaatcacattatcaatcaaatttaatccaaacaaacttcacatcaatcccttaaaattagcataaacatatttgttaacaatattttaaaacaaagttttttatttaaataaatattattcttactaaacgtttttgtttaaataaataaatcatgtatttgaacttatttacaatgtcatgcttaattatttaggaatgaaaatatttaattaaagatctaaatcttctaaatccttgcttttagatttattatgtcattacctaaaaggtaaaaaatattaactttttaaatataattatttctatatttaaacttaataaaacgttatcaatatttaaacttttaaaaagtttaatatatcacaattttttaacatcattatataatatatagagtttaaaaaaaaatcaaaattttttccgtgattcgaaattttaaaaatgaaaatatattaaccaattgacgaaaaatatgtggttcaatgtcccgcatcgactaaaatatttaaacaaatgattcataaacatatcataaataagatcaacattaataaaataaatgatatttttatatatactaactttaaaaataaattgtttccgcggtacaccgtaagttaaaatctagtacttatgtaatactaataatggtatcttttcatgatgagggaaaaaaaacattttttataaaccatatcacaatataatgaattccaaaagtcatttgggtaacttcctaacctctaattagtaatttaagtatttaactatatcaaacaagttaaaatattatgctatttatgctcctttttcttttcaactagttttctatatataaataaacaaacgagtttgtacaaaaaaaacaacgagttgacttttcaacgctgttagatttttagttttttatagatagatctataactgcatcaacggtcaagataattgatcgcaaatgatacgctctagaacttcgccacgtgtcaacaacgctactaactcatcactaccaccgacaattaagtgaaatcagacaatcttaactgtcgtgtccaaaaacacaaaaactctcctcgcttctcttctcttgttgtagtaagtaactttggtaattaacagtgttattatcaaattcgaatctcttacattaatggaaactcagatcttctcttaaaaacacataaagcacagatcttttacagagaatcttgtaagaagaaagaagatg

SEQ ID NO: 4993 - DNA, 3000 bp, Unknown
  misc_feature (1)..( 3000): cDNA_ID_1012102_gDNA_ID_1620751_Annot_ID_166778 3000 nt of promoter + ATG
tgcctacttccactcatcacataaccaagatcctcaaacttctgaatctcttcagcgttaagacccacttctcctctacgtgggatacgtttaccttgctgaacatactgtgcaatggcgtctccttcaccgggtcttaaagcaccaccataactgatgtgaccttcagctttaggtaatggcattggaccaacatcaccttcttcttcctcttcatcaacagctgaagatttcttctttaattcaatcatctctttgaacttcttcaactcttcttcatcaagttctagctcagtgttcttcaccgtttcgtctacttgcatcttcgaatcttcctcagtaccatcgctgtcactccctgacttcgtcttctctcccttgcttcgttttgaactagaatccgaagatttcttccgcctcttgctctttgacttggtatcttcttcctccccagacgaagaagcactaatctcagctttactatcttcatcgctgctctcatcagagtcactgtatttcgtctttctcctatgacttcgctttttcctaaaactacggctgcttctactcttcttcctcttagaagaactcttcctccttcgtctcctatcttcctcttccgaatcactctcactcccttcggattcactatcgctgtcataagatctctttctcctgcgcttagacctcgagctcttactcttcctcttcctagatctcaaaccatcagattcagattccgagtcagatttacctttcctttctttccctttcgaattatcatctctttcgccgccgttcttgtcctgaatctcgtcggcgttctcatcggaatcctcgttctgatctctaggtggactcggtgtgttctcccaaaagcagaacttggctgatttcctcatcttaagccgtttctgcctcctatactcttcgtgactcaatcccttcaattcttcatcggaatctgaaccagatcgtcttccgtttcgataatctcgatccaaatagccatgattcttcccaaatctcctcggaagcgagttcatcgtcattctcgaatccctaattcactccgacgacgacaatgaagaaaacaaaatctaagcagctgtctgataaattagggctttgattcatatacagtatctgcgcctttttacttattgggcccttaacgaataggcccaatatttatcattattcaccactgaaaatcatgttttgattttacacaaagcaccccacattttaattagagtcaatcgagtcctctatccttatcgtcgtcttcagatggcaagtctctccatgtccgccgtgtctctgtcgccgtttcggcctcaaacagagaatcttctttcaaaactcagtttccgaacgaacttacactcgttcaatctcaaaccaataaggattagtacgaaagttagaagttttggtgggaatcggagagagccgaaggattcaagatttgtcgatgaaaaaggcgtagttgatgacatggaaggtttcttagacaatctctctctcgaatacgactctgtttgggacactaaaccctcttggtaaatctcatttaagttcccaacaattttatttcaagtagtttggatttggtcctaagacttatgaggaatcgtatttgttggttgtgaatatgggattatagcttagatagagtcttaagttcacttttaagtggaccaatccttaatctttattagcattttcagtgatttatgcctgcccaagaacttttttgaatcatatatgaagctatatatttattgatgctacttaaaacaagacttaccccattacagtttcatgattgtgtgttgtggtttagaagatagaaagaaaaagtttgaatcttttggttaggaagatagtgaagaaccaaaatacagattatgtaatggtaattgggttaagaagggtttaacatttcgacctcagcatctacagctttgaatatctattgatctggtgtgtatttgcaatcaagaactttacggttcttcttagacgttttcagggcctagtgttcttccgtatggttttgaataagcaactggctatgtttctcaggtgtcagccatggacgataatgttaacgggtctatcaatagtggcatgtagctgggtaatactacactcggtcatagtttcatcgcttgcggttggtgtaattggtgcttggtggtacatattcctttatagctacccaaaggtatgattttcccttccatcatctaacaacctctccttttcattcccttactaaagaaatgttcgtagctctaatttactaagtctaagttaaagtaaaaatcctgtttaaacatcttcagacaatgctagtttctataatcttagtgaacaagactttactttggtcttgtctttgagattctggtggttttttcgtgtactttggttcagtcgtattcagaaatgattgctgaaagaaggaaacgagtagctgatggttttgaagatatttacggcaaaaacaagccttcataggatcttctcaatgttcaaaattacattcgtttcttgcataaatcttcccttctgttgtgtgtataatataaccatcatctatggatttatctcaatttcattcacagatgtttggatacataaatcttgatttcagagtcctctaatgtagtgggcattaaaatcgaattgaaccgattatacaaaccgaaattaacccaaatataccgaaacctcattactgaaaccaaccgaataaagtgccttcgaactaaataaaccaaacgaaccggaccaattttagttcaacaaaatcgacaaattcaaatcgaaccgaaccgagccgaagaaccaccaatacgagaaatgaggaatgaagggtaaaaatgtaattcccaagaggtcatggtcaacggaatgtatatatatgtaacggtgagagattcattgagatcatctccactctgctaaatccgacgagagacgacgatg

SEQ ID NO: 4994 - DNA, 3000 bp, Unknown
  misc_feature (1)..( 3000): cDNA_ID_1826789_gDNA_ID_1620751_Annot_ID_49824 3000 nt of promoter + ATG
ttaaaaaagaactgagtcctcctcgagacactttgtagcttgcggataacgagacaatttcaaatttccagcctgtgccagcggaaagtcaacaatcgatctaactgtaaactaagatcaaatatatgtattattgagggtttaggttggcatgtgcaactttcacatattttctggagaaatcaaatataataataatcattatcattgattgaatgatcatttttgacttttgatggcgctcctcctatcttccaattagtagtaacttttaagggttaagttgtatactagtcactttttaaaatttaattgaaaaaatagtcactttactatttataatttgcaaaatagtcacttttcactgtttgattcgtacacttagtttgtacaccacttttagtgatcagatgtatataaaaaatacacagcgtacactttacatttgtacaataaaagtgatgtacaatccaagtgtacgaatcaaacagtgaaaagtgactactttgcaaattatgaatagtaaagtgactactttcctaattaagtttgaaaaagtgactattttgccaaaacaccccttgaacgagatttatttaataaatactgtattaattaacgaaagaaattttaaaactttaatgacaaattgggtcaagtaagaggaacctgagattctttcgaaacagtattctctctattcgtcgaaaattgggactaagaacatcattattggtagtatcttaggttagtcttagcttagttcttaggatttttttataattgattttgaaaattttgaaatgaaagctaagaacatttcattttatctcttatgtaaaagactcttttaacaaatatatgattaaaaagccaaaattttctaataattaacctaagcaactaccaataaatgtgttctaacgttttgatttaatctggtatttagggtattttgtcattttggtttatctcttatggatttttgtttccatgtttgttgtgtggcattgcttaccaatacatagaatagaaacaataaatgaaactatgatgcttttcttacttaaagagtctgaggtcatcaaaattcaatatgtagagtgagtgagatgcaatttctatataaccgaaatccaactgcattattgtttgcatctggaagctcctctctttctgatgtattttatctacaaactaaaaattcatttgtctatcttgatgatggttcttttcttctttatcctcattttaacaaatattcgagaatcactttcgctatgaacgtgtgctaacatggatatatttctttttaatattcaatattgtgattcaaaccaaccatcgaattatatcagccttctttttaccacagtttggctcaaccaagtttcttccttttatttcaaatgagattgtttgagagattttgaatatgactgtatgtaacgtattgtatgcgcttaaactaaacttagtgctctccatatctgtttttactcgcattttgtcaactattgagttttatattgcccccttagctagtggatcttgtcgtggtgtatgcttattttgagataattaaaatcgaaagcatgatatcatcttgaagtttacagactgtccgagtgcaaagtctacgaaagatttaaagattagaaacttgaagaaatcaatgtgaaaattaatggtcatttacacatatatatatgtgttggggaaacaacggacaactgtacagcaataaagttccaccctacatatttatgtgagtttgtgaaaaaaaataaaaaatattttgctagcaaaaaagtaaaaaataaatgagacaccaaattatacgtaaaaatcatcttaatgtgaagagtaaaaactatgggaccgtagtacactcaaaatttcagacacgaccagcaaatgtccaaacgttctacacaaaaaaacctaacagatctatttttctcctcctctagatcttaaacctctcttttcttttgtttcttatacacaaacaattaggttaagagtgtttatatactccctcataacccttacccaaattccaatctcatggattaataatataaatggttgaactccaagtttggttctccaaatcaaaacccaatttggttcccaccactaggaggaaaaccaacagactcccctccgataaagtactggaggaaacaacaatcctgactatgataacatcgtatttttgcatgttttagatatagattttttatgttttaaaaaagtttttgtttgattttcaaatttttttagtactaatgtagtttatacgagattaatattgtagtctttaatggactgtatcaaccaaacctgactttgttggggcaatttgtggtaattgtatatatgaaaaaatggtaatgggcttgaatatcccacgaagccttttaccaagaagtttcacgcatcccacatcggaagggtaagagagtttgatagtggaaacttttatataaatagacttcactctccctcagattcaaatttcgcagctatgtggtgagcacaaagcgaactattctttcgccttttactaaagaataccgtgtgctctccacgccaagtggcttacgcctatttttggagggcccttacttaatcgtgaggcccaacatttaacctagtctgaatgtttcatttgctaaaaactttgtttgttgctactgggcccaaaggtttgaaaggccagttcaattgaaatatcgcataatcaaattgaatttaatctgcaagaccaattcgttaatcaataagagcatactaggatttcaaaccaaatgattcagttcaacgatgttttaaattatcatctagaaattataaaatgtgtaataaagcattttttttttttttaaacttgacaaaatctctaaatgtaaagtctaatataaaccttaaaatctaaaaactaattatgcttgtttttgagaaatttttaaaaaattgtgaaaaagaaaagta

SEQ ID NO: 4995 - DNA, 3000 bp, Unknown; identical to SEQ ID NO: 4984
  misc_feature (1)..( 3000): cDNA_ID_1808696_gDNA_ID_1620751_Annot_ID_49825 3000 nt of promoter + ATG

SEQ ID NO: 4996 - DNA, 3000 bp, Unknown
  misc_feature (1)..( 3000): cDNA_ID_1826956_gDNA_ID_1620753_Annot_ID_49838 3000 nt of promoter + ATG
ttttatatctgtctggattcagtattcgattcaacttggtgatcatctgatgacattttcctttgttcaggtgataacttttttaaaaatgtgagctacacaatccaagtcctgtgtgctgccgcttttacgcaagaaaaagaagacctcaggtctgtagaagctcagatactcactaaaagagcagagctggcaaagtttgagacagagtacagggaagtacttgtgcagttcaccgatatgaccagtcgatacgctcaagaaatgcaatcggttagtcttttattcatgaaagtttataaatttcaaaccaccattcacagaaaacgaagagaagatgtgtcatgactgagtaaattagaccagattctatgtgtaagtttctgaaatggttagcttagtctgattatcttatggtctttttgcagatcgatgagctcttaaagcagagaaatgaaattcactcagcatacacgacgattccattgatgaagcggagctcgagcaagaacaggatgagaaagagctcattcaagaaggcggcggctaaggcgcctgctccaactgaacaggaagaagaggaagaggaagaggaagaagaagaggaagaaagcagcagacagaagaacaagaaaccaagtacttgtgataagtccgagacactaaagaagaagagcaaatggttcaatttacatttgaaattggacaagaaaaaaccttgttagtttcttcatcacttttatcaaagaaaaagattcttatccattatttttctcccttaccttagggatcggtgtatctgtaaatcttttgctatttttctccttcaacttatcattagtattagtcaacaattttattttgataattgttatctgtcaaagttctcttaaacatattgtgccctattgaacccgagatcacatatgacaaatggatcgcaagtatggaaattttgtgatatccaattttgtaacagattattcaatttgacacatgcaaaaatttagataacacatattgatggcacaaaaaatttcacgagagattttttttttccacccgaaggcatgaatcatgattgctacattttcaatttcaatatattagcaactcaatatcacaagaccaaattcactagtcactaccaaataaattttgaatgtgtgttaaaaggggtaatcctaatttatcccttgtagtcattgtattgatcacaccgccttcttacttctccaagcttccccgtcttcacattcttctcactaactttctccatagccttcgcaaacgcgtcaaagaacgccgtttcgtcctccgcgtaaagatccaccagcgagcgcgtcctgttgtcaaacgcaatcgcgtgatcggactggagcaacccgtaaccgtgcttcaaattcttgtaatacatattatcaaatttccctggagtaaaaacgtcattaaacgcagacatctgttcatcattggtgtaattcgcacacaacttcctcagctccgccgcgtatttcggattcatctccaccggaccattttgatcagacttgttaaagatccgactcgcgaactctttgcaatgagagaaaccaatggtgtgagcaccaacaagagcaaccatttcttgaacggtcagaccactagactcgaaaatagaaatgatatgatccatagtcatgttaggtcgagctagttttccttcaacacgattcatatcagagacaagactatctttccgaccgaacttaacgttaactctcggacctccgaccattgagattaaactacgtgttgcaccaacgaggatatcggagcaagaaacaatgtttggacattttagctcgacggcggttttgatacgtgtgattacgtcgaatgcgtctccaggaagagaacggttgatatcggcgtcacgttcggaggttttacgtggagtagaagcaacgaggattgaggcgtcgcagccatcaaccatgcaatcgtggaaaaagagacggagtgttccgacagctgttgttggagctgcaatttgtttatcggtgacgatttgtacgagtgtttcctcgaattcaggacatgttttggtgtaataatcagacgagagattggcttgaaggagacatggagaagatacgagaataaacagacataaaccaaaagatttcattgaaaaaaagagggaaaaatctaattaatattattttctcctgatttcaaatgatattggttgattttcgatctctattttttctcttctattgttgtgggcgtgtgtgttatcttttagctgtttgtgtcgttgttaattctaaaacgaaggtgtttttgtttagaaaaatctaaattgagagtttttaggagaaacagaaaacgatattttaccaaattgtaaaacccttttttggtctccacaattattagaaacactaggagataaaaataatcaaaatgttgctcctaacaaaaatgtcatatgtataaattttgtttaatcgatttgccacacacactcactgtatttactaacgtcaaagaggtgtgactttccaatctttcatatactacaaatcacaattatttcgacataatctctaaacaaaaacctaaaaactagttatttatttttacatcactttcctataaattggttatagttatttcacaataattcaaaattttcataatttcgtgctgatatactacattccattgttctttactaatttttatatcattattatgttctgttatttcattgtttttttagtattttagttacacttttttcaattgagaaaacttctaaaaagagaataatactatccaacaacattgaggttggtgccaccaacgcaaaacgtgaacaacgcgacataatagatctgactatataataaaccaaaatcaaataacaaatgtcttcaacactttatcatcttcaattgaaaaaaaaaaaaaaatcaacccaaagctctgcttcgttgagctaaaacaatg

SEQ ID NO: 4997 - DNA, 3000 bp, Unknown
  misc_feature (1)..( 3000): cDNA_ID_1808807_gDNA_ID_1620753_Annot_ID_49840 3000 nt of promoter + ATG
cgatgaacgaccgcttcaagactctctttagtagcaaaagctacgtggaagtccgacggcacaagaagtgcacgtgggttcaccatgtggacgccgtgtcatcactagccttgtcgcaagatggctctctgctttactctgcttcgtgggaccggagtttcaagatatggagaacatctgatttcaaatgcttggactctatcgaaaaggctcacgatgatgctattaacgccatcgtagtgtccaaagacggttttgtgtacacgggttcggcagataagaagatcaaagtgtggaacaagaaggacaagaaacactctctggtcgctacactgactaaacatctctcggcagtgaacgcgttggctattagtgaagacgggaaggttctttactccggtgcgtgtgatagatcgattcttgtgtgggagagattgattaatggagatgatgaggagttacatatgtctgtagtgggagctttaaggggacacaggaaggcgattatgtgtttagcagttgcgtctgatttggtgttgagtgggtcagcggataagagcttgagggtttggaggagaggattaatggagaaagagggttattcttgtttggcggttctggaaggacataccaagcctgttaagtctttggctgtttcagtttctgattccgattctaattctgattattcttgtatggtttatagtgggagtcttgatctttctcttaaagtttggaacttaagggtttcatctatctaactgcttattttacaatctataacgtgattatgactaatctctctttattagtctatatacttatgaatgtgatatatcataatggagctacctaggttttagtcaaaaacctacaacactcggttatcggagtacactttaatattacgatttataaatttgttctccaaatatatgagatttctcagttttgatcatcattggctatgttattaacaatgaccttcacgacttcacacgaacttatgtgtacacattgttttaatgtttagttttatttttctttgtgaaatatagagttaaagtaaatttaaaatgacgatagagaattataaaacttattctacaacgtggaagttgatcatccatgtggtgtggtggttttatgatttgtgtttggttgaagttattaatctggaatatgtgtgtgaggtcagatgaccccccaaaaaacattgataaaagaattgtggaactttttaaaataacgaatcacgtagttttgtcttccactatgactgaatttatatgttataatagtgataaatggatatcgcataatacacgtgaagtatggggaaagaaaaactttcacactatagtactactatacaatctttgtgtgcagataactgaattctaaattgaaatataaaaatactctatgcaattaccaaaatatatgtcccttcttattgcttgataaaatgcgaatggaggtttaacattttaggcgattcagttattgggtttctaattgtaaggcccaaactttagagacccatgaataatatatagattttagtacgatgatacaaacccatcaaacaagtcaacagtcctaagcatatgacgttttgttgtgacttatgaccgtaaaggggaccagttccaatcattttcgtagtaggaatctgctgataataattttaattataatgtaatacgtcccgatctcgtgaagtgaaagtaatattttgaaactgcaaatatctcattctccaatgtatttttctatctaaaataatcaaaaacggtaaagtatttcttagacattcttataaacaaatatttgttacaaactaatctttacattagtttaaaatgatcctcgataaagcccaagaaaagatttggcaagaacacaaatttattagaaaaatgaacccaacatgataatgagcctctgattgtgttgaagtgtcctcgtcgttgtgttttcattttcattaatactcaattaataatctcatgtggaccattttttataaaatattcctgaaaagttgtacactgatgcaagccagcatcacaacctttttgtgaggataggacagaaaataaaataaaaacttaacaatttgacgttaatcgctaattaaattcgattatactcaaactcagcagcatcaaatcaaatattaaactgttattatactcataaataattattattatattgttatagtcaacaaaactgttactattcaaccctacctatatagtaaaatcctttttctatttttgtttttaccataattatattttttaaaattcccatatatgtcacatagaaaaatcttagctgtttacaaaaacgtataacaaagtaaatataaaaatttgttaattgttaaacttgaaccactaatataagttgggtactagatattgttgaaaaccatattgtaagttataacttataactaaaccaatccaaatagaaacaaacattagagaaatgattaaaaaaaggtcataaataacacatatgagttggattattaatgttaattgattgatttaatctggaaacctactgtcttgcttcgcgtgaacactacgcgcctcccaaaaacaaagatgccaaaacaagaaacaacctgcggacctcaaatctcataacccacgcgccgatatcacgcgccgaaccagcgcactgtagtgtgaaatatccacagttttaaatttcgtcttctctctctctcaaactatttctctcaccttcctccgacgatttctcctttgacagttcagtcttatctctcgcaaggatcggagatatagagagatacatagaaccgtctcgtagctctcttccgccgtcaatttgaggtttccggggagagaattgtagaaatgaaggaataattggagaagattattatcacctcgctggagattctattttgttgaagtgtgattgattattaggggttttggttgtgaagagaaaatg

SEQ ID NO: 4998 - DNA, 3000 bp, Unknown
  misc_feature (1)..( 3000): cDNA_ID_1826945_gDNA_ID_1620753_Annot_ID_49843 3000 nt of promoter + ATG
tgacatccagtgaaattcaagaatgagttccaggggttcccggtggcgtttcggagaagctgcggcggaatggctgaggagtttgtatagaaaccagcggagactggagaaggagcgaagaacaacaagaaaaccatgaaaacacaaatcctcaccatccaaaagagaaatattaaaaagattaagtgaagaggtattattgagatttacaagagaattagagagatgacatagataaaactaaacaagtttgacgttggagaaagcagaggtcatttctgcgttgcgtttggagaattttctatgttgaaaatgctgcattattcaaaggaaacttcctccgtcctcgtttcaaagggtctcacgaagaaaaagactaatgaagcttctgccaatagatagtgtcgttttatggataattaaagttgattggtggcttggtgcaatagattaggcccgatttagtcttggatgactagaaattgtgattgaccggtggtaaaggaccggttaaatgcaaagttggaaaaagaaccatgcaacaaaaatggttgaaggcggcagaatcaactaaattggttgaaagtgtttttgttttttttgggtcgttgaatgtttgaattggtcttttttctttttgtgataatttttccggaggttgttgttattggttgaaaaaatcaacgtaaaatctccaccttacacgagtaacgccatgacttgtttgttaggctatctaattttttcctgtaatgggtataacatgcaagtctccatcggtaaaattaattgatatatcatacatgcatataaagttttgggccaaaagtttgaagccctttctaaacagaattaggatacatataaacagaaaaatgtagattttcatgttagatccatttaggctaaaaattgttttcagaattagttcaaccacgtttgcaccaacattattaaaacttagaagcctgtaaacgcatagctttattaaccaaaatctaaactaagggacgtttgatagtgtttagtgtacatttatttcgtagttatgatatttttgactgactaattcattttagttacagattttaattacattttttttttggtgtgctttgggttaataatacttaattatattctaccaccaagtgataggttttctttgcatacggttagtgtatgactaatggagtcataagagcaccttcactagaggactctttagagcatcctcaatggacaatttaattgggtgtctttctctattataaaatattaagaaaatttcgtttgcccccaaaaaaaaaaaatattaagaaaatcaaaatataattattaaaatatgatagtgtctttaaatgagagacattcagttaaaatgtctatgaaaagacattatgggaaggagaatttttatttaaagacattttcatattttaataattatattttagttcttttaatagtttattgtggaggaagacatccaatataaatgtgcaatgtggatggtgtaagatgatcttaagaagataaagtctttttatatcacatgaaaagtctattttgttaataaaaaaaagtatatggaaaaacagaaaatacatatatttatgaaaagacagtgttgccctacagagccaatagaacccatttgactgagtaaaatgctgtaaacgaatgccccacatactattaaatagtgagattctaactcaaaaacaattgacaatgaatagaaaactttatatattatatatctatatatatatttttgtagttattttaacaaataaatcttagagttggacttatttacaacccaatgccattagcattaaatatttttttcaaaataattaattttactttaaattcttaatttaaattgtcaatcacattatcaatcaaatttaatccaaacaaacttcacatcaatcccttaaaattagcataaacgtatttgttaacaatattttaaaacaaagttttttgtttaaataaatattattcttactaaacgttttttgtttaaataaataaattctgtatttgaacttatttacaatgtcatgctactggcattaattatttagaaatgaaaatatttaattaacgatttaaatcttctaaatctttgcttttagagttattatgtcattacctaaaagggaaaaaatatatttttttaaatattattatttatatatttaaactttataaaacattattaatatttaaacttataaaaagtttaatatataaaaaaatttaacatcattatataatatatagtttaaaaaaatctcaaaaacatttccgtcatattttgtgattcaaaattttaaaaatgaacatatattgaccaaattggcgaaaaatgtgtgggttcaacatcccgcatcgactaaaatatttagacaataattcataaataagatcaatattaataaaataaatggtttttttgcaggacgggttttgcgggacgggtttggcaggacgttacttaataacagttgtaaactataaaataaaaatattttatagatagatacaatttacaaatttttatatatactaactttaaaaaatcatttgtctccgcggtgtaccgcgggttaaaatctagtaccacttaatttcatacttaattttcaatgtgatatattgttatccttaatacataccaacatgtcgtcttccctctcatttcctctcctcaattttgtttatatagatgcgtaatctaaaatagtgtcgaagtgaactttaattattaagatctcttcattcatttgcctttttcttctcatgtttttgctttttatagatgaacaagcccttgcaacccaagcagaacaccgcaaactcaatgagtcacttacttacatatactttcgttattttatttatgttattgttttgttgattttcatggtttaatacatcatgtcatatgtatattatgctggtgttgtagaagagacgataacc

SEQ ID NO: 4999 - DNA, 3000 bp, Unknown
  misc_feature (1)..( 3000): cDNA_ID_1826941_gDNA_ID_1620753_Annot_ID_49844 3000 nt of promoter + ATG
tcgtcgtacgtactatagaaactgattgaaaatgatatcgaggaaacataatttgtcgatcggtgttggaaccttccatgcatgactccaattagagttctggaacttttggtttctcattagtcatgactctgattggacaagttctagtttttaacgactcatgactcttcacatgctccgaaagttcatcaaaacatttatcaaagttttacatgtttttgtgaacaataattatcttataaaaacatcaaaacatttatcaaagttctataagataattattgttcacaaaaacatgtaaaacatcatatcattttgtgggtttatattcaggtttaaagagtgtatatactatatatatatatatatatatatgtcataaaaactatgaaaaaagatccggcgacaaagacgaggaacgcttgtctttaggaaaataacaaaagtgatttgttttgatgatatattttcgtaaattcaaaacagaaagaatacgttatgtaagggagctaaatgagctcttaagatgcttaagaaaatggaattgtgatcgattgcgtacaaaacgtaaattcctatctaccatttctagtggtcggtttagccatagaatggccaatgtgattaagacaattgttgaaaactggtcacatgtatgttacaatttccggtactatgttcaaacagagaaaccagaatggattggttacctacgtatacatacttttaattttaaaagtttagagagcgttagatctaaacagttaatataacttaaacgtaatttggaatgtaacatcaggagtcacaaatgaaatgagtaaatagatagtataattaaataagaagcaagatttatttagtagacttaatagccagatcgattacaataggacataataactcataaatccatataggaatgaagaggtaaacattattaacctcctaaatatcctaaagcagtagccatagcaatggcagcctgagccatcattgaaaaacatgatacgatcaccaagaaacatccccatttcaacattttcacgatatttataaactcagcttaaatatgaaattattacaaaatatctttctggtttttaggtggggctgaaatgcttctagcatgatagatcaatttatagttgaaccatgcataaatgattaaatgatactatcagactcttcaaaattctttctcttctcgtaagttggaaattaataaaggacagtcaaagataaagaataaatgatttggaaattggaacattttgtcatgaaagtgcgtcgaaccaatttaggcttaagctcaaattgtatatgagcttattatagaggcccattcattttgtcaaaaagaaatttttttaaatatattttttacttcctcctctgcaaacatgtaaacgtgggacgagtagtcttacttgccgtgtaaacttaaatattggccatgtttggtccgtatcaatacaagaagtcaagaagaagacgtgttaagaaagaaattgaggaaacaaagcggtcgatgtggaaccttccgtgactccaattagggttctgaaacttttggtctctcatgcatgactccagttatcattagttcaataccaattctagttcttgacgactcaagtcaagatcattcagacggccttttaaaatctctttaacgttcgagacaaagataaaatccttttattttttcatagagaaaattgtaaaagaggataacaaaatagagagaatttgcttttaggaatttccgattgaatatgtagttggtaaagcctagttttatataattatatgtggacggaaaaagattcattatctcgcttatataaaaacataccaattaattatagtctatagtcacaattcatcatatattctagactttaaaagttgattttagaatttctgagaatcgagaggcaacaaaaaaagtctacaaatttgactaagaagaagcaggcacatccgccttgacgaagaaaacggtttggttgggaatgatggagttgaccggtagacaagtttcgtcgaagaaaacaaaaaaaaatagaaacacaaaatcgggtttaattttgcaatttcgcttcagtagaagacttgttgaattcaataacaatttagtttcgttcgacgagtgtaataacgcgttgagcattaataactatcgaggggccattaagcattaaattaccatttaattacgaattttaggggttgtttccttcatcgtagcttatcaaattacacacactcatacgttcacaccttcccatttttccaagaaaaaacttggttcatatttcttctaattcatacgttttgtgatagtattttcaacttttgttttaaagtttttcaacatgtattaccaattcaatttggtaatccaccatcatatatttatatattgctcgaaagatccggtagcagttgagtctgtctgacaaattaaaacactattcacgatttttttctacagttttactttaatcttaaaaaccaatattattacaaataaccaagtcaaagataaggtcaaccccaccagacaaaacttagttcacggcacaacaagactaagcactgaagtctttgagaggaagattttgaaaatctcgtgcaaagactaaaacatccttctttactatatatatctttcgctccactacgaaggttattttcgtaattcgacacaattccttacagagaataagcgaacagatcaacaactactctgctcttacaggcgacgacgtcaacaacaacccaaaataccaaaaaccctcaaaagtctcaaacaaaactcaaaacccaacaattaaagaaacaacatttcaatatacagatttacttccttttacagattttcctaaaaaaccgaaattgaaacaaacaaaaccaaaagacgttaccttttttccattgattcctcaattctctaaacaaatgagttaatcttccatggctgccatgttg

SEQ ID NO: 5000 - DNA, 3000 bp, Unknown
  misc_feature (1)..( 3000): cDNA_ID_1826937_gDNA_ID_1620753_Annot_ID_49845 3000 nt of promoter + ATG
tttcataaccaatctttcttcttcttcttcttcttcttcttcctctttccttatctctccatctctgtggagagacacaaaacttccaaaaaggaacattctttcagttctttacttaatctttcacaatgctaaatcattagccgttgataaagtcttaatctttgattcattcaaacgcgtttttgtttagtaatgtcgtcgcgtttttctttgacggtggtgtgtttgattgctctgttaccgtttgttgttggtatacggttgattccggcgaggatcacgagtgtcggtgatggcggcggcggaggaggtaataatgggtttagtaaacttggtccgtttatggaagctccggagtatagaaacggcaaggagtgtgtatcttcatcagtgaacagagagaacttcgtgtcgtcttcttctagttctaatgatccttcgcttgttcacatcgctatgactttggactcagagtatctccgtggatcaatcgcagccgttcattctgttcttcgccacgcgtcttgtccagagaacgtcttcttccatttcatcgctgctgagtttgactctgcgagtcctcgtgttctgagtcaactcgtgaggtcgacttttccttcgttgaactttaaagtctacatttttagggaagatacggtgatcaatctcatatcttcttcgattagactagctttggagaatccgttgaactatgctcggaactatctcggagatattcttgatcgaagtgttgaacgagtcatttatcttgactcggatgttataactgtggatgatatcacaaagctttggaacacggttttgaccgggtcacgagtcatcggagctccggagtattgtcacgcgaacttcactcagtatttcacttccgggttctggtcagacccggctttaccgggtctaatctcgggtcaaaagccttgctatttcaacacaggagtgatggtgatggatcttgttagatggagagaagggaattacagagagaagttagagcaatggatgcaattgcagaagaagatgagaatctacgatcttggatcattaccaccgtttcttttggtgtttgcgggtaatgttgaagctattgatcatagatggaaccaacatggtttaggaggagacaatatacgaggaagttgtcggtcattgcatcctggtcctgtgagcttgttgcattggagtggtaaaggtaagccatgggttagacttgatgagaagaggccttgtccgttggatcatctttgggagccatatgatttgtataagcataagattgagagagctaaagatcagtctctgcttgggtttgcttctctgtcggagttgactgatgattcaagcttcttgtgagagttttaaagttacattctttttcaatatcttctgttgtattacagatgaaatatcattgttcaggtgagtgattctttgattttctgttgtacaaatctattttagagagggaagatatatattaggctgtggaaaagccattgatgatcctttttgttgagaattcttttgtcattctggcgctcttgtgtttcaatcttttcttcttaataaaactcatcttgaagtgccaatttgatagtgtttaatctagtacatactctgttttctcattttgaattaatccgtagaaatattcacaacgaactctatcaatctctatcagagcctaagtcatgttcttttgagatacttttcattcagaccattcaagtagtctagaatgtgtacatgtcttaaaaatggctaaaaagattatgatcaatgtgacaaggtttgtgatgacattgatggcttttgactcattgggaatctaagctttggtattggagaagcaattatagttgttcatttatctcttccaagttccaagtcttctcgcaatgttattaaacctggtcaagaaagatcataaatgttttggttacaaaacagttacatgacaaaacaccgtcatttgaaaactactaatgggctgtattaaagcccatttacgtttttgttatggctaatcaaaaatcgggtcagattcaaagaccattggttcataactatttttcgtgtgtagttgagtttcaccgctgagaagaagaatctatggggaccctgacatccacacaggtgtcctgagaagaggaggcataacatttattacaccaattttatatttactaaaattagtgttttctaatcaaatattttactcataaagaagctcgtgaagtagtacttaacagtgttatttgtctcttgatctctctctttgattgcttcgaagttatcacttgcatattactactagactactaaatggtcccaccgactcttgtcttcatttccgatctgagtcggatctaatctcttcttcttcctcttgcttttgtgttcatctctctctctctcacccttgttaaatctgcatttaagagtctttcttcagctgagtgaaccaaaactatttaataattgttattcttttgacaagtcttctcttttttgttcaaagtcttcaacttttttttactatagagaactttttctctgtgtgtccactagaagcagcaactacaagagcttgaaaaaggtggatcatcattgggaatttaacaacaattttggtttgtgggttatcttcacttttctggtaaggtttggatcattatttcacttttctcttagattctctctctccttctaagtgaagtttggtacttttcaatcattgatggaagatttggtctttctttttgtttcttcaattatttgaaagcttcttcattttttaagtacacactactgtctacaagaatctgagtttgctcactaagagggtttagagaattacaaaaaggagaaagtgaaagtagctactagatctttcttcaagatattaatggctatggtttgattcaaatttacttgattttgtgtgaattaaggttcttgtgctgagcattaatg

SEQ ID NO: 5001 - DNA, 3000 bp, Unknown
  misc_feature (1)..( 3000): cDNA_ID_1808026_gDNA_ID_1620753_Annot_ID_49847 3000 nt of promoter + ATG
agttacgtctgatgaaaagcctgaaagcaagcaagctgtttctattgagcgtgcacacgattcaactgctctcgctgtggatggattattagatcaaagtaatggaggaagcagtatagtacacatgaccggtaacacctcaaaatcttgcttagaagttagttctcttggaatttttcattttctttgtacagttaatgaatagtttcctctttacttggtcaggacattgcaataataatctgaagcctgtgacctgtggaacagagttggagttgaaaatgaatgatggtaatgggccaaaattagaggtatagtttcagtgaagcacgttttagtcccatcatcttatattttgatctgatactttctatatagatgactcatttcaaatgaaggaccgaattttgttgatatggaacaatatctcccattgtttgcacttggtgcttaggtccttcatatggaacttagatagttttaaaatttgaagttacacacccttagttctgtgttaaccaagaggtggtactgataaactttgtctcacaggttggtaacaagaagttattgacaaatgggatcgcggtagaaataacaagtgaccaagagatggcaggaacatccaaagttgaaagagaagaaggtgaactttctccaaatggagactttgaggaagataattttgcagtttatgcaaaaactgattttgagaccttcagcaaagcgaatgatagtactggaaataacattagcggagatagaagtagagaaggggaaccatcttgtctggagacaagggctgagaatgacgctgaaggtgacgaaaacgccgcaagatcatcagaggacagcagaaatgaatatgagaacggtgatgtttctggaacggaatctggtggtggtgaagatccggaggatgatttggataacaataacaaaggagaaagcgaaggtgaggctgaatgtatggctgatgcacatgatgctgaagaaaatgggtctgccttacccgtttcagcacgattcttgctgcatgtaaagcccttagtaaagtatgttccttcagctatagctttgcatgacaaggacaaagactctctgaagaactcccaagttttctatggaaatgattcgttttacgtgcttttcaggctgcaccgggtaagagctaaagatcatatacagtttgaaaaaattataaacagtataatctaaagtacaaagagttttcactagctaactttacgctattactcttgacagatattgtatgagagaatactatcagcaaaagttaactcatcatccccggaaggaaagtggaggacctcaaataccaaaaatcctactgattcctatgctaggtgaaatttgctttttattgcagagattgtgtgtgtttctgggattcatatgtgctccatacttataactttaattaatgtggaacagattcatgactgcactctacaacttacttgatggtacatctgataatgccaagtttgaagatgactgccgagcgataatcgggactcagtcttatattctcttcacattggacaaactgatccataaattcatcaagcatgtgagtatttttgctctttgatgttttctctatgtattcacctctctatctttacttgctttttactaacatacgtgtggtcattcttcagctacaagtagtagtagctgatgagatggacaacaagcttcttcagctttatttttatgagaaatccagaaggcctgaaacgatttttgatgctgtgtattacgataatacccgtgtcctcctccctgatgagaatatttaccgtattgaatgtgtaagtttttgctgcatcttacattagctacttatattctgtcgatgcactgctgatcatgcttttggactccaaaacctcatgtgtatgcagagattatcaaccccagcgaaactctctattcagcttatgtgcaacggtcttgataagcccgatgtgacatctgtatccattgacccgacctttgcagcttatctccacaatgacttcctctccatacaaccaaatgcaagggaggatcgcagaatctatttaaataggtaaatgtaaaacatgaacaaatgactgtcccttgatctctgaaacctagtgggtcactcatcaaagccaatgccatttttcgttttctccaggaacaagcgcaaagtttgtcgtgaagatgaacagttatacagcacagatgaagttaagatcaaaaatggtttggagtgtaagatagcttgcggttcttcaaaggtaacacttttatcttcttccctatatcacgcttaccgcttatgagtatatccatgagagaccagcacttgaaagcacgttcttgaaaatctcttgcaggtctcctatgtactagaaacagaagatttgttggtgcgagttaaaaagagaagaaaaactttgtgccacaatcaggattcttgggtaaggcaaatgaggttacaatattacaaaaataacttcttgtgaccagcctgtaacaatctggaagaaggataccaaatcaactcaacttgttcattcactctccaacttaacagagacaaaacaaaaacaaaagtggcaattctccattgttgacttcaccggatagagccaaactgcattctctatcttcataagaagaagaagcaacaaaggatttggctttttgttgtctgtgactgaaaaagaaaacaatcactcacaaaaatgatgttacatatgtaaagtttgtctttattcactctcttgttgtaaagttttgtatgttgttgtaacatttatcaaaaatttcattttgttatggtatgttatatagaaatgagtcaaatgaccataaaaggtttgaccttttccataaacgacgcttcgccctctcctaactctttccctcactttaaaaagattcgatttttgactgcaaaaaagagaatttctaaaagcaaatcggagagcttcggcgatg

SEQ ID NO: 5002 - DNA, 3000 bp, Unknown
  misc_feature (1)..( 3000): cDNA_ID_1826929_gDNA_ID_1620753_Annot_ID_49848 3000 nt of promoter + ATG
atcttcgttacgtccactacaagttttattttctttgttcattgcctttgtagttgctagatctgttgcttgttgtaatttgtattcgtgggatgatatcgagttccttgaatatatttttcgtaatatgtgataagatatcaaatccgactgatgaagtttaatcaacttgaagtctcaaaactagatatgagttttgttttgtccccaataaaaagtgttaatctaatcccgtcagacttaatactatggcaatctctgaattggggtatctttggttaagaatgagagtaggacatatctaaatccaatacttgactggtttgccctgtgtttgaattgactacttcacatgtgtaggttacgtgtgataactaataatggatcaccttgaggaatgaattgttttgttgttaagactttggggttgttcaaggatccaatattttttgaagaaaccttgcaccatcttttgattctaataatgtttcacctttttttttggctgcctctctttgaacaataaagctttcctaaacttcaaaccatggttggagaaggaggcgcacacaagcctactacaaatgacgcgcttaaataccttagagccgtgaaggctaaatttcaaggtcaacgtgaaaaatatgacgagtttcttcagatcatgatagattataaaactcagaggttaaagttctttctacttttatgtttgcatttggtcttggtttaggtaaaactccatggtttctgagaactgattaccgactattgtgttgtatagaattgatatatctggtgttataataaggatgaaagaactcttgaaagaacaacaaggattacttttgggtttcaatgccttcttaccaaatggttatatgatcacacatcatgaacaaccttcacagaagaaacctgtcgagttaggggaagcaattagttttattaacaagattaaggtatatatgtttatgtgttataaactgtccaaggaaattactgcttttccctttcctactctcttagttattcattcatttgcagacaaggtttcagggcgatgatcgtgtatacaaatcagttttagacattttaaacatgtacagaaaggataggaagcccatcaccgcggtctaccgggaggtaggctcattgattcatactaagtttttttttttttattgctaatattttacttagtttcacacgtttatcttatcaggttgccatcctatttctagatcataacaatttgcttgtggagtttactcactttctgcctgctactccagctactccagcaacagccttgttgcattcacagttttgcatagatcatcctgatttgcttgaagagttggattgctttctgccaactatttctcagagttttttgtgacgaaaggattgctatgttacttcaatcgcttcacatataagtagttttttttttttaaagttacaagtcagagataatagtagaggttttttctttttaatatgcatgattaatagctttcttttccctataaattatagccactatcaaaattcaaaattaccatcatctatagttattcaatgcttttttttttacctagttatttcaatgcttacctatgagtttactatgtgtaacatgaggataagggttatcggaattattctacgaacaaggtgacaaagttttcggtctaccggaaagatagtaatgccgataaaaaaaaaatgaatttaaaaggcgaataatatgttccgtttttatggttttaatcaagttagagttaaattattcttctattaatgttagccaaatattattttttagatttaagcaaaatctaaccgtgtaatgtaatatagattccatttacatcaatgattttagaacattttttccccattaataattttgataggttttgcattaagtaattaacttagaaattttaagaaaaaacatctatgttgaccaaaataaagagaaaaaaaacatctattaataatatgattaatcatctaaaactttttaattacaaaattatttccaaaaaaaatgaataatttattttatatcaaaaattttcaaaattaagtatgtctctctcacataccaaaggagataaaaacttccaaaagaaaaaaaatgttaaaaataataaaagaagaagataaattataagtctcctaaaatgatacaaccaacaaaaggaagtaataaaaacaagaaaatacaactttgatttttattttattttttgtcaacagaaaaatgaaataagtaagtaaacgaaaaatttagcgaacgagaaagtgtattaaatatgtagattttaatttacttaagaagacgtaaaactcctttgagagaaatctcaatcctttcttcataaaaacataaaactctcgtttgctcagtgagtcttttctttctgtctgaaaattgttgaatagtttttgtcttctcagctgtttcgtcggaggaagcttcttcttctagacttcttcttcttcttcttcttcgtcttctctgaatttcttcggtaaactctctaacacataaacgatgatgatcttctttcgttttttatcctttctgtttgatttttgggtattacaattttaatcgtgaactgaatgtgaaataatctgaggattaagttaagatcgattttttctggtccgtctccttttgttttttcttcataaattgtttctgtagctgctagatctacaggtgttgcttattgggatgaaattcaagttcggttctttgaattttccttgtttatgtgattgattttgagttttactaggttttgatttgtagatgaacatgaagaaagttgttttcagcttttgttcttttgctgaatcccaaattttacttgaattctctaaagaaacgttctttggtcttatgagatgttgaatagctttctaaatgatctgttttttttaatggtaatgaagctctgttcaacttcaaacaccatg

SEQ ID NO: 5003 - DNA, 3000 bp, Unknown
  misc_feature (1)..( 3000): cDNA_ID_1826925_gDNA_ID_1620753_Annot_ID_49849 3000 nt of promoter + ATG
atctctttagtctaaacattaatctctattttcgattagatcatccctatactaaaattagcatttcacattttttactttttttacttttctcaattaaaaagttttaattaattaattaaaaaaaagaagaagatttgcctttttccttttttaaaccgtacttttgatgtaatccttaattatataatccaacgttaagtgtcggaaactaaaccctagagaaatctcttcttctagttctagtctcctgcttcttcgagatcgtgtgtcgtaactcgtaagctagggaagccctttttgtcttcgaatttcggtaactatacgatgatcttcttctcttattgtcattgaatgattttgtagtttctgggatgatttcgaattgggttcttcgaatttaatttcgtacctgtgtgatcaattttacctgaatttcatcaaatccgatttaaaccctcaaattagcgaattaacttcttattgtttttgttaagactgagattttaagacttctaagtgtttggttggtttgctctgtgttgatattggccactttacacaagttctcacgttggttctgatgggaatgaattagttgttgttgattttggttttgacaattatttggattttgagaaatttagcttattgcagctttatgtcttgttcaatttcagtgttgaggcaaatcatagatttaagtaatgttattaagatttctgcactctaggttctgtttcttcaagtggtaataatagcttctaggttaaattcaatgatgtgatctgttttactgaacaaaaatcttctctttcttttgataacaaaaggctagattcaaaccatggttggaagacgagtatcacctgctctaactaaggatgatgcgcattcatacatcattgctgtgaaggaaacatttcatgatgaacctacgaaatatcaagagtttatcaagctcttgaatggtgtttgtgatcataggtatgtattcttttcttccctgttatatttggtttggtctttactttcaactgtgaattgattctgatgttactagtctctttttgcagagtcgataaatatagtgtcattgcaagggtggaggaactgatgaaagatcatcaggatcttcttcttggtttcagtgtcttccttccacctgtttctgtagaggattttataaacaagctcaaggtaaacacatgctaaaatgacaaataatccttggagagaaacaccaaaatccttttttgattcctcttttactaactagagcaaatttgtccatctgcagacacggtttcagagccttgatactcatgtagtgggggcaattcgcgggttaatgaagatgtttaaagagggaaagatgtcggtaaaggaggtgcaagaggaggtaatgtttgttcttggtgggctattttgtgtacttgtgttttttttttttttttttggttctctttgtttgatttggttagaaataatattatcttgcaggtcattgatgttctcttctatcatgaagatttgattgaagactttctcagatttttcacaaagaaccctgtatcaacagcatcactactactacaattataacgagtgatgtattttttatgaatgagaatggagtgtatagtttcttttgtagaggttttaaatctttgcttttcaccatgaagaggatgagatttgaatttgatatactcagatgattgaaactcaaagtgtcacaaaactcaaaaatacttctcataaccttattttgtttatgttgaattttactgatgaaaaacctatgaaagatcaaacatttttttaaaactcatttcttagttttgttatgtacttaattaatggttgttaaaaaaagggttttgtgtaaaaaaacacttcgaactcatccatttttacaattttatccttcacctccaacatattgagattaatcctatgaagtctaaaataatacgcattgtaacccttctttgtttttttctttactattaattttgtaaaatattgacatgtaatatattaaatctaaaccctcacgatgaagagttcaactctgccttcaaaattttaaaattctaatgtatatcatcgtaaaaacgtttacaatatacgtataaatgtcatattgcgtattattttaaactttataagattaatctgcatatattggaggtggagggtaaagttacaaaaatggatgatttaacccttttaaaaaaagtacataattaattaaaatacaccaaataataaaaaaaaatcattaaaataaatagaaaatcttacataaccttggaatcataatacataaacaaaaccctaccgagactagaaactcgtctcccctgcttcgtgctcgtgatcgtgaagccttcttcattcgtctttggtacctatacacatgtgttcttcttcttttttgtgtgatcttcgttacgtccactacaagttttattttctttgttcattgcctttgtagttgctagatctgttgcttgttgtaatttgtattcgtgggatgatatcgagttccttgaatatatttttcgtaatatgtgataagatatcaaatccgactgatgaagtttaatcaacttgaagtctcaaaactagatatgagttttgttttgtccccaataaaaagtgttaatctaatcccgtcagacttaatactatggcaatctctgaattggggtatctttggttaagaatgagagtaggacatatctaaatccaatacttgactggtttgccctgtgtttgaattgactacttcacatgtgtaggttacgtgtgataactaataatggatcaccttgaggaatgaattgttttgttgttaagactttggggttgttcaaggatccaatattttttgaagaaaccttgcaccatcttttgattctaataatgtttcacctttttttttggctgcctctctttgaacaataaagctttcctaaacttcaaaccatg

SEQ ID NO: 5004 - DNA, 3000 bp, Unknown
  misc_feature (1)..( 3000): cDNA_ID_1826910_gDNA_ID_1620753_Annot_ID_49854 3000 nt of promoter + ATG
gtagcccaaagggaaactagttgtggtaagagcttgtttgactcaaaaaatggctaactaggatgatgctgaattaccatctgttcatgtttttgactagagagatgggtagtgaaattttcaaagcctttgcaaaacgcctgtgggacctgtttcagaaaaagacttaaaagacttgagactcaaggaaaataatatccattatataaagatgacaacaaatattaacggaagtaggagtgattgagaacgattctagtagaagagacggctcgcaggacgtcgtttataataggccaatggcagagatagtgagaggaccggagtagcctaaattctttaaatgtcgtttgatacacggaccaactagacgagcatcatactcagagggaaccggacacgtcttgatatcccagaagaccgatgttacggccttagcttgctgccgcgttgccttcatcatcatcttctccttttaatctataacggaaatcaaacatcagataaagcattcgaaaagatagattgacacaggttaaatcatccacttcagagaaaaagagagggacatggccgtaaacaatgagataaggatcggcctaatgtttataatgggcttgcgtttaatgggcctacagtttcttgaatcagccttatgcatgagtcctagtattttatcaacttttttttttcatctttctttagttacaatagatttaaagtgttttttgttaatgccattgcaaaatttggtaactgtttataacattgttcctcacttcaaaatttaaagcaccattaataaaagctatacatataattataacttgggttttgtgcaaaaaaaacaaacaaattaacctttcattttaaataaatgcaattcaataccgcaatatcaaaagtaacccgtataacctttattcgtgtatagattttagaaacagtataagtcaaattatcaaaactatgttgttttaagcattttaaaaataagaataataataatgttgaagggtggatttgaacccatgaactatagaacaaaccaaagcatgcataaccacatgcgccgaacaaaccaaaaactcatggctttgttaaacatataaaaatattcgaataaaaaatgtggggaacttgttaccagttttggttctttttggagccatttttttcaacacagatattgttaaggagtttcaggtaaaactgtatattatgcagggaaccacagtaggctataatgaaagtcacactgtgaagttagcagacaagtttttacttaaagatgtgagttgtgatctttttgatgtaagtcttgatgtatatgttgacaaattatataagtttgtattgcatattctatgacttacgaagtttctatgcaagaaaagccgggagaaaatttccgtcaagtaactaagagatcgtaattcttgtctgaagaacaacccttttttattatttgagtttaggttgccaacagtgaacaaagggacgagataccatatgacaaatatcctctaacgccatttcaacagttaatcaacagtgtcggctatatgcatgtgctaacaatgcacaagaacattgtcaccatcccgtgaatatgaatattaatgattatgaacgagtttgtagagttccaagaggaaggtactaccttctcatactcattgatcatatattttgtttcttgtttgttttagtaactagggttattcggattgtttttcaaaataatagtaatatgtcaactatatttataaaaaaaaaaactaaataacttttgtacaattgatcattttttaaatatatcataaagattcatcaatatatgaacatatatttttaacaattacactaattggctatatagtgtatagttccttttgtggagaggtttaagttcagttcagagattattgtacttggtaaaatatttgtccttgttaattagttcatcttctagaatacagatttgggccatgtagtttcccagaaaacaccggaaaaaaaattcacacttcacaccagaaacaataaacgaggaacagagcccaaactcatccctataattgggcccaaaaaaagcagagcaaaccaaaccaaaatcaagtaaatccatttacaaatatgctttataattattatttttctcaaccacaaatatgctttataatttatgtaaatgttatatgaattatttacgatttattttaattactttatcttggaattatcttacgaagttaatgaaaatattttaaatatctaatttatatatgtctggactaaaataaatagaaatatctgtattccaatcatcacaaaaaaaaaattctcatcatctttgatatatagaaagtttttaaaatttcagtttcacagattttaccaattatagttttataagcttatgctaattatgtgatcaatgcaaacaaaagttgacaataataaaatgaagtcaaatatgatagattcctactataaatatagactcgtgaataatactcgaatcagtctctgaggttttgctggaaaagaaaaaccgaagagctcaaaacagagtgcgtttgtttctgggaatcttcaagcctctcacttgcgaagacgaagcttactcgtaaggtgattatcttcttcttcttcttcttttcaattcctttttcgttcatctgaaatgtgaaatcatgtgacgtgacgattaggttaacgatcgaatttcttaatttcgtatatgattatcttctagtttcttgatcagcacatcttgttgttttctttcaatcgagactgattctagatgttcttaaggatcttgttcgatgaactttgcatgaatcatccatatcgacgaactggtctgatcttcttgttgttatggattaagtttcttgagatacaagaaaggcttcaatgatcaatctgatctgttttgatgaacacaaatctttatctttgaaccatggataaggtcaatttcacaccatg

SEQ ID NO: 5005 - DNA, 3000 bp, Unknown
  misc_feature (1)..( 3000): cDNA_ID_1826890_gDNA_ID_1620753_Annot_ID_49860 3000 nt of promoter + ATG
tagcataaacgtatttgttaacaatatttttaaacaaagttttttgtttaaataaatattattcttactaaatgttttttgtttaaataaataaatcttgtatttgaacttatttacaatgtcatgctactggcattaattatttaggaatgaaaatatttaattaaagatttaaattttctaaatccttacttttagagttattatgtcattacctaaaaaccaaaaaatattaattttttaaatattattatttatatatttaaacttataaattttttaatatatcacaatttttaacatcattatataatatatagagttttaaaaaatctcaaaaaaaattccgtcatattttgtgattcgacttttaaaaaatgaacatatattaaccaattggcgaaaaataacgtcccgcatcgactaaaatacatagacaataattcataaacatatcataaataagatcaatattaataaaataaatggtttttttttacgggacagacttagcggggcgagtttggcaggacgttacttaataacaattgtaaactataaaataaaaatattttatagataaatacaatttgcaaatttttatatataataactttaaaaaataaattgtctccgcggtgtaccgcaggttaaaatctaattgatcttatttttggttgataataatcattcaaaacaacaaaaactaaatttgttatctatcttaccttaaaacatcaactactataatgttctaaactctaagttaggaaataagtagaaattatcccacacattctatactatacaaaaaataaaataaaataagagagaataacataacaaatatctatttcaactctaatctttaatagaatcgaattgttccacacataacattcaaattaaaatactaaatctttgagaggatcgatttgttcaactcaaatataccacttcatcatgttaaaccccagattcttaagtcatttttaaatgtagaaaattattaaccaaactatacgtacattaatatattattaattttttaccgtagaatatgtgaaaatatatattttaatatattttaaacttagttaattcccaaggtaatatcatctatatatacaaataaataaaatctaaatattattttaaattacttcctaatcctagtatgaattatcctagactttgattgtcatggagtctcgatttgcgggattaatgtgatgtgaaaatagatgtacaatggcccatgaactcgtttggcttcggaagcgatattgtaggacataatgttgcataagttgggatattggagctctgcatagagaagtatatatgttgcatacatcaaagccaacgatgttgttcaaaagaaggtgaggggtgtggaacggatgaggagtgcttgatactacaatgaccttgtttctacgcgttagatctccattgtgttagatgtagatttacgtgtaacgctttcatcaatacgcacgagttctttaatctcactcattctttggaattagtgaagaatattcaaaaatgaaggatgagagtgtgtcgaggatactcgatatattataaatatattaaaaccaaaactatatattatttatcaatatatattatcaataatttattatttggttttcaatatttattgagctaagaattttagaagatttgatgaaagttagatttggagagatttgagggactttttaatatatatttggattgatttgttagattttataatttttgaaaaaatattgattagtgatttggtggatttacatggtaaccataattgaggaaaagaagcgtgactagataaggacatgcgttatacaatggttaatcgataattgtttattttatagaaatgttagtaagtttttttttgccattgtacaaatatcatattaaattttaaatgatcaactataaattttataatatattcgggttttaatccccaaaattttactttacagattgtataaaatttaaaataatagaattaagaaaacataattttgaagtaatatatgatttaacatatgagttgtttatacataaacaaaatgttcgttatccaacttttttctaacttaatcaacgattagtcgaaatagacttttaattagatctaaatatcatctcaatttatccactctatcactatctttaaaataaaaaaaatgataggcattttctaaaacatgtattatagtctaataaattaattgaaaataacgcggttttatgaattacagttttgtaatatgccaatctctgttaagaatattcaacttatataataaaattaataaattttattttttcgggtaaaaatattattacctttttaatgtattaacaaaaataatacgaataaatttaacgttaatagtttaatatattgatattgttatatccttaattttaaccttttttaaagatagaatttttttttttttttacttatgtctatatatttgtttccccgataaagttaagagattttttaatttatttttaaatatattaaaaagattttaaatacctacaatctgtatgaatatatcctaacaaaatatataacatgagatataaatgatactataattgtttatatttttaattcatcatatttaatcttgaagatacatatcagaggtttcaacaataaaacttaaaatacaaaacaataaaataacagtgataatttttttttttttggcgaagtcctccttagcctttcctttgtcgcccattcactcactaattcatctctctctctcgatctcaacgcgaaagcttttcttctccaaaggcaaaaatcgaaaacctgcaaaaagtttctccgccaaatctctccaaaaccctttctcctatctactttttgcttcttcttctactgcggtcgctcgttcgtctccttcttcatacgtaatctcgaagtcccgttgtttcaatcctgccatg

SEQ ID NO: 5006 - DNA, 3000 bp, Unknown
  misc_feature (1)..( 3000): cDNA_ID_1808987_gDNA_ID_1620753_Annot_ID_49861 3000 nt of promoter + ATG
aaatgcctatcattttttttattttaaagatagtgatagagtggataaattgagatgatatttagatctaattaaaagtctatttcgactaatcgttgattaagttagaaaaaagttggataacgaacattttgtttatgtataaacaactcatatgttaaatcatatattacttcaaaattatgttttcttaattctattattttaaattttatacaatctgtaaagtaaaattttggggattaaaacccgaatatattataaaatttatagttgatcatttaaaatttaatatgatatttgtacaatggcaaaaaaaaacttactaacatttctataaaataaacaattatcgattaaccattgtataacgcatgtccttatctagtcacgcttcttttcctcaattatggttaccatgtaaatccaccaaatcactaatcaatattttttcaaaaattataaaatctaacaaatcaatccaaatatatattaaaaagtccctcaaatctctccaaatctaactttcatcaaatcttctaaaattcttagctcaataaatattgaaaaccaaataataaattattgataatatatattgataaataatatatagttttggttttaatatatttataatatatcgagtatcctcgacacactctcatccttcatttttgaatattcttcactaattccaaagaatgagtgagattaaagaactcgtgcgtattgatgaaagcgttacacgtaaatctacatctaacacaatggagatctaacgcgtagaaacaaggtcattgtagtatcaagcactcctcatccgttccacacccctcaccttcttttgaacaacatcgttggctttgatgtatgcaacatatatacttctctatgcagagctccaatatcccaacttatgcaacattatgtcctacaatatcgcttccgaagccaaacgagttcatgggccattgtacatctattttcacatcacattaatcccgcaaatcgagactccatgacaatcaaagtctaggataattcatactaggattaggaagtaatttaaaataatatttagattttatttatttgtatatatagatgatattaccttgggaattaactaagtttaaaatatattaaaatatatattttcacatattctacggtaaaaaattaataatatattaatgtacgtatagtttggttaataattttctacatttaaaaatgacttaagaatctggggtttaacatgatgaagtggtatatttgagttgaacaaatcgatcctctcaaagatttagtattttaatttgaatgttatgtgtggaacaattcgattctattaaagattagagttgaaatagatatttgttatgttattctctcttattttattttattttttgtatagtatagaatgtgtgggataatttctacttatttcctaacttagagtttagaacattatagtagttgatgttttaaggtaagatagataacaaatttagtttttgttgttttgaatgattattatcaaccaaaaataagatcaattagattttaacctgcggtacaccgcggagacaatttattttttaaagttattatatataaaaatttgcaaattgtatttatctataaaatatttttattttatagtttacaattgttattaagtaacgtcctgccaaactcgccccgctaagtctgtcccgtaaaaaaaaaccatttattttattaatattgatcttatttatgatatgtttatgaattattgtctatgtattttagtcgatgcgggacgttatttttcgccaattggttaatatatgttcattttttaaaagtcgaatcacaaaatatgacggaattttttttgagattttttaaaactctatatattatataatgatgttaaaaattgtgatatattaaaaaatttataagtttaaatatataaataataatatttaaaaaattaatattttttggtttttaggtaatgacataataactctaaaagtaaggatttagaaaatttaaatctttaattaaatattttcattcctaaataattaatgccagtagcatgacattgtaaataagttcaaatacaagatttatttatttaaacaaaaaacatttagtaagaataatatttatttaaacaaaaaactttgtttaaaaatattgttaacaaatacgtttatgctaattttaagggattgatgtgaagtttgtttagattaaatttaattaataatgtgattgacaatttaaatcacgaatttaaagtaaaattaattatttgggaatttttttttaatgctaatgacattgggttgtaaatcagttcaagtataggatttatttgctaaaatagctgcaaaaatgtatatgtagatatataataagtgtgtattagttgaagatttaattcttattatttcgtaatagtaaatggtgaattaagtgcagaatcgtccgaatttagtccgatatacaacatacctcacaccattcaaagcctaagtaagtaatttattctagtttttccatcatacatggactaggggacatagtctaaaatttcaaaaactaaaataagtttgttacttgattttctcaatatattcggcaaaatcaaaagatatgataattgaattgcgactatatttcatggaattcatatttcgtaaataaataaaacttataaaacgaaaaaaagttaaattaaattcaccaagatacatcaacataataatttgtgttactcttttgatttaatcttaataaagttagttgatgaaagtatttgaccaataagcgaaagatgaacaaaaccctaaacaatagatgactcacggaaaccaacgccgagaattccgtcgaacacttgagctgcgttttaaagttctccaaatggcgccttttgcctactaaaaaacctttaccttcttcacagagatctaacctctccttttccca

SEQ ID NO: 5007 - DNA, 3000 bp, Unknown
  misc_feature (1)..( 3000): cDNA_ID_1826886_gDNA_ID_1620753_Annot_ID_49862 3000 nt of promoter + ATG
aggaatttgattggtaacaaagacaggaaggatgtgataataactaacctgttattgttgactgctaagttaaatagagccatagctccggtttcctgtgcggctgcattgttatcatgaacagctgattctagaaactgcaaaaacgcttccacgaacccattggctcccatgaggatcctggcctcttcattatcctttagcaatatcctgacattttctactactttgcactttttagctaagtcctcctctttgtccacgattgccaatatatcctgatacccctctagaacattgatttcagaatccacctcatcaggagcattgtttttttctttttgttgtcgttcagattcaatagtactactctcctccaaaggaacgactctgatatccttcggtgtgcacaatcctacactatcaactgactttgaattgggggattcagagtcagacatggctaatctccagtaattgaggtcaagagattctggtggtccagtagggactgtgattccattctgttcacaccagctcgcaatcaaacctttaacacagtaattgggagtcagggaaagatgtgggagttgctgctgagtcttgggacaagagttatgtccatcactaaaccatttctcaatacagacccgttcataagtctgtccagaagcaatgatgacaggatcatacataagctgcaaagatatgggacacctaagttcttctggtggaataggcatctgtcctgatttcctactgttcataggcttatagttaatagaaccaaacttggatagttgtcgcccaaacgcattaacacgatcttcgttaggaccttgaccagtaggggaacacggtgttgaacaaggagagtcattctcatccatcatctcacttctaaatagcttggagtattttctcatgagatgcaacagataagccacaattgactccttccgcttgtcttcttccacacgtgccctgtcaatgactttctttaaagcacgccgctccgccagagctgatctagaagaagttatactgagtctagtagctgcctggtgaaaaatttcaagttcggtactgtcactgccgttgtcaaatttcttcccttgttgtaatagtgcaattatcctatcaccaacttccttctctgatggatcaagtaggaacttggtgtgctctagttcaccaacaatgtccaaaatctgaagaagtcaaataacattagcataaaccattttatcaactagaattctaaaatcaataaacaaaaaaagccaatatctagcacataagccctggacacttattaacttgcaaaaggaaagattttgtgtgcactgatatatacattacctgagacccaattgaactaggaacaatgtcctccacacgtctaagactatcgataagtgcagattttgctttctcaaattttaacagtacagcatccccagtaatggcctgctcaacatataaaagtggaggaattcaagagagagaccaaacacacaaaagagaataatgtatccaaagaaagaaagagcaactaaccaaataaagtttgctacactcagaacagtgttgaagaatgttctttgccttctcaagtgcaatatgtaacgaacacaaggtttgaatccctgatttactccgaggtcttgcttcttccaacgaagggaagatggacaataccttgcaataaactgcagatagttccttgcacatatctccatgtaactgcattttacccagcacacaacttttagcaaagaatagagaacaccatcaaattgaaagagttacatcatagaacaagaatggaaataatactaatgccgctaagattcccatatactctctcaacacaagatttgctaacaattaacagggaaagggatcaaaggggcaagtctgaattcaggagaatcaaaactctataacatcaaaaaatagaagcaatccaaaaccaaaacacaaaaaaggagataacaataacatactaagcatatcccttgttcattagattccaacaactaccgacaagaatcttagagatagagatggttaaaacatatccatttatgagaatataaccttggcatcgctagcagcgaacaaattctcctcgagctcgctaacatccatgatcttaactcaatctggagactctaattagctagccacagctttatacaaacctgaagacatgaaacagagatgaatcagtgacgacagaagaaccacgaattaatgatatatccgacgcaaagtcttctcctttctcatttccaaattaacgaatcattgtcgtggtgaaaacaagaaaaccaaatttgatcattggaaacaaaaaccaaagagaaatcgattaccttgttccaagaaagagtttttattattatcccagaaaaataaaaataaaaagagaagagaaaatacgaaaaacggaagaaatggagcataacggaaggaagagagacgaataaaatggggatgatgatgagaaagagaagaactgtgtcagctccacaaaactcgcaaaaatctacgattagtaattgaaacacgaaccagacacgagttctcgatacgacaagaaaaaacaaaaacaaaaagagctggaataagaaaattaacgcacgtgtggaaaagtggcaacaacaataccaaaaaaaatggattaccgaaaataattttggtgaaagaacgtaccgggaccagccacaaagagaaaggcttcatgataagatacgagagagatgtcgaaaattgtgtagtagacaaatactataaaatggttatagctaatttctgtattataaaaagacttggcaacaacaataagtatttaaaaaggacaatcagttgctatcacgatctacatttggtcaaatagctcaaaagtccacctactatagctttagcttgttatttctcagcttcaacgatcattttacagagcacaacatttctcaaatctatactcagatg

SEQ ID NO: 5008 - DNA, 3000 bp, Unknown
  misc_feature (1)..( 3000): cDNA_ID_1826878_gDNA_ID_1620753_Annot_ID_49864 3000 nt of promoter + ATG
tgctgggtaaaatgcagttacatggagatatgtgcaaggaactatctgcagtttattgcaaggtattgtccatcttcccttcgttggaagaagcaagacctcggagtaaatcagggattcaaaccttgtgttcgttacatattgcacttgagaaggcaaagaacattcttcaacactgttctgagtgtagcaaactttatttggttagttgctctttctttctttggatacattattctcttttgtgtgtttggtctctctcttgaattcctccacttttatatgttgagcaggccattactggggatgctgtactgttaaaatttgagaaagcaaaatctgcacttatcgatagtcttagacgtgtggaggacattgttcctagttcaattgggtctcaggtaatgtatatatcagtgcacacaaaatctttccttttgcaagttaataagtgtccagggcttatgtgctagatattggctttttttgtttattgattttagaattctagttgataaaatggtttatgctaatgttatttgacttcttcagattttggacattgttggtgaactagagcacaccaagttcctacttgatccatcagagaaggaagttggtgataggataattgcactattacaacaagggaagaaatttgacaacggcagtgacagtaccgaacttgaaatttttcaccaggcagctactagactcagtataacttcttctagatcagctctggcggagcggcgtgctttaaagaaagtcattgacagggcacgtgtggaagaagacaagcggaaggagtcaattgtggcttatctgttgcatctcatgagaaaatactccaagctatttagaagtgagatgatggatgagaatgactctccttgttcaacaccgtgttcccctactggtcaaggtcctaacgaagatcgtgttaatgcgtttgggcgacaactatccaagtttggttctattaactataagcctatgaacagtaggaaatcaggacagatgcctattccaccagaagaacttaggtgtcccatatctttgcagcttatgtatgatcctgtcatcattgcttctggacagacttatgaacgggtctgtattgagaaatggtttagtgatggacataactcttgtcccaagactcagcagcaactcccacatctttccctgactcccaattactgtgttaaaggtttgattgcgagctggtgtgaacagaatggaatcacagtccctactggaccaccagaatctcttgacctcaattactggagattagccatgtctgactctgaatcccccaattcaaagtcagttgatagtgtaggattgtgcacaccgaaggatatcagagtcgttcctttggaggagagtagtactattgaatctgaacgacaacaaaaagaaaaaaacaatgctcctgatgaggtggattctgaaatcaatgttctagaggggtatcaggatatattggcaatcgtggacaaagaggaggacttagctaaaaagtgcaaagtagtagaaaatgtcaggatattgctaaaggataatgaagaggccaggatcctcatgggagccaatgggttcgtggaagcgtttttgcagtttctagaatcagctgttcatgataacaatgcagccgcacaggaaaccggagctatggctctatttaacttagcagtcaacaataacaggttagttattatcacatccttcctgtctttgttaccaatcaaattccttagcaatgtcactttctaacatcccattcatggtgctcttcatttgcaaaccttgtcataatctcttctgtttcgttcttttggatgcactgcaggaacaaagagctgatgctgacttcaggggtcatcccactgctagagaaaatgatttcttgttcccaatcccaagggccagcaactgcgttatatctaaacctctcttgcctcgagaaagccaagcccgtgattggctcaagtcaagcagtttcctttttcgtgaatcttcttcttcaggatacgaaaacccaatgcaagctggacgcccttcacgccctctacaacctctccacctactctcccaatattcccactctcctttcatcaaacataatcaaaagcctccaagtccttgcatcaacaggtaaccacttgtggatagagaagtcattagccgtattactaaatctagcctctagccgggaaggaaaagaagagatgataacaacacaaggaatgatcagtacacttgcaacggtgttagacaccggtgacacagtcgaacaagagcaagcagtttcttgcctagtgatcctatgtacgggaagcgagtcgtgtatccagatggtgctacaagaaggagtgattccgtctctggtgtcgatctcagtgaacggaagtccccgaggaagagacaagtctcagaagcttctgatgctgttcagggaacaaaggcatagagatcagccatcaccaaacaaagaagaagctcccaggaaaaccgtatcggcaccaatggctatacctgcgccagtttcagctccagagtcagaagtaaaacctttgactaaatcaatctccagaagaaagacaatgacaagaccattcagtttcctctggaagaaaagccactcgatccatcattgacactcctatgtaaagttgcgttttcttctgtcgtccttaacttcttacaagtcatccgcatagagaaaaaaaatatttgtacaggtcacattgtgatcacaccattttttgctaacgaatcctctctcgcgagaggtatccatgtagatagtctactgatgtatcaggttatatatatgaaacctcacttttcagtacaaaaacagagtcgacaattcttgaaaactctgtttgacatctgtttattttgacggtcgattcacaggtggaccaattctagtggataaaactagtgccacgtagtatgaataaatactatataataatacttaaa

SEQ ID NO: 5009 - DNA, 3000 bp, Unknown; identical to SEQ ID NO: 5004
  misc_feature (1)..( 3000): cDNA_ID_1826910_gDNA_ID_1620753_Annot_ID_166847 3000 nt of promoter + ATG

SEQ ID NO: 5010 - DNA, 3000 bp, Unknown; identical to SEQ ID NO: 5003
  misc_feature (1)..( 3000): cDNA_ID_2052322_gDNA_ID_1620753_Annot_ID_166838 3000 nt of promoter + ATG

SEQ ID NO: 5011 - DNA, 3000 bp, Unknown; identical to SEQ ID NO: 5002
  misc_feature (1)..( 3000): cDNA_ID_3075104_gDNA_ID_1620753_Annot_ID_166837 3000 nt of promoter + ATG

SEQ ID NO: 5012 - DNA, 3000 bp, Unknown; identical to SEQ ID NO: 5001
  misc_feature (1)..( 3000): cDNA_ID_1808026_gDNA_ID_1620753_Annot_ID_166836 3000 nt of promoter + ATG

SEQ ID NO: 5013 - DNA, 3000 bp, Unknown; identical to SEQ ID NO: 5000
  misc_feature (1)..( 3000): cDNA_ID_1826937_gDNA_ID_1620753_Annot_ID_166834 3000 nt of promoter + ATG

SEQ ID NO: 5014 - DNA, 3000 bp, Unknown
  misc_feature (1)..( 3000): cDNA_ID_3075108_gDNA_ID_1620753_Annot_ID_166833 3000 nt of promoter + ATG
gagtactcttatatgtcgtcgtacgtactatagaaactgattgaaaatgatatcgaggaaacataatttgtcgatcggtgttggaaccttccatgcatgactccaattagagttctggaacttttggtttctcattagtcatgactctgattggacaagttctagtttttaacgactcatgactcttcacatgctccgaaagttcatcaaaacatttatcaaagttttacatgtttttgtgaacaataattatcttataaaaacatcaaaacatttatcaaagttctataagataattattgttcacaaaaacatgtaaaacatcatatcattttgtgggtttatattcaggtttaaagagtgtatatactatatatatatatatatatatatgtcataaaaactatgaaaaaagatccggcgacaaagacgaggaacgcttgtctttaggaaaataacaaaagtgatttgttttgatgatatattttcgtaaattcaaaacagaaagaatacgttatgtaagggagctaaatgagctcttaagatgcttaagaaaatggaattgtgatcgattgcgtacaaaacgtaaattcctatctaccatttctagtggtcggtttagccatagaatggccaatgtgattaagacaattgttgaaaactggtcacatgtatgttacaatttccggtactatgttcaaacagagaaaccagaatggattggttacctacgtatacatacttttaattttaaaagtttagagagcgttagatctaaacagttaatataacttaaacgtaatttggaatgtaacatcaggagtcacaaatgaaatgagtaaatagatagtataattaaataagaagcaagatttatttagtagacttaatagccagatcgattacaataggacataataactcataaatccatataggaatgaagaggtaaacattattaacctcctaaatatcctaaagcagtagccatagcaatggcagcctgagccatcattgaaaaacatgatacgatcaccaagaaacatccccatttcaacattttcacgatatttataaactcagcttaaatatgaaattattacaaaatatctttctggtttttaggtggggctgaaatgcttctagcatgatagatcaatttatagttgaaccatgcataaatgattaaatgatactatcagactcttcaaaattctttctcttctcgtaagttggaaattaataaaggacagtcaaagataaagaataaatgatttggaaattggaacattttgtcatgaaagtgcgtcgaaccaatttaggcttaagctcaaattgtatatgagcttattatagaggcccattcattttgtcaaaaagaaatttttttaaatatattttttacttcctcctctgcaaacatgtaaacgtgggacgagtagtcttacttgccgtgtaaacttaaatattggccatgtttggtccgtatcaatacaagaagtcaagaagaagacgtgttaagaaagaaattgaggaaacaaagcggtcgatgtggaaccttccgtgactccaattagggttctgaaacttttggtctctcatgcatgactccagttatcattagttcaataccaattctagttcttgacgactcaagtcaagatcattcagacggccttttaaaatctctttaacgttcgagacaaagataaaatccttttattttttcatagagaaaattgtaaaagaggataacaaaatagagagaatttgcttttaggaatttccgattgaatatgtagttggtaaagcctagttttatataattatatgtggacggaaaaagattcattatctcgcttatataaaaacataccaattaattatagtctatagtcacaattcatcatatattctagactttaaaagttgattttagaatttctgagaatcgagaggcaacaaaaaaagtctacaaatttgactaagaagaagcaggcacatccgccttgacgaagaaaacggtttggttgggaatgatggagttgaccggtagacaagtttcgtcgaagaaaacaaaaaaaaatagaaacacaaaatcgggtttaattttgcaatttcgcttcagtagaagacttgttgaattcaataacaatttagtttcgttcgacgagtgtaataacgcgttgagcattaataactatcgaggggccattaagcattaaattaccatttaattacgaattttaggggttgtttccttcatcgtagcttatcaaattacacacactcatacgttcacaccttcccatttttccaagaaaaaacttggttcatatttcttctaattcatacgttttgtgatagtattttcaacttttgttttaaagtttttcaacatgtattaccaattcaatttggtaatccaccatcatatatttatatattgctcgaaagatccggtagcagttgagtctgtctgacaaattaaaacactattcacgatttttttctacagttttactttaatcttaaaaaccaatattattacaaataaccaagtcaaagataaggtcaaccccaccagacaaaacttagttcacggcacaacaagactaagcactgaagtctttgagaggaagattttgaaaatctcgtgcaaagactaaaacatccttctttactatatatatctttcgctccactacgaaggttattttcgtaattcgacacaattccttacagagaataagcgaacagatcaacaactactctgctcttacaggcgacgacgtcaacaacaacccaaaataccaaaaaccctcaaaagtctcaaacaaaactcaaaacccaacaattaaagaaacaacatttcaatatacagatttacttccttttacagattttcctaaaaaaccgaaattgaaacaaacaaaaccaaaagacgttaccttttttccattgattcctcaattctctaaacaaatgagttaatcttcc

SEQ ID NO: 5015 - DNA, 3000 bp, Unknown
  misc_feature (1)..( 3000): cDNA_ID_3075116_gDNA_ID_1620753_Annot_ID_166831 3000 nt of promoter + ATG
caacatcccgcatcgactaaaatatttagacaataattcataaataagatcaatattaataaaataaatggtttttttgcaggacgggttttgcgggacgggtttggcaggacgttacttaataacagttgtaaactataaaataaaaatattttatagatagatacaatttacaaatttttatatatactaactttaaaaaatcatttgtctccgcggtgtaccgcgggttaaaatctagtaccacttaatttcatacttaattttcaatgtgatatattgttatccttaatacataccaacatgtcgtcttccctctcatttcctctcctcaattttgtttatatagatgcgtaatctaaaatagtgtcgaagtgaactttaattattaagatctcttcattcatttgcctttttcttctcatgtttttgctttttatagatgaacaagcccttgcaacccaagcagaacaccgcaaactcaatgagtcacttacttacatatactttcgttattttatttatgttattgttttgttgattttcatggtttaatacatcatgtcatatgtatattatgctggtgttgtagaagagacgataaccatgagaaggaacttggaaggcataggcgaaaaagctcccaaattggggttattccgagcacttcacgtcatgccgagacaaaaacctctaaatagcaacgagaaagagtgtccttttatagaaagactaagtcttgtcagtgccggtccggtaaaatgtggggctaaaaattcaaaactgctaaattttgtttttgttgctaactatagggcatccataatttttatttcttaaattttcttaattttgggggtactgtttgctaattttggaatatttttgctaatttcatgattttttttgttaattatgggacttaataataatttaaaaaaacatagaaaacgtaaaaatttgagacccaatataaatgtttcaacattatgcgtaaaaggacaggccttcctaaaattagaacattttatatgatatcctcttaagtcttaagtactatcgaagccggagatttctaagttttacttttactaattaagctattgacacttgataaatgccatatttttgcattccctaaaacctcaaaactctctaaacacgtttttgtggacatattaaaatagtgtattttgtagtctcttccaggtttcttccttcttgtcaacgtcgcacaagtccgtttacggatatgggtgaataattgaatattatccatgtttccttattagcagtcgctattgtgggtttctttttggtagtctaatttattatttacttctttaaaatggggaaacagatacaaagttgcattacatatataacgcaatacaattagatcccatttgaccgagtaaacgctaagatccacacaaactcaatcgtcaactcctctctcttctctattctatatagttgcgtgaaatgtaatgaaagtgatcatcattcacttctaagatggcggtatctatagtttcttccatcattttctttcttctgtttatcatactttcacaatatgtagatggaaacggttttgctgcccaaatggaacatcgcaaactcggtgagtcttctacctgtataaatatatatatatatatatatatataaatagattacttttgagtcatgtagtcatgtactgttatattttattagttagctagttcaatatagcttatagacaaattgtttttgaaggtactaagcctaattaaaggcttgacgcgctatatgttatgtgtaacgtgcaggtggaccgaaaaaaacaatgaccatgaggagaaacttggaagaaaatgggcgccaaggctccaaaattgcaactcctgggagcacgtcacggcacagtggacaaaaaaacattgaaaaagagccgtcaaaaacaatttatggtcatcaattacgtcctgatcaaatcaaaaggggaagcccttgcaaaatctacacccgatgtaaacattcatcctcacttccacaacctcctccgcttccaagctcttctatagacacacaaggacttggtcactgatcgcactgtagcttcaaatgccaattctggatcgataaaacggtgtatattttctagtcttcttttctcgatacgactatttgtatattgatacatggaggtttatataactttggcgtgacatatgttgcctttggaatgtttaactatatattcttaagacaaagagaagctcgatgcatctgtttggctaaagctataatgaatctattccacgtacaaaaaacaacgaatgaatccctttcgaggggtttgaggaagacagatgataaacagtgttaagtccccacgtggctgagtaaactaaaacattgacatgcttgagcatgaagccaaaaatattgggatttcctatgtaatatcgcacgttcatatggttcactccttttgatagatggctgtgcgttcaggtcttggtcttttgtctctctcttacaattattaacgtatcttatcatttttgaacgtctgactattcttttcacattgtttcttcgtgtcactttcttaaaccttgtagaaatccctctccttaaagactgatcctttactgaaataaaaagaaacaccactatagtaattgtgatttttttttttttttttttgtacaatagttctcaagtcaagtgtcaattcctttattttgttatttaaaaataaaactattccgtggaaaaaaggattggacatgtaaatatggaatgaaatccacttgatcatacggatacatggtgtgcggagaccataactcaaaaccccacaacaaactaagtcctcatctcgaccaccttctctattctatataaatgcgtaaacgtgagtcggattcagacacatcacacatacaaagtaaattaggtcaattttgtgataagtgatcattaagtaacagagtgattattaag

SEQ ID NO: 5016 - DNA, 3000 bp, Unknown
  misc_feature (1)..( 3000): cDNA_ID_3075123_gDNA_ID_1620753_Annot_ID_166829 3000 nt of promoter + ATG
ttgtgccgtcggacttccacgtagcttttgctactaaagagagtcttgaagcggtcgttcatcgtcggaagagtagctacgcacttgtacttctgacctctgcgattgctctcgtcgatgatcttccatacacgaatcttgtgatcttgatgagcacttattagcttgtcgccaagaatcaccaacgatttaacccctccgtttccgttggcaactacgttacggtcatcgccggtggaatattccggtgagaacggaggttcacgaggccatacacgtatctcactgttggaagagccagtgtagagtaatttatctgagacagcgagagaagatacgtacgaggatttatctttgagcgtggctaagcaatggtgatcgacgctggagctctgatgctgaaaagacagcgaaggaaccaatggaagacttggctgagacaaaagcgatgatgacgttgaggattctgattggtgatgcgtcgatttcgtttcacattctgatcttgtttcattgcaaggcagaggacaagaacacggaagcaaacccattgttcttgaccaagctagagagagttttatgttttgtttgttttgttgttgtcgggaataatcgtggatatgctttgctttataagatgagttttcgtatcccgaggtagggaagatctggggagtttaatggagaattatatagaaaggtaaaagataattaaaagaaaattaaagtttagggtagtgtagggtgggggaactgattgacccatgtgtcgttactgtgatagtgtgatgatgtgtttgtaattaattaacatatctttgtgttcctaacttacctttttgtaattattatatttcccttataatcagttttggcttattataaagttatgtgtgttttgagttgagagatcaaacccgatgcttccaaagttatgttaaattccctttaccagggtcaaattgtaatcattatttctagttataatggtccccatcaatagtgatttccatttaaaattgttattgaatttgagtttaaataaaataatttgaactttactcctaaaaagttagtttgaactttatactttgaactcataaatttcatctcaaaattaattagtaacaaaaaaaaaagtatactattatgttcaaaaagagaaactatgcatgaatgaagaaccaatctaggaaaaataatccaaaccgtgtcttaataatctgtaaattaatgaactaatccaatcatctacactaaatacaaaaataatccaaatataatccaaaaataatactgaagtagattagtcaaaaccgatctagaaccgtcgcttctaccaggagcaccagaatcgccagtgtctcgttgttgagtggacggtggtggagatctagaaccattgaagttaggattcgcaccgtacaaatattggactccttccacgtcatcggtcgttaaatcaactttacgcctacccgtcctgatggttggatacatgatcgaaccttctaccgaggaatggcctaaccctagaagatgtccaatctcgtgaacagccaccgattctagatcaacagcctcagacacggagataaaaccgtcgcctccttcgccggagacgatccagttctcttctccgtctagatggaagtgtcccgtcgggggcgagaacgcatgtgctagcgttctcattgggccgtcgaacggttctccgtctccgtgctctccggagtagaatccgatgctgatgtcagaggtcgagaacctctccacgcgtgtgaacgttagtggagtcacctcctcccaacgagtgaaagcgcgtgagaacacgctcttgacctcttcggtcaacgcgtttcgcgggtcgaaagcgtaggttagatcacgacgatttctcggccaccgtggctctccggggaagaaagagtagtgtttaacggcgtggaagcgttgtccccgcccggcgaaggaaacctcgaaggttttcctaccgctatgcatagttgaggtgccgttgactacgtcggggttgccgcaacgtgggatcacaacgtgtttgagagtgagctcgtcgagtactccggtgacgtttagctggaagtttctctggtacatttcgacggcgttcttgagaatatcgtcgaagtcgtcagtgaagtttccggagagattagtttcggtgatgtagccaaaatgttgaaaatattgtttgagcatatagagaccatcgtacttcttgccggcgtgacatccagtgaaattcaagaatgagttccaggggttcccggtggcgtttcggagaagctgcggcggaatggctgaggagtttgtatagaaaccagcggagactggagaaggagcgaagaacaacaagaaaaccatgaaaacacaaatcctcaccatccaaaagagaaatattaaaaagattaagtgaagaggtattattgagatttacaagagaattagagagatgacatagataaaactaaacaagtttgacgttggagaaagcagaggtcatttctgcgttgcgtttggagaattttctatgttgaaaatgctgcattattcaaaggaaacttcctccgtcctcgtttcaaagggtctcacgaagaaaaagactaatgaagcttctgccaatagatagtgtcgttttatggataattaaagttgattggtggcttggtgcaatagattaggcccgatttagtcttggatgactagaaattgtgattgaccggtggtaaaggaccggttaaatgcaaagttggaaaaagaaccatgcaacaaaaatggttgaaggcggcagaatcaactaaattggttgaaagtgtttttgttttttttgggtcgttgaatgtttgaattggtcttttttctttttgtgataatttttccggaggttgttgttattggttgaaaaaatcaacgtaaaatctccaccttacacgagtaacgccatgacttgtttgttaggctatctaattttttcctgta

SEQ ID NO: 5017 - DNA, 3000 bp, Unknown
  misc_feature (1)..( 3000): cDNA_ID_2052277_gDNA_ID_1620753_Annot_ID_166853 3000 nt of promoter + ATG
actccttgcatagccaaaaatggtaaaatgctgcgaccaaaaacagcttaccacatcaatcaatataacaatcaatcatcagaaagagagaaagatagaagaagttatttatacctcaggaagacagccttcatagtaaagtgcgaaaagagctgggaatattttcttcttggcaagatcaccagaagctcccaccaccgtgatactaactgttgaaagttgttcaccgccatcagactctgctacaaccttgtcagcttcaagtgaaggaatcgttaacacccctacatctttcgcctcctcggacgagcttgactcggtggctactgatcctaaacacacaattgtaagcgcattagagaacattcattacatgcaatgttttgtctaaagtcggatactttctataagaaaatctatctaaaaccaagctgaactacaggattcaatcctatatatacaagctttcaagttaccggcaaagcaaggcataaagaagaaaacccaattgagaatccaattaaagttaccatcttgcacgacaacagaactctgaacggacctcctctgcgatctaacaacacagagctcagctagattaagcccctgaggagaagcgtagtggaaggagagtgagcggcgtgggtcaacaacattgatcagcgaagaatgatgatgattcgacaagaaaggagacgaagacgaagtgcgggagcggtaggtagggcaggagagagacgacatttttcgaatttgagacgagtgtgagttatgaattggatttggatgcaaacaaatctcacaattgcactaatgagcgaatttgtaaggacaattgtcaaattttgagccttttcacgtctcccaaaggttatgtctttgccaaatctgtgtggttttgttggtatggtttagtgaaaggttatttgcaaatattattattattcaattcacaagtggccctttgatttctcttgaaacaaggatttgcaactactatattgttgcattttcatgagctcttaaaattgataagcaatactagtagtggccctaagcaaaaaaaaaaaaatatatattggaagaattagattcgaaatttggctataatgtccaagaccaaacatagataaccctatcggcttaggcatgcatttctaataacacacattccgatcaatgactatgtatgtgtttaaaacattgctttcatcatatcacatctaacattcattgatacattgcacaaaagccttgatcttaaacttaataagtttataataattatttatacttgtctcatgtaagtttataatctatttgctaaatatttttccattacaataaaactatatcattgaaagaagcattttaaaaatcatgcattttcgctggagctattgtgatttagctcatttgtgaattgattgaatttgttaaaaaaaaaaaaaaaatcatgcatgtatatgatgagcgagagacataataatgattaatgagggtgaaatacataaacatgaaaaaaggctctatactctgtttcctcttatctgcgaaagccattaaggaaagaaacaataatcgcagcaaagaaaactctctcctctgcttctctctctctctctatctagaaaagaaagattcctcaaaatcagccatgaaagtaatgaagaaaggtaaagtgcacccatctcctcctcttccatcttcttcttcttcgaatggagatgactctctttctgtctttaagcttctccagagtgcgattctagttctagtctcggttctctccgccgaagatctggaagttcttgcttacttaatcaccaggtcactcaacaccactaacgtcgtatcttgcaagaagaagagaagccataaagctcctctgcttgactgtcaatgttttgattgctacacaagttactggtctaaatgggattcttcgtctaaccgtgagctcatcaaccagatcatagaagcctttgaagatcatctcaccagggacgagatctctgcttcccacacttccaagaaaaacaagaagagagctaagaagatagagatatcggaagaacaacctcaaaataagagtatatggttattggttagctagttgaaaaactgtgctattttgcatcaggttttgcatattctttcttcttttgggttggtggtaacaacctcaaaagaagagtgtatgtttgaatatgtcttagtttcggaaggtgggccaaaagagatgtgtctttgtttgattaggcacttcgaaaaagtccaaagagagtctcgtttagatattttggggaaggaaacacttttcctatcatgtattcatgttactctatttcggacttgtattgctttttttccggtgaagatttggtccttttggtggtataaaaatgaagaagatctatcgaaactcgagcatcttatgaggtagataggcacaggacgtcgacggttaataatacatttgcgacctatcatatgtatgtggaatagatgaaacaaactattaattactaggacaacttcttgaagcttataactctagcaaaaacgcctttgtaatgtcatgtgtggtctgctctcagcctctcaagttgttttgttatctcgaattggtcaaagtctcaaatctcaataaccttatgcctcatgggcatcttcttagagcatattctaaggcctttttctaggcccaataagaaaattaataaaataaaagtattgtatgtcaagtcacttgaggaacacaacactgtcccttcgacaaaacaattttgagtctctctattctctattctctctcctctccgcctctctttctctctctctctatctccgtcgtcgcaagagtgcatcatctttaacgccggcaccttcccgctgctctcttctaccaattctctcttagatcttctcatgcgtcttcttcttatatcttaatccttcgtcgtacaagctcgccggattgagttttcgtcttccatg

SEQ ID NO: 5018 - DNA, 3000 bp, Unknown
  misc_feature (1)..( 3000): cDNA_ID_2052346_gDNA_ID_1620753_Annot_ID_166828 3000 nt of promoter + ATG
agacttagtctttctataaaaggacactctttctcgttgctatttagaggtttttgtctcggcatgacgtgaagtgctcggaataaccccaatttgggagctttttcgcctatgccttccaagttccttctcatggttatcgtctcttctacaacaccagcataatatacatatgacatgatgtattaaaccatgaaaatcaacaaaacaataacataaataaaataacgaaagtatatgtaagtaagtgactcattgagtttgcggtgttctgcttgggttgcaagggcttgttcatctataaaaagcaaaaacatgagaagaaaaaggcaaatgaatgaagagatcttaataattaaagttcacttcgacactattttagattacgcatctatataaacaaaattgaggagaggaaatgagagggaagacgacatgttggtatgtattaaggataacaatatatcacattgaaaattaagtatgaaattaagtggtactagattttaacccgcggtacaccgcggagacaaatgattttttaaagttagtatatataaaaatttgtaaattgtatctatctataaaatatttttattttatagtttacaactgttattaagtaacgtcctgccaaacccgtcccgcaaaacccgtcctgcaaaaaaaccatttattttattaatattgatcttatttatgaattattgtctaaatattttagtcgatgcgggatgttgaacccacacatttttcgccaatttggtcaatatatgttcatttttaaaattttgaatcacaaaatatgacggaaatgtttttgagatttttttaaactatatattatataatgatgttaaatttttttatatattaaactttttataagtttaaatattaataatgttttataaagtttaaatatataaataataatatttaaaaaaatatattttttcccttttaggtaatgacataataactctaaaagcaaagatttagaagatttaaatcgttaattaaatattttcatttctaaataattaatgccagtagcatgacattgtaaataagttcaaatacagaatttatttatttaaacaaaaaacgtttagtaagaataatatttatttaaacaaaaaactttgttttaaaatattgttaacaaatacgtttatgctaattttaagggattgatgtgaagtttgtttggattaaatttgattgataatgtgattgacaatttaaattaagaatttaaagtaaaattaattattttgaaaaaaatatttaatgctaatggcattgggttgtaaataagtccaactctaagatttatttgttaaaataactacaaaaatatatatatagatatataatatataaagttttctattcattgtcaattgtttttgagttagaatctcactatttaatagtatgtggggcattcgtttacagcattttactcagtcaaatgggttctattggctctgtagggcaacactgtcttttcataaatatatgtattttctgtttttccatatacttttttttattaacaaaatagacttttcatgtgatataaaaagactttatcttcttaagatcatcttacaccatccacattgcacatttatattggatgtcttcctccacaataaactattaaaagaactaaaatataattattaaaatatgaaaatgtctttaaataaaaattctccttcccataatgtcttttcatagacattttaactgaatgtctctcatttaaagacactatcatattttaataattatattttgattttcttaatattttttttttttgggggcaaacgaaattttcttaatattttataatagagaaagacacccaattaaattgtccattgaggatgctctaaagagtcctctagtgaaggtgctcttatgactccattagtcatacactaaccgtatgcaaagaaaacctatcacttggtggtagaatataattaagtattattaacccaaagcacaccaaaaaaaaaatgtaattaaaatctgtaactaaaatgaattagtcagtcaaaaatatcataactacgaaataaatgtacactaaacactatcaaacgtcccttagtttagattttggttaataaagctatgcgtttacaggcttctaagttttaataatgttggtgcaaacgtggttgaactaattctgaaaacaatttttagcctaaatggatctaacatgaaaatctacatttttctgtttatatgtatcctaattctgtttagaaagggcttcaaacttttggcccaaaactttatatgcatgtatgatatatcaattaattttaccgatggagacttgcatgttatacccattacaggaaaaaattagatagcctaacaaacaagtcatggcgttactcgtgtaaggtggagattttacgttgattttttcaaccaataacaacaacctccggaaaaattatcacaaaaagaaaaaagaccaattcaaacattcaacgacccaaaaaaaacaaaaacactttcaaccaatttagttgattctgccgccttcaaccatttttgttgcatggttctttttccaactttgcatttaaccggtcctttaccaccggtcaatcacaatttctagtcatccaagactaaatcgggcctaatctattgcaccaagccaccaatcaactttaattatccataaaacgacactatctattggcagaagcttcattagtctttttcttcgtgagaccctttgaaacgaggacggaggaagtttcctttgaataatgcagcattttcaacatagaaaattctccaaacgcaacgcagaaatgacctctgctttctccaacgtcaaacttgtttagttttatctatgtcatctctctaattctcttgtaaatctcaataatacctcttcacttaatctttttaatatttctcttttggatggtgaggatttgtgttttcatg

SEQ ID NO: 5019 - DNA, 3000 bp, Unknown
  misc_feature (1)..( 3000): cDNA_ID_1826992_gDNA_ID_1620755_Annot_ID_49868 3000 nt of promoter + ATG
atccatgagagagtctggatatatgctcggaagcgtttagtattgttgctcgagggacatgagggtcccaacgactcgtgaggagcggggtatgctcctgaggtaccggtaactcgaggggtatggtggcttcgggtgacgatccgagagcacgctttagggtgacgacccgagagcgagttttgtggtattattttctccaagtgtcgtaactcgatgactttgtggctgagagtgagtcgacacaactctgggtttgactttgagtggggaagataatatgtgtgatacccgagatatcgtaggccgaagcctgagagtgacggtttatgctcgaagattgcggtctgagagtggagagtgagttgtgagcaacaatgactagtaaatcgtgagtatatcgactggatagagagacctagagggggtctggttggagggagtgcggactgtagtgatggttgcacggagttcctcggagtggaagggtgaagctagattcgaggacgaatctatgttagtgggagagaattgtaacgcccgtgaaccggaaaatcgattaggatttgtttttaaatcatccggtttaattggttgggttaataacaaaccctagagtgtgcctataaaagaaggaacctcgaaattaggctttagttagccacttttcgtttataaaggagaaaaagagagaaaaggagaaggagcagaatcattagggtttgggagaaatcagtttcgtcatatcaaatcgtggtaaaaggtaacgaaatttggtatagttattctcaagtcctttatcgttattctccaatttacagaattggatttggattaaaattggttgagttattcgcagttttgtgagacacgttttctcagacgcgaattaggaccagcggagattgaaactgagatcgtggtctcgtctgttttccgatcggcacgagattttgtgggcagctttgtgacgtctgcagctaggatatcactggagcgattgaatagttaacggttagcttgtattttagggtttcgtctttgagactgcttgtttctggtttttcctgtccagtttgcttcaaggttgcttttggttgtggacttgttgtaggacgtttatggactgtttcagacgcaaggagagtctctcctgtgtttaattgctcttagaatcaatttgttaaggtgagtgcgtgaccatgagcttatctgagcgattgggttgtgtgatttattttgtgtgatgatatgtaggtgtggtgaatgtgttttgggtgaattgttcaatgactgatttgtttgtattgtattcgtgattatacccttttatttgcttgtgtgtatagctcgtagatgggaggatcgcctcactaagtatttatgataatatttacgcatctcgttgtgttgttgatgcaggtaaagataaagtgtgatcgtggaatcatggctaggaagagaggatgatctaggaactcgtttgttttatttttggtatttttggttattggaatccggttaggattgtcagttattcttggttttgttggtcgaattatttatttatttataaaatagtatttttgatttacggtttaattattatgttattggttgatttaattaaatatttatgagaatatttaattatattttttttttttaaaaaaagggttgggttgtttcaatatcattcttgatccaaaaatttgaaccggtaacattttgtttggacactgtagaacgtttctggaagctgcatgtttatagcgttactaggtactaatccgtataacaccgggtaatattttttttttttttttgtcatatatatattttataaagtccaaacgagcatatagtcaatacaaagaaaggcctaataaggtccactaattgcaaaacagtacaagataaggaaaacaattttgaaacatgtgttatgcaacgtgggttatgaagcttcgtcaacttcgccgttcaccgactcatcactaaccagagttctttgtcggaaactttcgtaatcggccgacgtataatttgtttaggttcttcatgaagctttcactcctatagccttctattgtacctattgccttttgcgattgatcaccggaagaaatggttggatttaaactcgctcaccggaaatttgacctcagttgaccagatccaaaatattcttgagagaatcatcaaaacacgatgagaactccaaatcttcatatttcgtttccatcaaccgcaaccacttgattgaatcaaccaaaagtagaaccgacgcttttaacgatctattaggacaagcggggatttaccttctcttggtagactaatcaaccatccaacaatgcaagaatccatctaaactcctggaattttacagcttcaaaaaaactgggtttcaaagctgcaaaaggctacaaaagatccgaacaaagtcgaaaaattatcttaaacaagtcggaagaacaaaccggacttagccggtaaacaaagaaaaagaaacaaaccaatacaaaatcggaagataacaatgatacaagatccgattttgatttatgaaaacaaaagaagattgtagctttcctctctctaaaagatactttagaagaaagagaaaactttttttttttttctttttaaagtagcggaagttagttaatattgtagaaaaaaaaatactatagtgattttgtgatctctatagattgtttgctgacgaaattctacagataataacacttaaattttatgatgtagttttttttcattttgtcaaccatattttttttaactatttccaaatcaaccacaaaagttatgttaaattaggccaaaatggtaaaatcgggccgaagcctataaccaataagtgaagtagacgagcgacgcaaaagtcaaggttcgacataacagtgccagtgacagtgaggttatagggtttcgttgatcgtcttcaagctttgatagttaggttgtcttacttcaatg

SEQ ID NO: 5020 - DNA, 3000 bp, Unknown
  misc_feature (1)..( 3000): cDNA_ID_1826982_gDNA_ID_1620755_Annot_ID_49871 3000 nt of promoter + ATG
aatactagatagtggaactttattctacaaagaacaaatttcttgccaagagcaaacgagaggtcatatatctatcagctgcacataacaacatttctagggtcgatttctagccaagagcctatgagatcaggtaaagtaattattttcctctcttctcttgtgtattttctcatacatttgtccctacaggttctttgcatttgatgagataccttggcttgtttgggttattcaaactaatgttttgcatttgatcgttttggctctgtcttcgaatttaaagaagccatcttattcgtataatctggactaatgggtttggttattagtctatcactgtgtttatgtgtttctatggtgattgatttggaaaaaatggtcaattgttatattcatacaagaagattatatggcatcacatacattgtttatctcgatattccgtgtttcaataattgcatgtttatgttacgaactcttatcagtcttgtggtcatatgattcagcaatcaagtggcaattcatatctcaatttggagacgagaacattgatgtaagttttagaacactctttaaattatatgtgttgtttctaagatgatgcagtctccttaatgtgttcttaaagtgtgattgtttttctaactttgatagttatgtttttcagttgtactctttgttaacacattttccgtcaagattaaaagtagaaaatattagcaaccagtaagattttggatctgtaagactcttaccatgttttttttttctttcttggcaatgattttgtcgtttcattttattgtcctatttgtatgatgtactttcaggtgaaattttggttcagtagtcaagagaaaatgaggggttgtgtgtcctgcttcatggagatatctttgaggtccaaagaacaaaaaatttcgaaggtaaagcatgtgggaggtcaggtatctctctctttattctcatgtcaattgtgtcatgcatagctatcttggctttgttttggttactcacaatatctgaaaacacacactttcacaaacacggaaaaatctcaaactcaaaacacacccaaagacaacaaaaatcaaactctacaaaaaaaaatcacatcacacgcaacaaaactatagacatactcacacgaaacaaagctcaaactcaacataacacaagaaataaaatacagcacaacaaaaaactagacacatgagagaacaaaaaaacaatcaatatatttccttacagtaaaacattttgtgattctgttgctaagtcaatttcaggggaaatttctttctcgttcttttttagttttttacaactattaatcattgtttggtcacattgaatctaagtacttgttatgctactctaaaagtgaaatccaagccacacaagctcaaacggtgtcatacaaaaataaatatatttacttagatttgtttaatcatgtgatttcatgtgaagggatactcagtgatacttcaaaatccaaagtaaaacacaagtttcaaggtgaagtttctttatttcttctcttttactttttcgtcatacaaattttcttattaatacttatttcacaaagaatatttatcatacgtaataaacatgttttgtggacattgtttccttgtctagattaacagaaacaataagagcaaagcagtcgaatcctagcttggatcagacttaataaattccagtaagtttcttgattagcattatttatgtggtttatttatagtcttatatgcttagtaattgctattagaatggttttgtatcaagatggagaactcttaagctgaaaataactaaacttaggaaagtgattcaattgtctcggaaaaaggaaggatcaggtagataaactatcttcatccctttttctagagtttttgtaaacaaattatggtcttgtgtatatactgctaacataatggttttgtagaaagatatacaattcttaagcggaaaagaaccaaatttaagaaagccatatagtctcctcaaaagaagaaaggccaggtatataatttacacacactgatacaatgttttttggaaatgtctgacgtatttgagtggttttcaacttggaagaactaataaggcatatcacatttctctactagatctttattcccatggtacaatactaaggaaaacagggatcggattcttcttgttagaaagtctcgtgcatatgagacaacaaatatattcttcagtgctaaggtgattaaatttttttatcacctcttacaatagttgtcattctcttgatattttctaacttaaagggttatgttttatattcgggattttcgttatacaacatgtttcgtgaagattatagaacaagagatgaaaaatcagtcagcctctgtaagattcttaccatattttttcttggcattgattttgtagtgttttatatattatttgtatgttgtgtaaggatcctgttttgctctgcacataatgtttgctaacaaaattctttgaattctagagagtggatccttattctgaaaagaacaaaggtccttgccaagaacaaatgagagacgattttgcagcaacagcatatgagaagtcaggtaaagtaaagtttcctctattctcatgtgtatatgctcaattctcatgtattcttcctaaagtttcctctattctcatttgatgagcctaggtggcttggcttgttttggttcctcaaactatctagaaacacacaacttcacgaattacaaatacatgcaatcacctaaattcaaaacacaccgaaagacaacaaaattcaaacataaacacgtgaaactgaaacacgatacaaaaaaaaaaaacacgtcacatagataaactcaaaacaccctcgaacacaacacaacattttggtttagcatgcaaaggggaaagactcctacgtgatccctttagtcctaaatgcaccaatctacctccatatgaaataagccaaccatg

SEQ ID NO: 5021 - DNA, 3000 bp, Unknown
  misc_feature (1)..( 3000): cDNA_ID_3075288_gDNA_ID_1620755_Annot_ID_166917 3000 nt of promoter + ATG
cttggatgatgttgtctcatgacttaggttctgctagtttttattttcgtttgagtctaggtttcaaaattagggtcctaacataggaagctagagagacttttgttgaaactggaagctcctatattttttaaagaactaattgttttgttgaagacttgctaggattttgttagttgccttgttcctgactatgtaaacagattattgccggcaaaagcttaaactaataggtgtatctatcagtattcagtatttatcttagcttattaagctaattaaaagcttaactttgatgaatccgttaaacttttaccaactagagagtaactcttaattaaacagcaccaagtggtcacagttagtcatttggtgctcttcttaattacaaagtagaaagattatgtataacctaattacagtcaagctataaactcttaaggttaatgtatactctactctccatttatttattagtcatttacaaaagaaatataacgaggataaactagtaggtacaaccacgtaagagataaatatttaggatcaaataaggaaacaaagtgtttaagatagaaagtaaaatatcaatatatagatttttgcattatgaaataaatcttcaagttggaacttatttacaaagaatgtcattagcaatatttttatcaattaattaatatttctaattactaggattttcttatttaatatatctccatcaattctaattagtataaaaaaagataaatcttaggacattattaatattactagggcaaaacctgcgccaagccgcggacttcttttgtttaatgaaactttgttaagttgtatgtaggtattgaatgttatttgtcataattcatgatatatgtagaacaaaaatattcattagaaagtgattgaaaacataatgcattttgattttttttagtaagatctatatagcctttataagttttggaagctaattttttgttttgcgaacatatatttaaaagagccattaaaaaacaaaagtgaaaagagttaaaaatcaccaagtgctaattctggtgaggttaaagtcattttagattcttaagaatatgttatatggagtgatcatattggattttaatgttcccaatgcatacttgattcatatgttgaagatgcataaaaagctaaaatctatgtttgtttgtttttcagaatttgaaaattgaaacttttttttcttcataagagtataggacgtactcaaatgattattagttagtgattaagatccacaatgacgcttagtaaatctgataagatccttgaatattttgaggaagaaactcaaaaatctttgatatctcttctctaagattcttcttccattgaccttcttcctcgttgtttcatcttgttaagacttcattctgtacggaaataagctcttgaactaaaaaatggatagtaaattattgactttatggacttttaagccaacctataatttattgacttttatttggtaattatatacatgtgttagattatcgttttaagttgttatattgtacctttaaaatttacatttactttacttagcaaccgaattatggtttattttcttcaatatctgattatgtgcatcgaaataactttgaacgtctttattaaatttcacaagtctatatagtaaataattagtaattaaattcaatgatggaagaaatagtaaataatttgaatattgattgtataaagtatttagagttcttttgattaatatcaatatatcaatattcatatatgttaatctcacaaattaatcaagattttgtcaatctcacaacttcaaatctattgaatattctacaattttacactcatactataatcgatatgtactctctttgttcctaattatttgatgttttgaattttttacttgttctatcaagattgatgtttagaaaactatcattattattttagtttgtgacgaatagtgaaaggagagaagtaaaactaatattagtattaaactaataaataattattaaaataataagtcatttttttcttaattcctatgcgaaatccaaaacatcaaataactaggaatagaggaagtatacaagttcaaatttgaaatctttaagtcaaagaaatattacatatcattttcagaatttaaattaaactcataaacactcacgcaaggattttcagatggtttttagaagtgttgcaagtttttaagattgttacatgtttttattgttttgagtgttacagattactatttgctagttttggtttcttttgttcctattttgacattgttacagatttatgttggtttctactttgacattgtaacggatttatgttggttctcattgtcatttgttaagatttaaacaggaatcaacgacattacattatctcacttactacatgccacaatttaaattgggaatcgacaacaatacattaattcacgacatctcgtctctcatgtgtttcagctcacaattacaacgacaacatctactctaatcaaagttgacttagccatttcacgacccaattcttccatattcttcatcttcttgaccatctcttcttccatatatgatgtaactgaaattacaagaaaaaacatgttgtcactgaaattacaagaaaaaaacaaaacatatgttgtcactaaaattacagaacatatgttgttacatgaaaaaacaaaacctggaactctttggtagatgatattgaatgcaacttcaatggtagatctcacgggacgatagctaacaagtcactttctttgcaaaagcaatgctttgcatctgttccaaaatcaacctgaagaatcaagagagatgtctcattttcacaagtatgattaaaagtcatcgtaacaaaataatgtttttctcaattaatcataaaatacaaactttaaaggcgctcatataacacaatttgtaagagatacaagagcatgcatgaatg

SEQ ID NO: 5022 - DNA, 3000 bp, Unknown
  misc_feature (1)..( 3000): cDNA_ID_3075236_gDNA_ID_1620755_Annot_ID_166939 3000 nt of promoter + ATG
gtttttgggaaagaagctaaacatatattagaaattgatttaggatttttttttaaaaacaataacgacatgaaattgaacttgtctagaggacttgtggtatattgttacttaataacaattggaaattacaaaatataaatattttataaatagatacaatttgcaaacttttatatatactaactttaaagaataaatagtttcacgattatcgctgattaaaatctaattaagaataataatgtttcacattggacattaagtaggattttaagtagtgtatatataagatatgaacctttctactcattattaattagttttaagttgaaaattcaccgtctaatgaaaacatgaaatcatttttctttcaaaactttatatcataggccagccttgagctcacaagtaaaacatacgagtataataaaacaaaaatgagaattaaatataatgaaagtattcatcccaggccagccttgggcacgagtaaacctttgggccgcttataaccagcccatattagtgcatagatattattgcgcaatttatggtaaaacacaacaaataaaagagagattcatgcgcaaatgatggtaaagaaaataatggaccatgcgaccaacaaacaaacaaagcattcttgcgatcataactacttctttctttcttctttttattttaatctcaatgtcttaaacttaattgattggtttatgaaaaacagaacaaacaaaaagaagacttgattgaaattacaatctcatcacacctaattacttctgtcatatctgatcacaatcttctacttcaagcctttttttttcttttaacaacacttctacatcaagctagggttctcttttatttttgttttcaccttccatttttcttatttactgttttcaacttttaaccacataatatctgttactattaaagactaacaccaattaatactgtttgaaaaagatattataacttctttttttgggttaaattatttataactatttctttaaattttagatagaattttcataaatacaacatttcttaaagatagcatatgaaaatatttatgagtaacactgaaaatcctgttgtgtttttgtggtaatttgttagtgttaataaattaactggttcgctgaattgggttaggaaatgtgggaaaagaaagaatagaaaaaagcaatctcgaaagctttcattgtgccgcccgtaatcatttgaattccataggatccaacgtctactattcatatatgatttcttcttttatttttgtggaaataacatctcccaccactttcaaaaataaaataagaacaatttataaaagtcactaatacaatctagagagaaggagaaattgagagaggagtttattacgattacgaattctgttttcatgaaagaagcaaaactatacaatatgttctttatatacaagtatctaacttaaccggtcaactgaacccgaaaattaatctaaagtttaaactaaaactatatgtataactcaatagtcgttgttacataatggcaatgataacggctaaatatatatgaacaaaacccacaaatgtatttccctataacaatgcagtattatatccaaaataagttcattatatttaatttccataatattattgaatcgctttaccaagttcaatttcggtgtttccaaaagacagtgtttttatttcttagtccttagaaatattctctttcctaacacttcaaacatatataatctactccaaagtcacttatatatataaattgattccaaagtcacacatataaaaaattgaaaatacgatacgaaagcaaaatatacaaaattaagtatatgaaaaagagggaggaattgttttagggcatataatgctgcttagtgaggtatcaggtgggccgacttacgagttacgactagagtacgttttcgttagctgacttcgatggatgctcgccacgtgtcaatcttgaatatttaaaaggtcaaccatcatatgagctgcaagaagaggagtgggttttacgttttaacacaagtactaattacaattcacaactataaaaagtagtctacactaactataccattcatgtgtccgacaaaaaaagaataaaacataagatttacttttcgattcggatttccaaatccatcaaaaaaacgattgaagtttgtaactattttgccaaactatcttgtgaaagatactaataaattcataataacaatacatcctgataaacagttgaaataagctttgacgttttaagaagaaaaaaaaaacggaataaataagcaaaagacagtgaaccaacacttgattttctctacacacgtctctctttctccatcttctacccgttataaaaaacacacaataaagtgcaaaaggcaacgaatcaactcttaattttcctcttcacaaatctctattctctctatcccatcttagaagttacgacatccaagagctcatcatcccaagttctttgttctggttcgaatggtgtgatcgatgaacaacatcatccgtggattgtcttgtcccttcaagttcaacacttgtaattaaggttcgtgcatgtaagttctctctagtcccacttctaaatctagtcaaaaatcctccatttattgatagacctcttatgtgaaattagttgaccaaattatagagatatagagggatctatcacttcttcaatggatttgatttacagatataagattattgtttttaattacaatgtggtcttctcacacaatagtctattaacgtcagcaaacgggttgcttctaaaagctaagatttctgtgtaaaatgcaaaatgagtgtttaaaaatcatttttgttgaatttgagagttgtgtattgatgaaaccgtgttttcagaaaatactatcttgtggaagagaagtaataaatcaactcaacagaaaaataataaaagaagaaaggtgaaaaaatg

SEQ ID NO: 5023 - DNA, 3000 bp, Unknown
  misc_feature (1)..( 3000): cDNA_ID_3075228_gDNA_ID_1620755_Annot_ID_166944 3000 nt of promoter + ATG
atgtacaagggttttttaaactcttgtaaagttttttaaaacctttaaaaatctcttgtaaatcttgtaaaacccttttaaaatcacttgtaaatctatttctcgccaaaaaaaatttacaaggatttttatagctgtgaaaaattttggcgggaaaaaaaaatttggtaggaaaattttagtttccaattacatgttcctattagatgaggataatttggtaattctgttcaaggaaatgagtatttttaaaaatggacaacacgaaagagtatgttacaaaagagtagtaaaaaaaaggtagttttgcaaatctccttcttcttttttggttaaaaaccataaaattgcattttcccgacacaacaataaccatatagtttctttttttgtcatcgacaacaaccctattgctttaccaaaacacacaaatctgttttctcgcaaaaaaaaaaaattatggaattttttaatagtttattcgattataaagtcatcaaaaaaaccaaaatagttaagattttaataaaaatacatatagcttaaaccatatataaattataatcaacaaaaaaagtgtactcaagaaaaagatacatgtaatctaaataaaaattaaatagttaaattcggtggtgcaaaatattagcattgattgaaataattgatgcattttgcatcggttaaaagaattatttgaattaatgttaatatgtatcagctgcaaaatatgaggttaattttacatcagttaatataaatgatgttagtatttacattaatttattaaaataatcttaatatttaatttcgttaatattaaatcatttttataataaccaatattatttaatttcattaattaatatggaagcaaaccattaaattcattttggaataatagttgctaataaactttcttatatggaggggggacataacagatattctctgttagcctgtaagactaaaaatagcttggttgctctccacctcttcatcgaaattgtttcgatttcccttatttgtgtcaatggttgtattagaatgtttatgtatcttgtaaattttttatgatatattatatttggttggctggaaaaaaaaataaaaaaactttgttacaccataaaaaaaccaaagtcgcttatataacattcttaaatgtctctttttttaagtgaaagtgatgtgggcgtagataaattagcatcatttgtttttacgacaaatgcttagtcattaataaattatcgattgttattgattaaaattttctattattttctatatgacgtaaattcatatatttatattaatattctgaaagtaatgcaacatcatcgatgattattgtatctgattttaaactataacgtacgtgcgggaatttcatattttatttttaaaaaaatctaaactaatcaaaatatttttaaccatttgattatgggtgttaaataggatatgaattcagttttagtttcggttatatcatgttatattagttattttggaacggaaagctaacccgtcttgtatttgtcataaattcttcatcccataacccgtctcgtatacatgaaacaaaaacattaacttgttatatccatcgtaaatagaatatgtgtaacaaagtatatatgtgcaaggttatgtgtgcaaacaaatttattttatatagttttcataacccgtactcataccagctagatatgaattttggaaactaataattacttaaaagtattttctgtttttatttaaatttatgaattttgtaattactattacatccttaatgaattaatttaaaaatacttaaaaccaatggtattttttgtaatatcttaccttttataaggttatattatatccaatgcttcctaattaatagtataatttttgtatcgattataaataagtaatttaaatttttaattttcttaatgcaactgcctttttctctatagtgcatttcacatatccctagtatctatttaatttttgtttatacgaacggcatattttattttatttttgtgacacaaccaaaatcaaattattcaaaaaaacatagatagcagattcaaatcatatatatgaaaattggtcaactctctatatataattgacacatcattactttaccatttttcatgtatctattaattaattaatataatctcttcaatttctaatttataagttaataatatatttattatttaattgtagtattactaaatttattttaatattacatgatttttcaataaaaccattttaatagttttctcatactcgaagattttttttttgtaatccaaactcaaagtatgagtatataataattgtggattacttaatgatttgaataagttattctcttaaattgatatttatattctcttaaattgatatttatacaataaatcactgaggatgaaaaatacgtaaggaactccatcatcagattcttaaatttctagaatccaatattaccttctgctaaataaatttaatacaaacgttgtttatgaattatgtgtatgatgcattgttgagaatatttttagaaaaaatatttttaatagtaaaagtaattgcttattgcatgagtgaatgattagataaataaaaattatatataaattaaataatacgaaaaaatcctctgcgtaacgcgggtgatcacctagtaataataaattgattccatttataaaaaggacgatcgaaaactaaaaccttatctttttaatgatttaaggttgactttctcgcgttgaattcacattttgcatttgttaaactaaatagaaattacaaatcagttaagacatattcaaatccaagtttgttagtaaaccgattcaaattgactagcaaactaactttctatagaaatgtactaaacaacttataaatagaacgtgacgcagataaaagctcctgtaagataaacgcaaaaactaatgttttgaaaagaaaaagaaa

SEQ ID NO: 5024 - DNA, 3000 bp, Unknown
  misc_feature (1)..( 3000): cDNA_ID_3075264_gDNA_ID_1620755_Annot_ID_166925 3000 nt of promoter + ATG
ttttgttttgataaagtaactttttttaacttaatattgtgattcaaatttttaaaatggacatgtattacctgattgaaaaaaaaatgtgtgtgttcaaagtttcacatcgataaggttgtgtacggctttttttttgttgttgtttgcgttgattagtaattctcgattagattgtgtatggattttattgatcgagtcgtaagttttacggtatttattttttggggcgacatgcatggtatcaaacacacttatgcctatcgctccatcaacacactccagtattttatctgactcatacattggatattttatatttaaaaatatttatatttagaagatttgattaaggtttaaaattatgtttctcctagctataacctttgtttgattttttaaaactgttttgaataatcatataacacataaagttatttttgttttgaaaaagtaactttttttaacttaatattgtgattcaaatttttaaaatggacatgtattacctgattgacaaaaaaatgtgtgtgttcaaagtttcacatcgataagattgtgtacggcttttttttgttgttgttatttgcgttgattagtaattctcaattatattgtgtacggattttatcatctaggatttaatctaggatttaacccatggtgatgatattttattttttattcacaatttattttattataatatataatttaaactttgtattacagtttcaaatttagatgtgtcaaaaaaattaatacttattttgatacattataatgctgatttttagaaaacctacaaaaaattgttattattgtttgttttgtttagtgtttaaaattgtatagttgtaatattatagttttatttatactttaaaatgtaattttcatggaggactcggttggagtttttttcatcatattagttttactgccaaatttattagtgatatatatttttatgtggacttgtgttgtgtcatgtgtggacttgccggaatatccattaggagatctatgttcttaaatctcgaagttatgtgaacttgtcaataaactcacacgtccatcattagtcatcaaaacagtatgaagtgacaaaaacatgtttaatggtgttgattacgaaacaaatctgcatggcgaactacatcagatttaacttttaactcccaaaataatgtataatttaaatcaacttcaaaaatgtaataaagacacattacaatgtctttatcaaaaaataaaaagacacattacatatatagtgtttttgttttggtcaagatgttatttaatttttgataaattctttataaataactttaatgttattttttattttggacatagttttgttagaattaagggggtgtattggttgtataagactataagttgaagtcaactccattagagataaaacaacttctgtctattttacattttgtattacattttgtatttcatttttttacagtatatatatgtattcgttttcttgaggtctttttctattctttagatttaaatgttgaatgtattttatgtacaacaaaaataggagaaaacataaactctatatatactattaagcatgaatcattacgtgcaaattcgttagtatcattttcaatcatttatttttttgataaagaatttccaatcattttcaagaaaaggttttgtttttttttttttgtcaaaccaagaaaaggtttctatgaacgaaatagaaagtagcgttgtgattcatgttgatgaatcatgagttaatacaaatgattctacagctgatttatactgataggatcaggatcacatgaaacgcaaagtaggaatgaaattattataatgaataaaattttcttcaacagtttgtgataacccaagtcagcaacccaaattgttttgtgggtttaggcctatccaatagaaccaacctcaggtttcagttcacttaaaatattaaataagttacaagactaagaagctaaatctgattgtttattagttctgtaatctaattatcattatacgttttctctgaaaatgttaactttttaatgactagtgagataaaaagagaaaactcaatgttacaaccctgtcatcaaaatgatatatagttacgatttcctctaatggaacaacaaaataatggaatcttaatgttaacaaaccaaaaaaacaatctattcttgtgtgcaattagtgctccaccttgaattctattaaaacacagtcaaaaacacaattttagttttccccaataaaaacaaaaacaaaagaaaagttgaaacgcgttcttgttgacgtcgattataaactaaaggaagtaatcaggcaggttaaagtaagaaaattaggaacaataatgccatgtaatttaccttaaaaggctcgttttactgtaacatattaatgtcacgaatacataatgtatagcgtatacataatatttgtaagaatcgattacacgctattatatggtcaagggtagtattgtcattttagtaatgttcagctatagtaattaagtactcttaatctttcttcgttcttctttccaccaaaaaaaatctttcttcgttcttctttttctctttttgatctcgtcttcttgatacgccattgacagagaaattgaacaaacacatttcttctttcatctccttccattcgtaaaggttaaaaaaaacatatttctgctcttaaatataatgtttcttgtttcttgcactccacgctttttgcttctcaatgtcttcaatgtttagtgttgatcgtttcaatctctgtttacaaaggttcaatcgatgagatccttttatctttcttcgtcttcgtccatattatgtaaccttgagatgtatgtgagagaaatcttctttgcgtgtatgatggcgtttgattgagagtgaatgtggtcttgatttcaacattcttaagttttcttgtgcatgaggtcttgttattttctaaacatca

SEQ ID NO: 5025 - DNA, 3000 bp, Unknown
  misc_feature (1)..( 3000): cDNA_ID_1826968_gDNA_ID_1620755_Annot_ID_49875 3000 nt of promoter + ATG
tttatttttgtggaaataacatctcccaccactttcaaaaataaaataagaacaatttataaaagtcactaatacaatctagagagaaggagaaattgagagaggagtttattacgattacgaattctgttttcatgaaagaagcaaaactatacaatatgttctttatatacaagtatctaacttaaccggtcaactgaacccgaaaattaatctaaagtttaaactaaaactatatgtataactcaatagtcgttgttacataatggcaatgataacggctaaatatatatgaacaaaacccacaaatgtatttccctataacaatgcagtattatatccaaaataagttcattatatttaatttccataatattattgaatcgctttaccaagttcaatttcggtgtttccaaaagacagtgtttttatttcttagtccttagaaatattctctttcctaacacttcaaacatatataatctactccaaagtcacttatatatataaattgattccaaagtcacacatataaaaaattgaaaatacgatacgaaagcaaaatatacaaaattaagtatatgaaaaagagggaggaattgttttagggcatataatgctgcttagtgaggtatcaggtgggccgacttacgagttacgactagagtacgttttcgttagctgacttcgatggatgctcgccacgtgtcaatcttgaatatttaaaaggtcaaccatcatatgagctgcaagaagaggagtgggttttacgttttaacacaagtactaattacaattcacaactataaaaagtagtctacactaactataccattcatgtgtccgacaaaaaaagaataaaacataagatttacttttcgattcggatttccaaatccatcaaaaaaacgattgaagtttgtaactattttgccaaactatcttgtgaaagatactaataaattcataataacaatacatcctgataaacagttgaaataagctttgacgttttaagaagaaaaaaaaaacggaataaataagcaaaagacagtgaaccaacacttgattttctctacacacgtctctctttctccatcttctacccgttataaaaaacacacaataaagtgcaaaaggcaacgaatcaactcttaattttcctcttcacaaatctctattctctctatcccatcttagaagttacgacatccaagagctcatcatcccaagttctttgttctggttcgaatggtgtgatcgatgaacaacatcatccgtggattgtcttgtcccttcaagttcaacacttgtaattaaggttcgtgcatgtaagttctctctagtcccacttctaaatctagtcaaaaatcctccatttattgatagacctcttatgtgaaattagttgaccaaattatagagatatagagggatctatcacttcttcaatggatttgatttacagatataagattattgtttttaattacaatgtggtcttctcacacaatagtctattaacgtcagcaaacgggttgcttctaaaagctaagatttctgtgtaaaatgcaaaatgagtgtttaaaaatcatttttgttgaatttgagagttgtgtattgatgaaaccgtgttttcagaaaatactatcttgtggaagagaagtaataaatcaactcaacagaaaaataataaaagaagaaaggtgaaaaaatgccacaagaattaatgagaggattaaagggtttggtggtgtcgtccacaagcaatggagattatgagcttgctcaacgaaaagctgaagaaacaggtttgtctcatcatcatcactgtttgttttttaaaattgtttttcataatgaaaatgaagatataaatcagataaagtaaagaaaaaagaagtcgaagatggaccatatatatgttaataatagctttgtgattcaaaaacaattacgttgggtttgatttgaatttagagaaagtcgtttagaaatttgctttatggaatatggctttcattatagggttacccaccacaaccgcaaaactattattacttttatgtttggtatggtggatatacaattcaaattttctataatctcccaaatcttttttctataacacaactattacttttaaattgaaaaaacatatttttgtaaagcttgtttaagtagattttatgtcataattaaagaaataaccttgatgacaagatggtaaataggaaagagggtgattttgtgaggattgacaaaaaagcgcatttgccactatagcgaaatgtcattaactcttgctaattcgaggactcaaagagtaattatccaaaaatagtgtttacatagagaaaatttaaaagcaaaattctactaattcagatggtcaaacggtaaccagctaaaaagtaaaattttttaaaccaacaaaactattattattattttttgtcaatagtttttatttagagatcaaaagagtcaatcttaataaatattctttacataagtgatataaagcagttcggtacgaatttttagtgccaaattgtccgttttaacatttgcattacgaattttttttgaatttttccttattgttttgaaaattctctaaatacactgaaaacaaaatttgtttatttaataaaataatcataagtaatttacttaaaaaatgtaagattatctaagtatatattccctaaagcaattagtgtattttagccaaaaatattcccttaagcaacataagttgccataagattatatataagaacagtaacaacaatatttttttaaaacccattaggaaagatattgggctttgaatcaatatctgagcccaatttatttccgcgttaagttttccgttattaataatacgtttctcgagaaacatgtattttgaatttttgattttgggtttatgtgaattgtcaaatttcgttagctctgagaagataccaagcggtggcatggctgagacagatg

SEQ ID NO: 5026 - DNA, 1177 bp, Unknown
  misc_feature (1)..( 1177): cDNA_ID_1826962_gDNA_ID_1620755_Annot_ID_49877 3000 nt of promoter + ATG
tcaagctttgaaatcgacatatttacttaacaaaaattttatgctaacaaaacaaaactgtgagatattttgctaaatgaaacattagtacgttacaattatttttaccgtacttttatgtcataatgaatgaaagaaaaagaaatattgaaaagtttatatgatatattgtataacttagcatattaaaaataaatctaacacattactaattgtatacctctttaacattttttttatcgcgatatcatatgttttaacatgatatatttctttacttacatgtatatatattattatcacgttaacttaatagataatcatcaatttataatatgttattcctcaagtatttgatgataagaatatcgataactattttattacattgctaaataatttgatatatgtgatgagggcattttcgtccaacttacataaatatagagagagaactaataatacaaaaaacaatgatatattcttaatttttgatttatctgggcatatagattaatatagcccttacttctataaacaacaattcacattagcctttgacgcaccaaattaatggactaacactcggtagtcacaactcgatgatattagacatagaaactactttgagtgttaataagagaggcaatatagccacgaaaatgttgaagaagttgagaagaacctaattatctcttaaagatccctaccattggacatgataattttaaaagcttcaatgaagatcattaactttagaattttcaaaatttaaaattagaaaattggtaagagcccctcatgacctcttaccattgcggattgtgatacgttcatgagaagttggcacgtgtgagaactaaagtgagagattggagtcacgtgtgaagaagcttataaatagtaagagagagtagagagaaaaggatcctgcgtgatcattgatgtgtaaagaggattagagctttatgtgctctgttcttgggagataagattgaagaactgtaactccaagcttatcgatttagggtttgtttcattgtaattgggattttaaggataagaaagagagattcatagtttcattcttatcaaatggtgcgttagtgtgctcggatcgaatcgaacgcaagaagattagggtttcaaaagttggggatttttgtcaatcgcaatg

SEQ ID NO: 5027 - DNA, 3000 bp, Unknown
  misc_feature (1)..( 3000): cDNA_ID_2687416_gDNA_ID_1620757_Annot_ID_49911 3000 nt of promoter + ATG
tcgatgtaagattaatctcgaaacgttttggattgtggttagacatgtttgaattcaagctgaatcatcttgcgtcatttgctttgaggagcaatgcatctcaactctttcaaaccttactaaagaacacgcctccaatctctcaaaccttaccgaagaacaagcctcaacgctctctaactttattgaagaacacgcctaggtactttcaacctcacactttctcaagcctttttgaatcattgatttgtggctgcgatttgattgaacgacaccaatctagtctcccaatgttcctttggttatggccttgtgattatctttggcgatttcgacaaatcttatccggcatttggaatatctttccaccggcagtctcctcgatggagcattctaccaaaagctcatttgcgtcaatcgcgcaagccgtctatcaccaccagttggtcgggattttctcgaagcttgtcttcgaatttgaatctcctatggcatcaaaagatttttcaaacattgcaagcttctccaagttgagcatctttttaaaaacacattgagcctttagctttcttttccatgcattatcttaatttcagtttgtatgaattttcctctttttgaggttttaagtgaatgaaagttcttttgtccaaaaaaaacccgacatattatgtttctttcctataattgtttcaaataaatttaaaatatatattttctaaaggttatgaatcaagataaacacaacaactaatcaatctccacaataactagtatatagtttgacaaaaaaataaataaagataaaagtactttttacggggctttatagatttgggtacatttaagttaaaaaagtcagaataaatcactttttgtttggtttatagagataagcattttctgttagacaaaattaccattttgccctcaatctccttcttctttctttattctttctttattctttctttctttcttcatcgcttatttctcttcttaatatttccagaaaatctcaattttttttttggtttttttttgtttttgatcacaaaaatccaataataatgaaatctataccctaagggatagtaaaaagtgaacccaaacaaaataattaaaccgatttgataagaatataagaacgctaaaacaatttccaaatttgataaaagtttaagattttgagattttggttttgcaattttgttggttcgttgtctaggtttagagatttatttgggttttgtctaatctatttatttttgaaatttatttcaatttaatttgtttgtatgttgttgatgaattttgttggaaatttccggattttcttctatatagaaaattcttcaacatgaattagctagagaatccaaaatcataacaaaaatatcaattttcagttccttaatccaaaacaaaagaactgctattaaaaatcagcttgaattttgatctggttcgggaagggaaagagatagtgatataatttgtaggtggaaaagatttgggggagactaagattaaaacggtaaaacagaaagtagaaaagtacatgaagctgtaaggcacaaaaaaaatgccgatacttacaaagggacaaggttttaagtgtttttctcataattgatcctactttatacaactataaacaaggagaatcacaagtatctttaatttgaaagatgatatatgaaatattttagatctacaactatgtatctatatatttatttagttattgatgttaagaaaatactttatttagttttattttaggtttaaaatttaatattttattggatatcatctaagttacaatttacactttgaatatatcatttaatattaatataatctaatttaataaaattaattaatatatttatctatatatatatattacgcttatatatatatatatttttaataattatatattttatttttaaagcctgcaaataacccgtaaacacacgggtttgaccctcaccaacctcacggtagagcagtcagggtgggattagaaagctttagttctgacaaacctaacaattaccactaaaattggaaaaaatgtcaaaacaaatcacaaattttaaaatttgggacgaaaaaaccatgaagttttgacatgtcatttaaatctcaaagtttaatttgactttacaataaaatggttaagttgtgttgattgagtcattttaggcatgccgtttttttgttatttaaaagataacaaagttaattttctataacatctaacaaaaagtaacgacaatgcctaaaatgaccgaatcaacaaaacgtaaccattttattgtaaaatcaacctaaattttgagatttcaataacatttcgaaaattaatatttttttcgtctcaaatttcaaagttcatgaatttttttcgttacttttaccactaaaaattgtaaacattggtaataaaataacaaaagttgaatactccatattttgtcacctacccattagatcagatctcaatgacaaacagtatcatttatttataaaatagtccaacagattttcgtcatttctctagctttacatagtcaccattttttttgtttgtttgacctcaaaaactcctacgtttctaagctcttctctttgcttcgattcccaaaacgactatttccaaaaggttagtttttaatcttcaaatccttcttcaatgtccatcttcgtgatttaatagtcatctcctttggctttttttttttttttgagtccgtactttttggattgtagacaaagatcctcccgaccaaacattttgcttccgtgaaaaacgattgtggtctctgtaagattaagatcgacattacacaaccactgatttgtcttagctttaatgattagattcttaattaattagtcattactcttgtctctgtaatagttgacttgggtttttgaaactaatgttaaatttaccaaactaaaatttttgtagggtttaaagaagtt

SEQ ID NO: 5028 - DNA, 3000 bp, Unknown
  misc_feature (1)..( 3000): cDNA_ID_1827135_gDNA_ID_1620757_Annot_ID_49912 3000 nt of promoter + ATG
ttcgtaattatatattttctttacataaatacatgaggttatataaatttaaacactctcattataaaatgtcatatattaaactatatctttatacaagcaaaatagttatataaacttatatttctgattttatattaagatgactataattttttattttttatttttaattatccatatctgtaatataaaattaaacaataaataaatgacaaaatgtaatttttgagtgtcattactttgaaaagtttactaatttatttagataaaaatagttagagataaatgtatacaatttcattctaaagtgtaaatgtctaaattttttatctctttgcaagcaaaatattatatcataacaaaatttgagttctattattagatcacttaaaagaaagagcaaataatagaacaatcttaattttccaatagtttaggaagttgaatatatttttacggtgacataacaagaatcatttaacttagagaattcttactatacttatgcataaaagaattcaacatacaatgatagaaaacatgacttagctcatctgtgcaatcgaatcatacttacaaaacaatttacaagttctacatgggccaactatagataatatgtttagtgattttagagttttctctttaccattatttagtttaaattactttggcaaaatatggatttacaagcagccaattaaatatagcccaaacacatatacaaaaaatgcatcaatatttaaatagtttaacatggtaacacaaattcttatttcacacataccattaaaattttcaaattcaaaattaacttgtgtttcaccatccataacacaaaattctattgcaattctctaaccataattttttatataacaatactttacatcattataacctaagataattttccatctaagatgttttttaatctacttttcagtttaaaactacagaatttgacttatagttcacaatattacctattatgtcataaacaaacataaataacaatcgacaattttctttacatatattataatataataaaacaaaaaatctatattaaatataaatttcatacaacacatttcttaaaatatgaaatgtcgcacgttcgtgcgggtcagaatctagtagcctataaaatgttcagaacgtactatttgaaattaggaaaaatgggagagaaagaagaatatgtgtctgtgggaaaagatgtgagataactttagaaaatcttaaaaatttagatgaaaatcttaaaaatttaacagattttgatgagcaaattgttcataaattttttttattacaaaaataactttagaaaatataagtgtagaggatcgagctaaacaatacgccttataattacataaacgagaaataaaagaaaacatctatactattaattgggaaacattgtgtgaactacaacattgtaagggtagtataagattatccaaatgaatttttacatggatagttttgtaaattaacaattactacaactaaataaatatcttggattttgttttaaaaaaaaatcgaattaaatcaaaaaattaataactacccaataattttggaaatcatttcaaaaggtttccataacatttcaggcaaatttaattcgaaattgtatatatgtaaacttatttattttagtaatatgttattagataattcggaaacttcaatctaatttaataccaaattatcatttagtttagattttaaacaatttccttaacaaaactatgttaattgtttctcattagtacacataaaaaaagattttaaatgatgatttaacatattcaaaacataatttttggattttagatttataaatatctagaaaatattttcagtatagattaaaatatttaacatttttattataatttaaatgatataaacttttaaagtattttttaaaacaggtaattttcattattttaaaaatatatcactaaactaaatttgaattataaaaaagaatatatttttaaacgtattataatagttacaagcttttggaatattcataattataagaactacatcttattgaaaggtatataataaaaatcggttttataaactacaatatcataaattaataaatcacaaattatttttaaatatattaatccaagatgtaccacaggtcaagccctcgatttttttatatattacaagaaaaatatttgaaaataacaaaataatatttaattttatggaatgaagttatatggtggaacgagtttgagttgatattaatacggaaagataatcaacgagtgatatcttaaaagggctgcctataggagcccccctcaagtatattgtttcaactgggttccacccaaactcttagcctctttctatttccccctaatcaacttaaattcttctcaattccacctaatatatataatcccacgtaattaaccaacattaatcaagctgctaaaatacgatttaaaatcataaaatcacgttttaaaattaattagcctcgattaaaccgataatcctaccataatctattaacccaaattgaagccactgtatgagaaagaggcttcaaattttcttcttaaaacccaaaacaaaatcaatttagggattagacacacaaaaaaaaaaacaatttggggaaaaactttattagggtcgcactcgcatattcttcttcttccttgcgacttttttttttttctttggtgtgaaccctgcaactctattactcgaacatcaaattcgattttctttgattcttcttcttattcttcgtcttgtggtggtgcttcgtcgtgtggtggtgcttggaatcttggtttgatcgaatctgaaacgtaatttggttggagtctcataatttccacaaagatgtcgtaatttggttgattttgtattaattttatcttgttcggaattgtatgtatttgtttggattagttgatatttgagagtgataagtag

SEQ ID NO: 5029 - DNA, 3000 bp, Unknown
  misc_feature (1)..( 3000): cDNA_ID_1827131_gDNA_ID_1620757_Annot_ID_49913 3000 nt of promoter + ATG
taatttccaaaaataataaccaatcaaaatcaacatataagatttgatatctaaattttaattaatttaatttaattagaaaaacaaaatacattattaatttccaaaaaagtaaccaattaaaatcaacaaattatattttatatctaaattatcatattatttttttattaattattatagttcacttctcatctttatatgattctatttttgcggaaaataatatcatcattataaaagaaataattagagttatttcgcatatgccacaatttgaattcttaaaaacgaatataaactgttcaatacatgaaaaaatattataacgagtgaaaaatagatttaagaaaactttctactgagtaacgggtcataatttgaaatatttatattcaatttcatacatattatattgaaaatttataatcttatatactacaataattaataacatattagatgtgattcaatttttaatacaagctggaaaatcctagaattgacgggtttagatcgatattaatacaagatggaatactatatgcgaaactcttaaattaacaatcaaagtacaagtgtataatcttaaacactaaacaatatagataatatcaacaaaacatatacaactcacaattaactatacatttaaaatcaaataaaataatatcatatatttttaaatcatctttacaataaaagtttttagtttaactaaaatacaagcctacctgcggtatactgcaggttaatatctagattatagggcttattggatctaaagacgggtcatcaaagatttcctaaactgaagcaaaatatactgaatattcaaatatctatctgttaccaaattataaacaaataagtcaatttaatattttatatacaaaatcaattaaatcttaatcacatataaaattagcacaaaaaaaattattcaacaattaaaacattatcaaatctctgtgttatataagttttgatactatattcgaataatgtaatataccttttcaatttgtattctttaactaatttaagctaactaatatatttgttaatcttatacctatcaaaaccgactatcgttttttatctttatagtatttttgcaagacttttttggtggatttggataaaagtgcattcggatcatatggtacattcccctattaaataaatatggtgcacacctatgttattagcaaaaatgtttagaatataattcaaagtcatatcattaataaaattaatattaataaaataaattggtttttggcaagacgaatttggagggacgggtttttgaatcaacattaataaaaaataaaatataattaatccaccgtttcaatacgggttaaatctttaatttattattttttaagaccactaatattaaacatatcaaatcatcctaatttagaaaagattatataaaaccaaaaatgttatgtggtatgtataatgttactatatataaaattaaacaataaaatataaatgtattagagaatgatacaatttgcaaaacttttatatataaaaaataattcttaaaatttaaaaattactactttaaacaaaaaaatcacgggacgggtaaacaaattacagaacgggttttattttggaattgggttatatggtggatgtatttgaatcaatatttataaaattttaaaatattattaatatgctgttttaatagggattaaaacttcagttttttaacaattatctcatggattcgtggtatagctttacttaataacaattataaactgtaaaataaaaatattttataaaaataaaatttgcaagttttaatatatattacttttaaaaaataaatcgtaccgcggtataccgcaggttaaaatctagtcgtttagtagatttgagaaagcggatcatttttcaggaaactgtataatcgagactaactttgaatcatttgtttcaaacgcataacaatcaacttttttttattctttataacacaaagtaatgcttcttactccgagtgaaggggtgaggggcacctggaaaaacactttgcaccaagcagtaaagtataatcattttcttgaaaacactaccaacataggcccataattggatccatgaattttcatgaaccatcaatccaacatcttatattttgatttgaactatccaatttttctctaataaactaatagctctagattcaataggatccaattgagttttttcccacattgctacttcccacaattggactatccaaagctattaatagattttctatatttttttttattttttttgtcttttgaactatgagtgattagtttttcgaaaatgttttgaagaacgttaacaatctatttttatacctcttagattctctcggttccttaagtcatatttcaatatacccattaattatcagaagagaatctctgacaattaacattacacaatctatttattttattttgatttaaacaaaatgtttgtcaagtaaaacccattgttttcttaaacaaaaaggcaccctactagctccaacgatttatcatcattttccgttatttcaaaattaaaatgaatatgagaagtcaaatgtatttatttttagtaatgtttcacgtattttactaaatctgattatccaaacagaaatcatcatgataacagataatgaattaattctataaaaaaaaaaacagatagtcaaatgatcacaaaacattaaaatcgatgacaacaaactaataacctattcaacaataatctctaatctccaagattaaaggaacaagaataggacttcaaaatcaaagaaaaaacaaacaacgcaattcttatcttttctttttcctaacttcacttccatatataaaccccattcttctatcatcatctcaatcaagaaaacataaagctaattaacaataagaaaccaataaactctaacgctcttcaaagcaaaaaaaaacatcaata

SEQ ID NO: 5030 - DNA, 3000 bp, Unknown
  misc_feature (1)..( 3000): cDNA_ID_3075380_gDNA_ID_1620757_Annot_ID_167042 3000 nt of promoter + ATG
gcccaaacccacctctttaggtccacgtttttttacataggctctaatatcaattgttggactctccaagcccaaatatttttctctaatatgatattgtccgctttaaaccaagaggccaagcccacacgaatttgtttttgaactcgtaaacataaacatgaaaagaacactattttatatttaaattaatttaataaatgctcttttctataaatggctacacatattttttctcagaaactataaatcagtatttcctcttactgatatgaaatagaatataatttatttcaaaaatatctaaacattacttaatatatacaattatagctagttttctatattattataataatatgaaatataaataaatcaattacaactacaaaagaatttaaacatttctcaatatataataaacaacaattaaaacttattttacaatattattttgaaccattcccgtgtgactgtctctagtatgatatatctaaggttttttaaatcatatgcaacgatttcaattatttttttctaggctatatgtatgacttaatatattcgcttagaacttctcttttggtttttgtcgtcaaccattaaaaacataattttatgaactgaacaaagtgaaccttgaatattttttacggggtttatatgcttaagcttcatattgattatatagcaaacgttgcaaaggctgtttctataaacgaaaccctacatcaagatgatgaagtcatctctataactataccaatgtgtacgacttagagtttcgtttatagaagaagcatgttcatgtatcggatcatacatttcaaaaacacggtttgatacggcaacgacgacgacctttgaggttgatgaagaagaacgtgtcccaatcgattcaggtgactttgagtttgtctcctacatggactgagcttaattttgatagttgcacatattcttcttataagaacgtttatgatgtcctgtaaatccctgtttcatgtgtcttttgtgtttatcaatatgttttgtgtggattagtgactagttctttttcttcacaacgttttatatagtaagagtcatgtttttcacaatatggaagttagagttggagctttatatgtggcaggaacatccagagttctcctatgtgatcttttgtgcttcaccatcacaaagctctaatactaaggtaaacatgttacatatctctgttttgtaatgtttttttactttagaaaatctagctaaagtcaagtgttttgtaatgtttttgacatgttacatatctctgttttgcaatgttcaagtcaagagtttaagtttcagttcaactcttgacaaatgcgacaagatttgacatgatattgttggtgtctcacaggaaaagtcaccaagcagtctgtaacttgaaaaacgaatttaaaatcaagaagcaagactctgagatctatgctgctaaggtaaacatgtcacatatatatgttttgtactgttttagaatttctgttttaagtacttttgacttaaatgttttaagtacttcaagctaatacataacgtttcacaatattccttgaagctaacacttcatagaaacaaggtacaacttcgtcaatcaaccaaacataagttcttctgcctctaaagaccgtgggccggtctgtctaactgttgggctttgcggggcgggttaggactcacttttcaagaccgcggtcgtctgcggtccggttcgtcgcggatcaatggaaaagcgagcatgttgcggtcggtccgttcggtcgcgggcacgcccgtctaccatctctaaagttatgtaaaccaaaattcaattcttttgtttcacaattactactcaaactacatttttcatagtttttttttaataaaactcggtgttattagttatactatttgtaaatatcttgtaatcttaaggttatggaactaataaaacctcatataaattaataatcgataaattaatacccgataaattaatacattttttctgtcctaaattttgtttttggatcaattgataaattaagaaaataccatagtctcatctatattaaattattaatttatggaaattttactgtgtatagttttaggaaaaatataaaaataataacaattttcttaatttcacaaaaaattactaaaattcacgtttagttggaaatttacgaaccgaagtattgggccttaatggtcttgggccaacatcaatctctcgccgtcaaggttacatttatcgccgccgctgagaccgccacctaagggccgtctcctccgcaatctctaaccgaaactctctcatctcctggtaagctcgattttcttatcaattcgatctcatatgatgtcgatctgtttctactgaagctaaatcttgcgaaatcgatctttgttttgttctgagatttagggtttcacgaatttgtattctagggcttttctcgattaatcatttctattgttatttgttcttattggttcttatgcttttgggtacagaaagatatcgactttttgttgactctgtatgcaaatttgtcaaaagacaaaactttgtaacagtttactctctttcgtgcttgtgtttatgtatgaacaatagcttcgctattgggattgttgatttcaccacacttgattaagtatgtacatactattgaaaatgttatagttcgttaaaatgtgcaatcttcgaatttctctagcgtccattgttcatgttggtgtgtttatgttgatatactcacccacacacacatcaatgatatgcattgtacataatgcattttgttgttgtctctttaagattttagctattgaggatcgattaggggaagtagctcttttcctttccttttctggtgaatactaatgatgcaaagcttgaatctaatccctgtattattttgtgctgcagagacagatagctaatttgattgagtttggttacttgcaagtgcaaatatg

SEQ ID NO: 5031 - DNA, 3000 bp, Unknown
  misc_feature (1)..( 3000): cDNA_ID_2052620_gDNA_ID_1620757_Annot_ID_167023 3000 nt of promoter + ATG
actccgattagcgatggaaaaatcctggaagcttgtaggccgttcacgaggatgattccacagatgatgagtgaaattcttcctcccgaagtttgtatcccgcaatacgaccaattttcattccggcggaggcacatgacaaaggtccagcaaaatattatcaccggggactgcggcgtttacacgttaaagattcttgactgtttattgcttggtgtttgttttgatggcattactaattcaaatatccagggtctacgggttaagatggcagcagagatcttcgatgaactacctgtaagaatgccccttcagttttttgagcagtgatttgctttttcgaacatgtctgtatcttttgggaattttagcatgtgattgtactaaatatttacactttaggattgataaccagaattatgtctgtatgaatctattattatgttaattataacaaaaaccaatgtaatggctgacttatcatcgctcgatacgttttacggctgagctatgctaacgtaagggctgacttgttatcgctcaaatcgtgctacgactgagttatgataccgtcacagctgagttatcgttgtttaattcgatgtttagctgagttattctaatgcggtggctgacttgtcatcacacaaatcgtgtgatggctgagttattctaacgtggtggttgacttgtcaaacccaaacttccatcccatcaaagaaaccaaacgtcactgtaggactatacatacaccggtttacgacaactgaatagtcaagaacccaaacgtcgttagaggaccaaacgtttgattcatagggatacaaaataaaagaaataaaataaagaaccataactcaacaaaagatgtttacatctgatatttcatacggacaactgaaaaaaagttttccggttgtaacaggatcacgagaagtggcaacgacaaccttagcattgcaatcacactcgatcggaacgcccttatcgcgcctcctgttttcgtcgtacctcgttcgcatccttatttccatacgatcgagctcctacattaacacaaacacgatatactccacgttagatgggtaacgatttgtactattcagatgtgaagataaatacctcatcgacactagagtcaccgtggaaaagagacccttgagccatcatcttggctgcaattagtatggtactaaagcactgattctatatagtcgtgtctgctacaaaaagcactaatcaaacgacggcttcttgtattggctgaataaatttagaagtggttgagttataaaagcattgcggctgggttttcactgagttgtggctgagttatgtcgggatacaatatgttattacttagcgtgttgctttaggttgggtttatcaaaattctttattatatcattatcgacataacaaacagcatctttatggggaaccgccagtaatgattgggtccacatgcacaggaacacaagccagcagttaatattcaaaataattcgaacgtgttcgaaattattcgaataactaaaccctcaaataatcaaattttctgttttgcggtagaatattataacgttacggctgagctatgccaaaaaatttcgtggtttgaccgagttatgagaaaccatatgttattatgacattttaaaccagccatcaaattgttggttatattagtagcgtgaagatgtgtaatttgaaaacagaaaataacttttattttcagtaagtgtcgattgacaaactatgttggcaaaacttctaagaatgatgttgttggatagagtatgatgttggataaagtaggatgttggataaagtttataggatatgagctagtttcacgattccactatttggaatgtggttatgatatgtaaattacttgattctaccaactgttggctcaagaaaagcactttcagggtttggccgagttataacagttatatggctgagttattcctgagttgtggctgagttatgtcagaagatttcgatgttcgaactacttatgagaaaaccaaatgttattatgagatttgtatacaagcattattgttggttctattgatgtcccttactcaggtagaatagaatattgctgagttttgctttttgctgagtttatcaagaaacaattattatgttattgtcgagattaaaaaagtgtttttatggggaccgccaataatgattggtttcatattcacacgaacacgtcaaaagataataattcaaacgagtttgaattgattcgaataactaaaccctcaaatataaatgttctgtttggcggtagaataccaatacgttacaactgagttattgcagaagatttcgtgatatggccgatttatgagaaaccaagtgttattatcagatttcaaactagccatcaaattgtaacaattttgtgtcaaaatttaaaatctattatatccaaacagaaaataaagacacaatgcactaagtgtcgattgataaactatgttgaccaaacttctacgactgatgttgttgcgacttcccttttgttggatagagtatgttgttggataaagtaggatgttggatgaagtatataaaaaatgagctagtttcatgattccactagttggaatgtgattatgatatgttagttacttgattgtcccaactgatggtttaagaaaagcaatttcagggtttggccgagttataacaaagtgatggctgagttatgcctgtgatgtagctgagttaggtcagaatacagagaaaaatagtctctgttattgaccagatacgacgtcggtttgttccagagtctctgttatttaccagatatgacgtcgttgtgacaaaaaccaaatgaacacgaacacacttataaatccccaaaatcaaaccctaagttttaaaattccaatttctgatttcagatctggagctgcattccttcttgcttttcgtctccgaatttcccaactaaaaattaaagaaatg

SEQ ID NO: 5032 - DNA, 3000 bp, Unknown; identical to SEQ ID NO: 5029
  misc_feature (1)..( 3000): cDNA_ID_2052629_gDNA_ID_1620757_Annot_ID_167019 3000 nt of promoter + ATG

SEQ ID NO: 5033 - DNA, 3000 bp, Unknown; identical to SEQ ID NO: 5028
  misc_feature (1)..( 3000): cDNA_ID_1827135_gDNA_ID_1620757_Annot_ID_167018 3000 nt of promoter + ATG

SEQ ID NO: 5034 - DNA, 3000 bp, Unknown
  misc_feature (1)..( 3000): cDNA_ID_1827127_gDNA_ID_1620757_Annot_ID_49914 3000 nt of promoter + ATG
cttcaaaatcaaagaaaaaacaaacaacgcaattcttatcttttctttttcctaacttcacttccatatataaaccccattcttctatcatcatctcaatcaagaaaacataaagctaattaacaataagaaaccaataaactctaacgctcttcaaagcaaaaaaaaacatcaataatgaagcaatctcttcttctatccttcgtgttactactactctcatcatcatcactcgtgacaccaatccatgcacgtaacaaatcaaatccggcaaagtctcctgttggtgctccagcaccaggaccatcaagttccgattgttctacagtaatatatagcatgatggattgtctcgggtaccttggtgtcggatcaaacgaaactaagccagagaaatcgtgttgtactggaatagaaactgttttacaatataacccacaatgtatttgtgctggtttggttagtgctggcgaaatgggaattgaactgaatagcacaagagctcttgcaacacctaaggcttgcaaactctccattgctcctcctcattgtggtgattttttatatttatttctattgtgtctcaatattaagtttttttttttttttgctttcttttgccttatatttttagggtttgaaagtaatattttctttccttgcaggtataataacttcaggcgctacgacaccaggtgcatctcctggtacgtgttgacttattttcatgttatggtcgtaattaagattgaaggcttttgtgttttgttccccttgaggattgtctctaggaaaatgattgaacaaatataagttgaaaacaaaatgagttaatagtttttgaatgttgaatcattttttcagttttttttttttaatttcaaatgagaaaaaaatttggtcagttagattttcaacccagttctgttcctccaaatgtgggtctttcatttactttttacaattgactaggtctgggcacgaagcggatatccggaaaaattgtgatatttgttattcgattcgttttaaccgaatacttgattttgtgatttgctttacttcgaaatttccagatatccaaaatttcgaatatccggaattatttgtgatatttgcgaatatccgctttgatacatttaaatattaaaaaaatctgtaaactatataaccatatcagatattcaaagtttttatttaacatgctttcaaaataagttctaaataccaaacataactattgttgatttgtggtacttctattaagtttcattttgttatcaattcatatcaattagaattttgaaatactataacacattgcatttgtgtcactcctttctgttttttgttaaataaatagtgttttcgtatgttacaagatataacgtatgaatgataaatatggatgcagtttccccatcggctggagcacctacgacttcaccatctgcagccaagtcaccggaaacttcggcaacttcgccatcttcggatgagacaccgtcaatgactgcaccttctccttcatcttctggcacaaacatcctctcagttcctgcactcaccattgttttcgttattgtttcttctgtcgcttacatttcggccttttctaattaaccacagcttttacttttattttctttgtttttgatctatgaattgaattctacattgttatggttgtgatttggaagacatgttatgtttttttgttgcttttaatcatgcaaccgtaatacaatgtgaaatatgcgctgggctgcttaatttgataagaatataagaaatgggacttattactttaaaaaatatctacaagatataaaattaaatattacaataactgtctttatattaaaagtatgaatgtaaagcttaattaaaatattggttaaacaacattaaacaaaaatggtttcgtgtatagaagaattgctctttatctatatataaaaaaacattcaagaattgtagtcctcggaaccgtttttcccaaaaatgaattccatcaaataaagaagatttactttgatgggtaacaaattaggtgttattaataaaacaagacaaaacttttttttaattattatgatatttttgtctttttttttaatacccagcgtgtctctactaaacgttactggaaaaaacataattatatagaatgccactgccacgtcaaaatttgctgacgtggattaaatgaactcagccgtaacgcgatacagcggcagttacgcctgagttacggtatattgcggctgacttacgacaaaaatctatgagtcataacaaaacggcgaagtatgagtagaactcagccagacgttacggctgagttgtaatataacccaggcaacggtatggttgagttaaagaatgttggtcgagttataaaaagttatacgataacccagacaacgttatggctgagttatgataaaacggctgacttatttccgcgacacggccgagttatatttttggacggcttagttatggaatgatgtgacggctaagttatggtcgagtgttataaatcagccgctaatagctggattacggtaaaactcagccttgttatggctgacttatttgcaaaagattaattactataatagcatgcagttacagccgagttgttaaacgttacggctgagttagtttagttacgacataccacgactgacttaactttgtttttctcctgttttaattactgtaatagtattcatgttgcgactgacttatagatttgcttgatggttgtgttatgaactgttcgtttggtggcttacttgccacctcatcacttcaaaacgacgtaggctgtaattttccatgtcatcattccatgtcagcatcctcaacggaaatacgaaacgtcccttgcttctttaactcgtcttcccagactgtgtttaacgcctgaacgttacaacttcttcattcatcttctcatacatcttcaatttctttcatctttctctcgat

SEQ ID NO: 5035 - DNA, 3000 bp, Unknown
  misc_feature (1)..( 3000): cDNA_ID_1827123_gDNA_ID_1620757_Annot_ID_49915 3000 nt of promoter + ATG
aaaacaaaccctgaactaaaacctgttaataaacttaaccccacagtaattaaatattaatgggatattaatttccaaaaatcgaccaaagaacaatgacagaatccgtgatccaactgaagatcgtccacctcaaaaagttccttatacacgtgaaaaagttcaaatggtaaaatagagaacaatgaattatgtttcacaagatcttccttttcaaattatttaatttaatctttgcatatttagacttgcagcaactgtcaacaagtcggacacaacaaacgttcatgcaagcgtaaagcagtgccaaaaccacccaagaaacctcaaagacgaccaaggaaaaaacagaaaacaatggatgaagagaaccctatcactcagccaatacaatcttctcttcaaagttaatgcttgacaagtctttactttagaatattttgtccctctgaaacgattgtttttttttgtgacaaatattgttgtgttgcaacagcttcgatagttatgttggttggatttatttaagcatgactctttggattattttaagttgttgtgtctttctttcagcttctaaaatccaaactaattaagcaattcaaaatcatttagaacatttttttgtaataaattcaaaacagttttaaagaacatcatgtggtttttgcgctaaatacaaatgtctcattgtttttttttttggaaattaatatcccattaatatttaattcttaagtttattaacaggttttagttcaggatttgttttactaaaaacatagtttagggtttaaaaatggatctggccaaaattgagggtttttttcattaaattcccattaagagtgggattgatgtatggtttaatgcaatgtgagaattttaatttttcatcactaacttttattaatttttaaataatttaaatttagaataatatgtggctctctctactgtaataatgtgtcattaatatggagagagttggccaactttcatgtatatgattcgactccaataaatcgtgttatcatgcattatagggattgatgataggttggaatttgtcaatccaattgttgtataaaaacaaaaagaaaaactaagaaaccaagagaaggtcaacacaagagtctcatatcaatctatataacatatcagatattatctgcatcaacctaaatagttaatcatatttttaatttactaattggcatttttaaaaatagattaagatttgagtgactagctgacagctagatactgttcataaagccgcttaggagggtatatacatccatcattgttctctggcataagattgacattaataagattgattaaccaaacgttaaccatagctatgaccaactaaacaataatattatactacaactaactaataattaggcctactaatagaaagtcacaaaattttctgattaacgtttctatctacgtgatgaaaacataagtgaacattagaaattaaagtactcaatgactcaagtacacgaacaagttgggccggggcaccaacatgttttcctactattcctcagaatcattttttaaattggtaacacaaacgattatgtacacaatctagctagcatgaacgaaataggtttcagtctaaggcaccgattattttagttacgagttttaaaacagtgaaccatctcatttgaaacgcgttaactcacgttaaaaattttgaaattctctaaactaatgtcaaatttggcttgctcaaaatttaatggttactcgaactagagcctagacgatgatttacggacggtggtcttcgaatttttcatttgcctttccaatactcagggttggtccagacctaaagctcagcaagcaaatgttttaggcagcaaattttatatcaattttaaagagaacaatatttacagaaacgtcttataggtagacggtggatggttcgatccttggcaaccgaaaacattaactattttctatgtttattgattgtaaatggacatcaaattttattgggctttagacatgattagtctttgggccggtccagccagcacagcagtactgattataaaataagtcacaatctttttttcaaaaaggtgaacttcattcatgtatcaaagattataaagtaataaagatgtattatacatgcataactccaaaaatagtggagaaatgggtacctgtaaatttccatcaaattgttagtgtatgtgtttcagtatttggtcgtttcatgctacgcacgatatgctatcaaagttagaaaacgatttcaggatgcataatttattttagaaataattcctaagatagaacacaattatatgtttatttctagaatagaacacaattggaggttttttacagcctcaaccaaccttaatcctcctgcccagttaatggactgtcttatctggcttttatctccctcaagggataaaaatatttgtctcattatcaggcttgcctttcaggcttgtgtttatgcaatttggagagaaagaaaccaacgtctccactccggcgtctctcgctctactgagtctatcttgaaggacatccagctcaccattcgcgctcgtctggatcctttgtctcgcagcacggcgcatctccctaacgctctgtccttgctaggaacttggttttctcttttctagttcagggatgtttgttttggttttccagtgttgcaggtttcgtcttcccttttgtttcttgcaggagcaggtttgttctcctgtcttgggcctgtggtttttatttgggcttttgtcattatatgtttttagttgaatggaaaattatgaattaaaaaaaaaaaaaaaaaaagaaacagaatacattttttttttattactcacatgttttcagtagttgtgtaattacaattaacattcctgattagttataattaattattattatttaattcgttttaactaaaattaaatgaaaaaacagtgattatacatg

SEQ ID NO: 5036 - DNA, 3000 bp, Unknown
  misc_feature (1)..( 3000): cDNA_ID_1827119_gDNA_ID_1620757_Annot_ID_49916 3000 nt of promoter + ATG
ggcgtgataaagttaatgctgatgtatatactcaaaaacgttaactacacactcttctttcatggttaatgctgataaaacttttacaaacttcaaaacaccaataaacaattttctagtactatgatattttggaatataaaacctgttcttgaatgacagatttctgaaaagctagcaaaatatcattgtagtaaaacatgtactagttcaggattcatattagaggggacattatagagactaagttcaaatagagaaagtatcaatgtgagacagaatagctacgaactaaaattaccaaaggagtgcgaggtctcattgatcgtccacctgcaagtccaatgcttggcatgccactagtatacgactcatcataatcaacatcactttctccattggatggtggctgagctactgcatgtggatgcctcagtggagggtttttagtctgtaatacacaaagtgaaatatcaagtttaacgaataataactagcaagaacagtaaggatatcaaaaatttcactactagcaacatgactctcaacattcttatagctgatatacaagtacaagattcaaaatgagtgtgtttaacaaactaattaccagaggagaacgtgaccgtgcagcccttccaccaggaagtcctacacttggaatgctgcttgtataaacatatggagtctcatcatcttcgttatcctcatctgctcgctgatgagctgccatcaccggacgcccttgtggttgggttttgttctgtgctttccaaaatattgaaattttgagaaatagttaaaatatgaaaataataataaaaacctagaaacaacaagtttcaagagtcgatcaataccatagaagattgtggccgcatagccctcccacttccaagcccaatacttggtctaccaattgtataatctatagaaacaacatcatcatcatcattaccgtcattcttatttccttcgtttgttggttgtgtacgtctcggaggtgcaatcttagtctgcaccaaaagagtaacaacatatgaaagctgaaaccaagatacacttggcaggcaaaagaacttaaaactagactgaccatcacaggagactgaggtctcattgctcttccaccaggaagtccaatacttggtctactgctcgttacatccactgaaaaatcatcatcctcattgtcctcatcaactaactgtggagttgccatctgttgacgccttgccataggattcctaatctgtcagtccagaaaacactatcacataaaatccctacattgcaaaaccctcattacagtgaaaaagtgagtctgttaattttaattaccacaggagagcgagaaggatgagatcttccagctgcgagtccaatgctccctgttccgatagcattatagtcaaaggaaaggtcttcatcactatcttcctcgtcccctgtttgatttgacatcacagccgcaagtctctgagcagctgcttttgtctgagctttcttagcattcgaagctggcccagcatttgatcctgaacgtgtatgacgatgcattagaggagacgtcatcataggcgaagatggtgttcctggttccgtactcttattcctaacatgaataggtctcgtgtttctcatcgtcaactacaaaaattaagcacattgattttcatcatcacattcacatcaatggcagtttgattggaactaaaaattccacacattgaattaaaaaaatagttaccaaatttgtcaaaattttggaaatcacagaaaagtgaaatccagaaaaatggaaaaagaattaaatgcgtgaattaaacagaaccttacaaaattagattcaacagaaatctcaaagaatgtttcaaaagaaaaagcaatgaataaatttgccatttatggcagcacatatttctctctctgactgatcttcggtcatttagccagaaattgcgagtggctttcaacggtcggattgagaacagtttcttctttaattatttatactttcatccccaataatttattattgttatcgatagtacctaaatttatttattttatagttttcatcccacgattgtgtaataattatccaaagtacccttttccaattataatagcattatcatctttttgtttatggtttaggtacagtttttaaagttttctcacggtttgtaaaatagaaaaaggaaaatcaagtaactaagagatatattatttgatttgatagttagctcgtaattgtttcgtctaccacaacggcatatagaaatttatatttctagttatgacttatgatcagtgattatagcatatgttgtatgataaaaaatatttttcatatagtttttatttcttattaaattattaattacttattaggcaatacatattttttcatttattacttgatatctctaacttttgctctctttgtaatacgtaagtgtaacttatctctgtgttgtttttatgcttggcaacatcaatccttaataagatagatgagctttttatcatatccgaaatagcctctaagcagcagaaagatgaaagagatgatttagccattccttttgctagatcaattctcaaccataaagattctttgaaagagatgagactgataacatttcgggatatacaaaatccttggaaaaggtgaatgatgcgtccttattactatttattatttctagagttaaaacataaatatcatatttgtttttttgttcggtaggctcttgagatacttcaagaacaagttaagatatctgagagactatggttgtgcaagagacttttctttcccgaatgaggatgataactagcaagcagtttaaccaaaaaagtttaaattctttagtacttgaggtattttattcatgtaagattttttttattatttctcatttcttcagtgttattgcaatagaatggttcatctgtttacaggtatgctcttaagtcctaacgaatgcaatg

SEQ ID NO: 5037 - DNA, 3000 bp, Unknown
  misc_feature (1)..( 3000): cDNA_ID_1827111_gDNA_ID_1620757_Annot_ID_49918 3000 nt of promoter + ATG
atatgtatagtgttttttattacagacaactgtatatcgctgttaaattatctagttatgccagttgatatattaaaaagttagatgaaagtctactcgcagaatcgtatgttatgatatatgaaattttgattctgtataacttggcctaagaaagaggctaagaggcatattaaacatcaaaagaatgagtatactaataccactattgaagaaaccatgaaggagacaaagccttaaggattgaacttgaacctagacattattagggctaaatgcattttatccgacgtggcggcatctattcagattctgggacccacgtttcacaacctattggtcaagaatctgttgcttacagcgcaaatactataatcaaattgttaagtcaacctctattttatgttgccaatgcacataagttgttttcaagtatagtaatacaaagaacatgtatagttgctagatattatataattttagtttatctctaaatgttgtcccagaaatataaaggaacttggacaaaacaaaaacatgggaggacaaaacaattgcacatcaatcatttctaatagattgcataaaataatatatgttactaaaataatctattggcagaagatgaatagttttgctacatatttctattcttttgattattttataaaagctgtcccaccaatagacctttttaatggaggaactttggaagaaaaagaattaagaagaaagacgagaagatttatatgtgacatgaaaattgcttacaatttcacatcataagcaatttcttcaaatatctaagaaagaattaaaataaataagatttatccacaaaaaaaaccaagaaaatgaagggcaattctcacaaatagctgtttctttagggtttagtatagttgaatttgttttatgttcctataaatgacacaatgaacctggacggagtgagagagaaacaattctatgagcacacttgtatttgtacaatttaatgggatgacagcagtagaagacaaaacagttgtaattgtactacacctttgactttccattttcatgtccaaagtttccccaaataactcagatattttttatatttgtttttgttaaaatatatcttttatataaagaaccaaaataaatcatatcaattaagaaaaaagaatttattttgactgcttttataatctttaccattttgtcaaaaaaactttcgaaatttccattttaaaaacggccaaatggtaaatttgaaaaaatgtagaaaaatggcaaattttattaaaaggttgagcaaaaaatggctttttggacaataattcaaaataaaatggtacctccaaatggttttaaagttttaatacgtaattcatgggtcaatttgaaaacttataattttctttaactaacaaagtaattttaggtgtaaatttacaatggtacctccataatactaatatttttaatatattttaaaggcaaataatatgttcttatgataatgatgtagtatgatgctattttatctaatctacaatgtgttgtatttataatcactcatagttgagatattttattttaaaacatgttatttaataaaataataacaaatatgtgcatgaacttttggtggaaccatgcaaaaagttgacttccatgcaacaattttgtttttccaaacttgaaagatgattgccatttcttataattttctttaacttatatagtaaatttaggttgtgaataaatcgaatcggattgcaattcggtttactatactagatttttggtttggtattgaggatacaagactggaaacaagatctaaaatatgtgtagttgtggttctgtatgaaacttcgtgagacatatgttatttacccaaaaatgtataaaaaaaagttcagagtaaagattttaataacagatgtacattgcttttgtaattagtgatcgtgaatggtacaataataccatattcaaaatagtctttacttgcctcatgtgtttggatacgagattactgaacgttgtggtgtattttatagtcatgggtttgttaattgttatcatgcttgcctacttaactagcgtaattatgtttttttgtactacctcggaagtagctattttgtcgcttattgacaacgagatactttaagatgttccacatccacgtcgtaatcggttgatcgaatggtgcctaatagatcaaagttatcctcaacaaatatcgatgtgtagtatatacgtgaatatatagtagtctcttgcatgcatatcatatacaacttaaatactctttttgtttcaaaataaataatgttttaggaaaaagattattgtgtcaaattaagtgttggtctattcatccaaacaagaaagaaaaaaaatacgaatttgttttatatatcattgacgaacaatgtttagctaataataaataattatttatttataaaaattaaaagttagatagtttcttaatttaggtgcatataagttctttaacaaaaaaaacatttaggtgcataagtcttaaatatcaaatattttggaacagtaattttatgtataacttttttcgtacctatcttcacaccgcataaattgccaaagtcaaccttttgatatttcattcctcacaaaaccatattaatttatacacctcaatattgtttaatagtattatcatgttggctttcgctgaatttatcaaagtgcaacatgttttatcttacaaaaaaataaaaagaaattcacgttgtgtgatcttgagagttgacttttaaatatatcacaacttatataaatacgcagcaacattccaatctctcaagaaaatctacagttcctccaaataataataccctccctctaaggtttaaaactatacctcattaacacattaagaagctagtcattacttcatttctatattttaaataatgtttattgataacaattgcaggcaactaattttcagcaatcatg

SEQ ID NO: 5038 - DNA, 3000 bp, Unknown
  misc_feature (1)..( 3000): cDNA_ID_1827107_gDNA_ID_1620757_Annot_ID_49919 3000 nt of promoter + ATG
gattaattccataatcagctaagaacttgattaagtggattccttttgtcaatgatttaagggatcttatccatgaaggaacatgtgccaactaatatgacttccgatacacttattctaacttatagaatataaactatgattgtttttttttttttttgtaaaagatataaactatgattgttgtactaacgaactaaatatatatatttttcatcgtaaaggaatatgttcgttcatatatggtttcgtctcctaagctgcaacgtgttggcatgacgcctttcttttttttaatccccaccaagatataggaattggaatttaataaaagtaaatgatacaaaaataaattcttttctaaataggtattttgaaatgtatacaaagtttaattaacctaaggaaagcaagcttgtcggtaagatatttcgggctgcgtcttgctctagtgagctatcaaaagaaaattgagtggtctaaagcttatatatcagctgttctcgtggatttaaaagcatctaactatcatagtttttggagctttgcatgttttctctcgaaaatgtcttcaaataaatattataagtaaaaggttgggttggcgatctatttcccggcaagaagtattatatatcatcgaatgcagatccaactgagccctagtgtgctatatttacccgaaaacaaagttcaaaatctatatctctctcaaataaaagtttaaaacctagataacacacataatcatactttggaacctctagccaaaaaaaatggatttagtcggtttactgtttgccaaacaattgttaaccaaatatgatactaaacggattttaaacccaattacaatttacaacaaataatcgtgaaaatataactccatattggatcttgatgaaacatttcagccaaaacattgcctaagaaaacatcaagttattcttgtttcataatttgtgtgatcgttttaaaaaaataaactgatttaaacgattacacaattttcttttaaatcacagttatttcctttgaaattgtgacaaagcaattatttgccaaaatgtaatttggcatttttaatcaatatcatatacaacgcaattccacaatttttaacaaaagaacacaatcaatcaacatatataaaaacatagttccactttttgccaatcgcggttttttaatattgaaaaccgattccacaatttgcaaacaattgtgtttctctagcttaattttaatttaacgtgtttgttacataatcgatgaaaatgttgtttgagcaaagtcaccttatcaaaactgcaattggaaaacaaagcaaacatgttacgttgcattaaaaaaaaaaatgttctattgaaataaattaagtgctgcacaaaaaaaaaagtttcatttgcaactcagcccagcccaggcccaataagaaagccaactacaggcccacctatcatcaaacagttttaccttgtcattcaaacaaccacagacctcaacgaagacaatgacaacttcttctttttttgacagcgacgacttcttcctcttcttcgtcatttttttcgattaaaaattgaaggattatatgtgcaaaaatgcttttgatttatcttctgattatgactctcgcaggaccggcttaatagaaccggagtcccggtacaaaattttaaaattggccttgtttagtactaatttttttgtatacacaaccatatacctacatataaataaaagataaaaatatatataaaaatttgggccatcttaacaacataattacaaaaataagaagagtatttgggattttttaacaacataattacgaaaaaagcatttgaacctttaaatttgctcaaaaagattagacgtggaacatttgttccataagctcctcctcaacgtcggcactggattctgaagcagaaatcaaacttttttaaaggttttccttagaaagctatcattaaatatagctctagttataaaaatcttgcgttttcatataagtaatccacatttttatacctgaacatatcaaattgggttctagttgcagttatccatcctaaaaactcatacataccacataccacataccacataccacatatatacgaatatttgaacaaaaagaaataaaagaaaggaattactcaagcttttaaaccatctcttaagctcagttgatatcttagataccaaggtgcttctcgaagttggctttatatatctctaaaacaacacttgcactatcagaagcaccagttatgatctcggctatcttcgaatcgagtcccattctattctgccactatttttgaaaaacaattctgacgtaccactccttgatgtgcaattacatctctctccttaatgaataactgaggagaatttccaaaataaagagtaaatgatttagtaaaaaaaaaaaagaatcacggttacttacgttcatcccccaaaatcgcgaacctactctccgacgtgatttttttttacttcgccgtcggcgacttgagctccgatttcgccggcgatttgagctccaatttcaccggcgagttagcttccgagatcgccgtagcttccaagccgataatctgctcccaaagtgagcttcctcctcaacggcaaaagtaaatccgatctccttttgatttgtagattaatgtgaatttcttattggagttagttgttaataacataaaattgttgtattgttcattatgggctgttgtattgttttgaaacaaagagtttagtgagtgttcaatcgaaattaacgatttgtgaaacccagaattgacgaactaggacaaatggtaaaactgagatataatagtataagcggtacaaatgttttattgagatacaataggacaggtggtacaaatggtattagtgagttataatataggtgcaattatgtctaaatctgaatgattacgtaattgtgtttttataatttatttgtaattacatgagacg

SEQ ID NO: 5039 - DNA, 3000 bp, Unknown; identical to SEQ ID NO: 5030
  misc_feature (1)..( 3000): cDNA_ID_3075380_gDNA_ID_1620757_Annot_ID_49922 3000 nt of promoter + ATG

SEQ ID NO: 5040 - DNA, 3000 bp, Unknown
  misc_feature (1)..( 3000): cDNA_ID_1827226_gDNA_ID_1620758_Annot_ID_49925 3000 nt of promoter + ATG
cttgctgcagactccggaaagttatacagaacaagctgcaaaaaatgtgagggacatcactgcttctgagcagcctagcaatgctgcaaggaagcggatatgtggtgattcctttatccaggaaagcagtccgaatcctaagactcaggatccgactttgctgcggttgatggagagcctccggtcagatgatcccactgattatgttaaagcacagaaccatcaggtgcattctcgtcttacttcataagttgactattttagtttatcagttatgagtattcttaatcacacatttacatgttaatagatggtgtacttcagtttttgggtaatctatagttttgttctgtgcttgagatcaaacaacttaagatgtgtagtgatcttttgtgtccagcagttacccaaaagtcatacagaacaagattcaaaaaggaagcgtgacatcaccgcttctgatgcaatggaaaatcatctgaaggtccccaagagggagaataatctgatgcaaaaatctgctgatattgactgcaatggtaaatgctctgcaaactctgatgatcagctaagtgagaaaatctcaaaggcattagaacaaacatcatccaacataaccatttgtggtttctgccaatccgctagggtatctgaggtaaaacctttaaaagtctttgccatatcctctgctctagaaactgagcttctctgtttgtgaagtattttactcaactggctggatcaatatttgttaggccactggagaaatgctgcattactctaggggaagaccggtggatggagatgacatcttccgctccaatgttatccatgtccatagcgcatgtatcgaatggtatagaaaatgaaacccaaaaaacttctacatttgctcatctttgtttctgcaagtccatgtggatatagtttggctagtgttataacgcttttggcttttgcatgataaaaatactaaaagtagttgaataaatgttcagggcaccgcaagtttactatgaaggtgacacagtgaagaacctgaaagcagaactggcaagggggatgaaaatcaagtgcactaaatgtagtctgaaaggtgctgccttaggctgctttgtcaagtcttgccgtcgaagctatcatgttccatgtgcaagagagatttctagatgccgttgggattatgtatgttttgccacattctctacattctcattcacataagagttacttaccaatgttctagttataatgtgagattgttttcttggtctttacaggaagattttcttctactttgtccggctcattcttctgtcaaattcccgaacgagaagtctggacatcgcgtttccagagccgagcccttaccaaaaatgtataattctgtttcagcatataatttaatacttacagtatgacattattattcttatgatagcaactaataaatctcattaccttgctccctcagaaatcctgctgagctatgttctttggaacaaacaccagcttttacaaaagagcttgttctctgtggatcagcactctctaaaagtgataaggtcagtactaagttaatcttctttccacaaggttcaaacaagaaacaagtgtttgtggatttaccactcttggttcaaagttggtagagctttttcatataaaaagactaattttctcattgcattgctattccctagaaactgatggaaagtttagccgttcgatttaacgcgaccatatcaaggtactggaacccaagtgttacacatgtgattgcttctacagatgaaaaaggagcttgcacaagaactttgaaggttcttatgggtattctcaatggaaaatggattatcaatgcagcttgtaagttagattgctcactcaagagtttgtcataatctttacttttcaccattaaggaatcttcatctttacatgaatcaaccttgaattgtttctagggatgaaagcaagcctaaaagcttctcaacctgttgatgaagaaccattcgagattcaaattgatactcaaggatgtcaagatggaccaaaaaccgcaagactcagagcagaaactaatgtaagtataaaaacacaccaaaaacaagtttgaaagtgctttgcttcttttagatatctcactctctattttttcttttggcaaacagaaaccaaagctctttgagggcttgaagttctatttctttggagatttctataaaggatacaaggaagaccttcagaatctagtcaaagtcgctggtggtacaatcttgaacacagaggatgagcttggtgcagaaagcagcaacaatgtcaatgaccaaagatcatcatcgattgtggtttacaacattgatcctccacatggatgtgccttaggtgaagaagtcacaatcatttggcaacgagctaatgacgcagaagctttagcaagccaaactgggtctcgtctcgttggtcacacatgggtcttggagtccattgctggttacaagttacatcctgtgattggctaatttaagaggaagagacaaaagacatttcaatttccctacacatatgtaacatagtttaattttactatttttgatttcgtaagataacaaaacagattcgtgtttgaacgcatataaaattccaacttttactttcgaaaaacaaagctttgtaacttaaagtttggaaatcttaccgattaatgacagaattaatgtttttaatgaaaaataaattgtaacgaaaaatggtgtgccaacgcaccaataccaaaaggctttgacagggcattggtgggtcaaaattgtaacggtcacttactttatcctccttaataaagctacacaattaataaattaaagaggcaaaaaataatgctaaacaaaccctaaattcccaatttccgaagtgatcactttttccccgctctcttcgtagtgatcgtccccaccacaccagaccccgctcctcaatttcgatgtcgacctattaatg

SEQ ID NO: 5041 - DNA, 3000 bp, Unknown
  misc_feature (1)..( 3000): cDNA_ID_1827214_gDNA_ID_1620758_Annot_ID_49929 3000 nt of promoter + ATG
gatacaaactcgccatagacattgtcagagtttgactatggagcaaacttgcgccgaaagaatcagggacgggttcgaaaacaatgtaaaagaagagctctctctctctctctctctctctctctctctatgaactacctaaaaaatggagcaatgcttcacatatgaagaagagtaacgttcgcagagaagtctttcatttacttcaaaatgcggattcaataaaacgtcgaagagggactgagttgtgtgagagagacagaagagaagattggtaaagtcaaatcttaaaccgcggagactgatggttatttagccggtttggatcggtttggaaaataattattgatttgaaaactaattgaccttgactaagactcacctactgttttttctttattgcaactggggaaattgtttattttattttattctgaagccatgaaggcacgttggttttaaactaatcaaataaaataggtaacaaatcctcacaagaaccagcactgtagctagcttaattgaatttccctagtaacctatgttatttattttgatgcaaatttttatcgtcttaagttagatatcctgcatcagacgttgatgaagaatcacttatagattctacttgagatccacgtactcgtcgtgacgatcttctagatccaccatctacacagtcctttgatttttttctacgagatttcttattaaaaccaccatcttgaggaatagcagaagattcttttgatgatctccgtgaaactttagggtttccattatattgtgaagatccacgtcgtcgtgatcgttcttttgttggtgaaccacctaaagtgctcgaacgctctctcgacgattttggaagtctcggtatatcacgtgaccgagtcgaatctgcatgtgcattttttatttataattatttcttcttttacaaaaaaaaatatctatagtactattccatattagatagctcaccttcaaaaatgcatgaagcatcctccttgatatttccgataagcgccggtgaatatccacccaatactttgaaatctttcatctacattgaatttcattattttgactttatgataatgatttattagttaatgttatactatagaccaaaaaattattgaaaattaaattaaatacccagctgggtggattatgattgacagagcctccatcccaaccaatgtgagcaacatgttttacatctgttggagttccaatttgcatctctgcctctttctcgttttctgcgttatgcaaattgatcataaaatgtaatattaaaacgagaaatttacaaaattattaggctacattcagagaagatagtatatagtatatatatataaaactcaccaaatatttgagaaaaatacctaagacccttcacgaggctcttcattttgtaggttgacataatgaaatagccaaacaaatcaatatagtttctaagagaaaaaaaaataatctattctgtgtttactaattttgtttttctcctggaagctataagaatgaaatgaattcagaactgaaaagaaatcacgtaagtttcatttcggctcgatcgattaagagccattgtcagtgatttctttgaaagcattttgatttaacattctacgacctaaaattttctttctccaggaaaaagaaaaaaggttgaatcaaaatactcagttatgaacaaaaagaaataggaaaaggagattgtgcatggagagctaatatatcaagttttctgtttccagttccagatatggaactaattaacaatgtgatggagggaaaacaaaaaactaattaagtgaacgacaattagtttaaagtagatttttttaaaaaaatcgatgaggctaattttattgtttgttctctattgcaatcttaatgtggtaaaactgtaaagaaaatcagcagttgttagtaaaaacaaatcaattattggccactaatttttttgtcaaagggttttcatgtttattgactttttaggaggataagatggaaacaacatattgggccagacccatacagaatgataagataaaacaaaacaaagaaggccaaaacccataaaggggaaacatgcccaaacagagggagaagcccaagattcgccagcaagagagcccaagaggcccaagaaccatgaaccgtaggcaataaccattagagcatctccatcgggagatagatactcttgctggcatctcaaaaaaaaaaaaaacctgtgacgctagtaaaactgtgttacacacataagtagtatattcacaaacgtactataactattaataaaattttgaggatgatgtatatagctggaaaaaacgattgaaatatgtaattgaagactatgtatattatctgatttcacagaaatgttgttatttctacatggctgctacacataccagaaaaaaaacaattattgacacctgaaaaagaaaaggctgtcataattatattatatacagctaaaaacaaatgatttatatatatagagagagagactttatatgttggtggtggaatatctgagagctttattttatcggtgatgtcgaaaatatacacatgtaacatattgtaatacaacagtacgatgctgcgtttgtcacgtgtactcctgatgtatcccacacctgactcaagacacatatacgtattcgtatacatcacacgtgatacgtaatctgtggtctctttttccagacgcaaacaaacaaacataatcatctcaaaactcaaaaaagaaacaatctctttcaagtttgttttagtccttctttctgattacccaacacttaaggaaccgccttacactttcccacaacaagttttgcagagaaaatcgaaaagaaaaatgctcaaaccctagaagctcttcgcatgtctatatatatgtttgtgtaaaaaagaactaagcgtaaagaggaattaagaaagagagaaaggacctaaaagctgagagagatg

SEQ ID NO: 5042 - DNA, 3000 bp, Unknown
  misc_feature (1)..( 3000): cDNA_ID_3075497_gDNA_ID_1620758_Annot_ID_167047 3000 nt of promoter + ATG
caaaaaacaccagaaaattgtcatcaaattaaagaaagttaacttactctggacttcttttcctcttccttcttcttcttttcctcttccttcttatttttttcagtggactaccatatgacatatcaaagaaagagaactgactaagtgagaatatgtaaacaatcaaataaagaaaataaaaagtgattaagcagaaaaaacagacctgggcatcagcctcgtcgaagattgcatcaagaaggaccttataagcatcctcttcaatgaaatcccagttattctcataggtcttgagaagtttcctgagaaaggcccttgttttcgtctctgatattcctaaaagcttcatcgcgtcacaggctttcttaatcctaagattcggtgccattttcaacaagtttctgcaataacaaagctgaatcactcaccaacctcaaaaaacttcagaaataaacatagcaaagtaacaaaagtggaaactttcatcttcctgccccaccaataagagcgaaaccagagaagagagtaaaagagttagatgtgtaacgaaactaatgtgactaagaccctgaattttgagatgaaagcaaacaaaaaaacaaatgtaggaagagccattaccaaatacttattacccaccaaaaaaattggaactttttctgtttttttttttttttttttggaaaaccgaagggacaacaaagtaccaaaaccctaaaacgtttcaattttccagaataaaaaaaacgagtagaggtctcgaaacggaaaagattgaagctttagcagaaaaaatgagaagaacttacaagcaaaagaaccaactctgaaactgatttagggttttaagagggtgagactctgtagtgagagaaccggattttcgactttcctcagagaagagaatgtagtgaaaaactgatggtagatttgcttatgcaaagcgtatttttgatcaatgtatctctctgtccaaagaaagacgacaatttgaaactttaaaagacgaagtgaggaaagaaaagtgtatactctccacgaaggagagtcttcaaagatttgagaaacgcagcgtttgggagtcgtcattgactttttctgtatgaggcgaataagacaaactaaaagtgaacctttctttctctctatgcagtgtcagtatgattgactgattttactccttcgagttgactggtttaactcctttaaatcatatgggcttcatcaagtatgggacggcccacaacatatgttttttcttttaagcgattgggtccaggacagacaacgttttgttctactacaattgaataacccagggaattcaagtatgatttcagtttttggtttaaagtagaattttgtatagttcttttggttcaagtgtgaaggcgataggggaagaataaaatcaagagattcagtaatcagcaagtcagctaaaccaaaacccttcatgcaaacagagtcaaaatacacattgaaaactgaaaaagtgggagtcaaaggttttgtcacgaaaagagcagtgatgctaacaagatatttgctgaacaaaagaagcatcatcaaggtttaggcagtctatttacaggccttgccatgtaaaggagtgatgatcaaatcaaaatttgaactaaatggcataaatgttgacgagaaattaagacaagtgtaaacagctaagtttaccaaagatccttacctatattcttaaccagattgccaaataaaatttcgaagattgatgctccactcaaagtgagtcacagctatgagattaaaagaataatcacttgtacggagaaaatctcagcccacatcataaattgccaaataaattagaagaagattgctcaaacacaatcttcaaaatagccaattgaaattcatcaaatcccttatgagtaaacctaatcttacacaaggaaggaaactaacagcttctaatcgagtagcagaaacaagcatgataatatcaaatttatgatatgatcgacggattagggtttctaaagttactttagagcatcgcaccgaccggtggggttccgagaagactcgcctgctcaaaatctatctcgcctaatcgatgatcttgctccaactctaagatcaaaggcacggcaaggatgagaaacgtcgtaccggcgatccacgccgccttcccggtgctctttaacagcttcttcgacacgtagacggcatcgcaagcggcgcgtcttccctgagaaacgatatcgtagtttgaaatcttcgccaagatgctcgaatcgcctttgccggctccgattttcttaggcgccattgattgaatgaaatcgagagagattgaaaaagttcagactagagacgacgacgagggtttcactttgaaaaataaaattgaaaggggatcctcggctttaataatgtacgggtcagtaggcccattaagaaatctaatgacccatttacttaacgggccagattgagttccagtgtgcgccgaccaacacgatacgcgtcgcctttcgttttggttcgtcgtctctaaccctatacccccctctcttcgtgtgtaaacgaaacacaccaaaatcaaaagctgagagctctcttacattgaagctactttcgaagatagcattcactgattggtaaagagttctagaagcgacgagcatcttctttagttcccgaggtacatatccttttctcgtctctacgaattgggaacaaaactagggttttacattagctcatttttgtcgggtttctgcttttgtttcggttgtggtttagatttttgtcctattgtagaaacttcgtatcatgctttcctggttgtgattcataggaagatagagtgaattttgctttacgctaatcttatttgcttgcatttaatgaaatccttcgatgagtttagtatcagtcttctgtgtctttaaactgattctgttcttatgtgaatgtagttttctgcgtttgagaagtctgttctagaaagtaatg

SEQ ID NO: 5043 - DNA, 3000 bp, Unknown
  misc_feature (1)..( 3000): cDNA_ID_1827190_gDNA_ID_1620758_Annot_ID_49936 3000 nt of promoter + ATG
ttgagatcttttgatgttgtttggtgcagagacataaagccggataacttgttgcttgatagatatggacatttaaggttatctgattttggactatgtaagccattggattgtagtgttattgacggagaagatttcacggtaggaaatgcgggtagcggaggaggttcagagagcgtatcaaccactcctaaacgctcgcagcaagaacagttggaacattggcagaagaatcgaagaatgcttgtatgtacttcttatctatcaaaagatctctaatttgaaatatttctttgattatgtgtctaacttgtagttggtgttggtgtatcacttaacaggcttactcaaccgttggtacaccagactacattgcacctgaagtcttgttaaagaaaggatacggcatggaatgtgactggtacgtgtacacacttgtctattttcaacttgttaacaaagaacaaaaaagtaagtccttagaatgtttttaaaaaatcctccaggtggtcactaggagctataatgtacgaaatgctggttgggtatccacccttttacgccgacgacccaatgtctacttgtagaaaggtttcaatacttaattttgtaaaaaattaatcatttgacttttgttttttttctaatgaactttatgtatttataagctagaatttatgaatgcaaaaaaacagatagtgaattggaaaacacatttgaagttccctgaagaatcaaggctatcacgaggggcaagagatcttattggtaagctcttgtgtagcgttaaccaacgactaggctctactggtgcctcccaaattaaggtatctttctccttttttcttctatagtaaaagttacaatatatagttaaaagttgaaaagatttaagcccacaaatgtcataagtcgagttgatccaaaccacaaaatgtcacatgcaggcacatccttggttcgaaggtgtacaatgggaaaagatttaccaaatggaagctgcgttcattcctgaggtcaacgacgatttggatactcaaaactttgagaagttcgatgaggtttgtattttatcttcttcttcttttttttcacattaattgtgttaagctaataattgctaattactgtatcaaattccttggttttcttaatgcatgtttaggaagataatcaaactcaagcaccttctagaacagggccatggagaaaagtaagttgagttaattaccttttactaaaaataaaataaaaattcttaaaacacaacaaatgttttgtaaattgatgatctcacactcttaaaacactcgttccctttctgtaaattcttaaaacacactctttcccttttgtttggtttggtagatgttatcttcaaaagacataaattttgtcggctacacatacaaaaactttgaaatcgtcaacgattatcaagtccccggtataggtacgtatcttagtccttgaacataatcggataccaggatcagaacctctaacattccggtttatatttactacagccgaactaaaaaagaaagagtcaaaatcaaagagaccatcggttaagtcactattcggtacgtgaaaatgtctcagaactaaaaaaaaacgttacttattctctcgtataattgtcttcattcataatcataatcgtgtttacgtttgtaacagagagcgaatcagactcgtcatcttctggttcggagcaacagaccattaaccggagctattctaatccgacgcctcgtggaatggaacccaacctgagacgtctagattctgagtagatatatatctgttatgcctatgtatatgtaaaccaaattaaaccggaaaataatgagcttaaatgtactaaaaacgtaagtaaactgaagataactaactacactcttctttctttaatacaaagaaaaatagattgcaagtctttttttaatcccactttgagaagccaaattaattatccatattcattcattagttttatagtaataatctaaggaacaaatgatttatgatatagtatcgtccacgtctggtagattcggatgagactcgtattttcctgattgggaaaaagaatatgaaatccatatgcaacgacaacacgtatgggcagttgttgttcccaaatttgatgtatacaaatgactactagctacagaaattcatatactactaataagaacattcacatgtcactatgtcaggtcataattaacctctattttccactatataaaatttatttgcaccaacaacaaaaaaaggtaccaaatgaaatactctgccaaattcatcttctgttaaaaatggcgtgtttcgcatggtcataattggagtgaggaaaaaaaaaaaaaaaaacagaatgtcacaaaaaaaaatcatctcttttccagttttcctttgttattcctaacttgtctgtaataactaccgaatcttcttcttcttcttattaatgttcaacaaaattcgacatttttgggtctaatccagctcaaaagtttacgtttttatttgtgtgtgtcggtctgtaagagttagttcgatttcttatccaagtaaaggggtttcattggctaaaattgacaatcggggcgggccctagaagaaaatatgaactgtcaattgtagcagacggttcgtgattcatcgttttcatggccgattcgatttccgatttccccatgagggtttgtcgttgatattaacgcctcccctggatttccataatttgccttgtttagttcgtgttatgatggatctttgaaagctattcccttttttttgggtgtcgaaatcgagaatctgagagttgttgtcacttgaagaatctggattctggaaggctgttgttggtgtgttaaatgttggattggaagatgaatccagggccgtagctaggagacgaagggtttgttgtatatttgcgtttgaaaaatctcggtttttgttgctttagagattgttggagaaaatatg

SEQ ID NO: 5044 - DNA, 3000 bp, Unknown
  misc_feature (1)..( 3000): cDNA_ID_1827186_gDNA_ID_1620758_Annot_ID_49938 3000 nt of promoter + ATG
tccttgtatctgaccgcttgagagcttttggagactggcaaaaatggcggagaaagatgcgacggcgagtggcgatgacgccattagagttagcggtatgcaattcgcatacgaagttgaggatccaatattcttcgacttcaacctcgatcttccagctggttctcgctgtcttctggttggtgccaatggatctggtacgatgatcgatttctagagagagattttccttgtagttagttttcattttttttctgtcttggggtcacaggttttggatcagcgattcgacttgttatgttttcggcgagaatggaaagttaaagacatcttttgtttgatttgatttaaagtttggaactttgaaaattggccctatgcctctgcaatttcagaatttatttgccagtctgaaattggaatcatccgtttctgtcgttctggggttgggtttttttgacgtcgttgtagtagaatccggtttgccatgtgatcttaatactgcgattagcttgaggtatttaccatgttcaaaactactccaggctattgaatttgttttgttttttctggaagactaatgcttgtgttcctttggtaaatttgttaaggcaagacaaccttattgaagattctggctggaaagcatatggtgggaggaaagaacgttgtacaagttcttagccgctcggctttccatgatactcaacttgtttgcagtggtgacttgtcttaccttggaggatcatggagtaaaaccgttggttcagctgtgagtagtcccttatcttctttccatttctcatgcttttgtgagatcttttaggaatttgattgcctagagagtaactaatcgactaccgctcgactgcattatcaatctgatgttatttactttcttgattctgctacattttagggagaggttcctctccagggagatttctcagcagaacatatgatatttggaggtaattttcagtaagttgatttgttttatctttagtccccttttttcaggcttataaactgaaggagattttctttcgttgtccttctagttgaaggaactgatcccgtgagaagagaaaaactgattgatcttcttgatatcaatcttcaatggcgtatgcataaggtttctgatgggcagaaacggcgcgtgcagatatgtatgggactcttacatccattcaaggtgaaaacaatactgtttcagagaggctgattattctgcatcctctaaaatctcacatgattcattgtcagttatgttctcctctggctttaagcaaaaaagaacctcgtttctgattgtgttatcatcattgctgacgctaattttaatctgattttacaaacttcttataaatctctcatgctctgatcacaggtgttattactcgatgaggtcactgttgacctagacgtcgttgcaaggatggatttgctggaattcttcaaagaagaatgtgatcaggtaatattctaccagcctctttaatatcatctatgatctcctaagtatatacaagccgtttgtgtacatgtttctgtcggttagtaactggaatattaatgcttaaccattcaaggacaagcttttcatatcggttcttgttgctgctaagtgatgttgcctataattactatagggtccttgcatgtctatgatctgtggtagtaccataaaaggataatttagtagtagcatgcatgtatcatgcagtttcaagtgcaaatttgtaccggtttttatagtttcacttcttgagttctgagcacgtattcgtattggaagattacaactcacacacttattcttactgatgacttattgcatgatctttgacttgtttataccattgattaactcagagaggagctacaatcgtgtatgcaactcacatattcgacgggctagagacatgggcgacacatttggcctacattcaggacggtgagctgaatcgtttatcgaaaatgacagatattgaggagctgaaaacttcacccaacctcctctccgtggtagaatcttggctccgttctgaaatcaaactcgtgaagaagaagaagaagcctgtggcgccatggaaaccatctccattcgataactctccttttagatcatcgagacacatggcttattaccgatgattggtgattaccagtgagatcattgatcctatatatgaatttgataatcggtaagaataaagacacccgagagtagttcagatttcgtgtgtgtagctgctatttaccacttggctcattgaagaatagacaacaaattgtacttacaattgtgctgatatatataccacagtgattttcacaaaatgggaagtgaatttattttaccgattgcttcaaacccttaattctatatacttgatctctaaacattgtgtaaattgtgtaaatttcaaccaaaatctctgaaatgtgtttttaacgtttttgatcatataagtggacaatatgaaccggccgattttgctcttaaccagtcgttattttccatagacggtcggtttttcttgaaccgggaatttccacatgattttattgacagaacgacgtcgtattaaaatagaaggaaagaagaaccgacgtccgaatgacgaaaatctccctgaaacttaataaatcttaaccctcctttgctcgatccattatcggggaggagaaaatcctaccgccttcaccaccgtcgcgcagacgccgcaatcaccaacactcatcgtcactgactccagatcttcctctccaactaggtttgcaattctcttctccttccgctgtttattggtttcaatttctgcttagattctcttactgctggtgaaacttgaatttggagcttctcttttcgctcatttaaccacttcgtgtgttcttagggtttagatgttggtcttttagggactctctttgaatacttgtttattgcactttaagaatgattcaatttatcttcgacagagagatatg

SEQ ID NO: 5045 - DNA, 3000 bp, Unknown
  misc_feature (1)..( 3000): cDNA_ID_1808130_gDNA_ID_1620758_Annot_ID_49939 3000 nt of promoter + ATG
agttataatattaattaatataaagctcattttctttggaatatcgttataagaatattttaacttggatataactgggcttacgccatttgcatctcgaggattttttgtttttgtttttgtttttttaatacattctcgcacttacacactaaaaatcataatgatcttcttaattctttagcggaaccaccaattaatctttttattaagaactttattacttatttcacttatttgtgcatacgtgcattattttggcagtaacaaatatcgcgttatatatactgaaatccggacgcattaataatagggatatgattatatgaaccactatctagctttggtagaaacccaattataatcaaataatttaccattattgaataaattaggctatataagttcattaatagatgctataggtttttcttacaaggcacacatttgattgttattttctttcatatacactgaatgtacatgtgtacacttggcatacatggcaagattatgtgttacaatatagactgtgccattgccatgcaatgtgactcctgtggccatttctatcacaatgtgtcaatcttggagtatccgttgtttatcctctaatttactgattaatttatgaacatgtataattatttatatcatatgatctcgtaagatatcttagcattttccaccatatgttattagtaaatcatctagatggattgatgtaaataggaaagttaaattaacacaccaaaaaagtaactgattaaaagcatacaacttaatattcagattatggtaactaaatcagtctcatgcaaactccaaaaaattatacgagtcacaactcttgatttttttccggttaaacaaaatacatattttcatttgtatgcaaccagaataaaacactaactatctcctttaaataccattttccctacgagtctacgacgctctctaaacttcttatacaaaacaaaacacacccaaatatgcataagcttttgttttctcttctctccgtcgtctcactctcatttctcctcttcttccatggcgccgaggcacgccagcgagaggcgccgtttccaaacgcctgccatttcagccaaatcaacagcctcgcgcccgctcaggcgacgaagttcgaagccggtcagatggaagtatgggaccacatgagccctgagctccgatgcgccggtgtaacggtggctcgcatcacccttcagcccaattccattttcttgcccgctttctttagcccacctgcccttgcttacgttgtccaaggtaagaaaataaataaatacgctttttgatcaagacctaattaaaaactcgcaacctatagaaaatctaaaaaaagtggtcttttattttaattgttttcaggagaaggagttatggggacgattgcttctggttgtcctgagacttttgcagaagttgaaggatcatcaggaagaggaggaggaggagacccgggtcgacgttttgaggacatgcaccagaagttggagaatttccggcgaggggatgtgtttgcttcgcttgccggagtttcacagtggtggtacaaccgcggtgattccgatgccgtcattgtcattgttcttgatgtcaccaacagagaaaaccagcttgaccaagtccctagggtaatcatcaaattcaagaaagtccaaatttgtactgcatgcaaactatatgactaccactcagtgattaaaatagtgattcatatatataacacataatgtcatttttttgtgaacccttcatatgtagatgttccaactagccgggagcagaacgcaagaagaagaacaaccattaacgtggccatcaggcaacaacgctttcagcggtttcgacccaaacataatcgcggaagcattcaaaatcaacatcgagacagctaagcaactacaaaaccagaaggacaacagaggaaacataatccgagcaaatggtcctctccatttcgtcatcccaccgcctcgtgaatggcagcaagatggcattgctaatggcatcgaagagacttattgcacggctaagattcatgagaatatcgatgatccagaacggtctgaccattttagcacacgagccggaagaatcagcactcttaacagccttaatctccctgttctacgtctagtcagacttaacgcccttagaggttatctctacagcgtaagtatcccacttttaaattagatttacaaattctttatgtgctatataatgaattctcgtggagatagggaggaatggtgttgccacaatggacggcaaacgcgcacacggtgctatacgtcacaggaggtcaagccaagatacaagtggtggacgacaatggtcagtcggtgttcaatgagcaagtgggacaaggccaaatcattgtgattccacaaggctttgcagtttcaaaaacggctggtgaaacgggtttcgagtggatatcattcaagacaaacgataacgcttacattaacacactgagcggccaaacatcgtacttgagagcagttccagtggatgtgatcaaagcgtcatatggagtgaacgaggaagaagccaagaggatcaagtttagtcagcaagagaccatgttgtctatgacaccaagctcttcttcttaagctctttaattgcttcctttaatgtttttttagattttccagtcactgaaataaataaagatgagactaataaccaacttttcacaaagcttcaataacaaaatttcagattaaaaattcctactaacatacacatcttagcttttatgattacgttgattttattttgttaaatttgattacgttgattagtgtatatattaaattaaaatcattgaaaggataatgataacactaataaaaaaaagaagaagaaggttacggtctcgtaaagctttcaaaagtccgcaacgatcacacacgtctttctccgaaactcgtctgagagaggctctgagattcgatg

SEQ ID NO: 5046 - DNA, 3000 bp, Unknown
  misc_feature (1)..( 3000): cDNA_ID_1827178_gDNA_ID_1620758_Annot_ID_49941 3000 nt of promoter + ATG
gcgaaagcttgtgctctccgaacatctcaccgggcaacaaaaccatgtcgacaacataaactgcgagaggacgttgttgcctcaacgaattgctaatacgtgtctccacataaccagtagagacattgatttggtttgtttggccggtgaagttaagcccgtaaacaccgttgtctcggccagaagcttgagtcctaaccgggttactcacggagaggagatcatccatactgtaatatttggggctaacgtggtagagaatgagtttaacttgatcgtcagggcttaactggtttagggttccgggtttaaggttttgaaaagcattgtctgttggtgcgaacaccgtcataccttcggatgaactattgacttgaatgttcacttgactaccgacttgagtgatgtttagaagatggatgaaagtagtgaattgaccacctttttcgaggatcgcagtgaggttgatgggaccagcaggctctggagcgggggctgccggctgagccgttgccttggttgcgagtagtacggctgcgatgaggaggagaggagctagagttagacgagtggtagccattattggtttgcttagttaaagtgtgaagagtgatttggaaagtgagatcggaagggaatggtttatatggaagttgaatgtttggagtgatgagttgtatcttgttggaatgagatggccaagtcaatacaaaacgtttgtagacaaataatgtctagactagagatatatcattaacataaatgttgtgtagatgaattcatatacgaatatatcagccgttaagattcgtttagtatttaaaattagcatatgagaaaaatattagattagaatatgaggttggtggaaccgtaggtagagcccacatcacatgtaatgggatcgagagagtcaataatttacataaaatatgtgtggaagataatgttcgacaacacaacttacggtgtaaggtggacgtaaatcgggataggaatttagggaatgaaatggagaaaattgaaaaatccttggacataaaaccttctacatttggtattgctacaagcctacacctagataggtcctattaaatcagaactttttttttatagatagtatcatcactatatcatcattagaagttaactgagaatagaatacaaaactttacagcataaatgacttacaaataatgtaattaacgtaatccgcaatatacatacaattgatgcattcatacatatagatgcgtagacatgtagcatgtaatgtatgttagaagaatatatgatgtgtgtgtttttgtaaaaaagaacaaaatgagtggacaggctgactaagtgacagctgggaacacacaagttggcatgtgggagagtggaagacccttaagtttatattgccttatcactaacaattgcatatttaagacaataaactaattaattggttcattaccaacaccatgaaatcccgtacatgaattcaacatagaaaatgtgtatacatttgttctagaatgcatgcatgacgtctctccctttcgttgatgtgaaaacggcacgcagttggagaacaaaagtaatgaaattccaacctgagttgcatgggctatatcgggcttagacactgcttttgtagatggcttataatgggcttaattctaaatcgggcccacacatattgagaatcttgaggtttttttttttgtttagttgggtctgaaaggaaatcttgagaattaaaaggccttatctcaaaattaagtttaatgaaagacgcataaaaaaacccataataacacaaaactctaaaataatgaattgggaaaataaatattatgtattttttgtccttgctaatatttgtttacaaaacagaggaagacagaccaaatttagaaacaaggatccaagtggaagcatccgagcagcatgcagccatacactcgtcacgtcggttcgtcgcgtccgccacatcatcacgtggttctcacgtgtttactctctagactctcatcagtgttcttttctaatacagtaataactcaaactttaaccttagtttttaaacgtctaaatctgattcttacattttttacaagctttacttttatttatgcttacattattacaagccttaattttttcttacacaaaaacaatcgattactatactataacattaaaaccgggttctcccaaaaaaaatcgattaaatttttatttagatacaataataacttttaaactcttttgtcgtttttgttccccgttgtctgtttttcgatgcccatattagatgctgatgtgtaagaacatgcactttaaggaggcatgcaagctgaaatgtgtctactactcgtctactccctccatttacaagttcaagtacttctcattttccgttcgtcattactattttaaattactagtagaacagcaaacaaaacgagaatacacattacttagagggtcactgataatatgatgtcttccaaaaaatgtttaatgccaaaagtagaaaaacgtaatacatgtggagtgtcaccccgatcaagagagctatttcccttaaaccaattggtgtcaaattagttaattatctaaaccatgggtcgacaattataattcgatttcattgtttattgaataaatcataaccaagactaaactgtagcgaatatgaaacaaattggtctacactatcattttgttacaaaatgttgaataatttattttaaaaaataaataataaaatcttgaccaaaactaaaataatatcagacctaattatcgaatgtaagtatgttactgattattggattattggattatgcgtctatttgttttcgattattggatttgtctatttttattggtgttatggtgttatttttatttttaaaagaactctttacaacaagtctcctataaatacataaactccataacccacaaagtaagaaagtaaatcaataaagaggaagaaaaatg

SEQ ID NO: 5047 - DNA, 3000 bp, Unknown
  misc_feature (1)..( 3000): cDNA_ID_1827167_gDNA_ID_1620758_Annot_ID_49946 3000 nt of promoter + ATG
agagaccagaatctacagcttcaccgtcgaggacacaacctcccatggaagctaaagcagaggacgagcaaagaagtaaggaaacgagtgtatgtatgtccagaaaagagttgcgtccaccaccatccgacgagggcacttggtgatcttaccggcattaagaaacatttttgtcggaaacatggcgagaaaaagtggaagtgtgagaaatgcgccaagagatatgcagtccaatctgactggaaggctcattccaagacttgtgggactagagaatatagatgcgactgtggtacaattttctccaggtacttagtgtatatctacacacgtacgtactaatagatgatctttacatttcctcatcacggtatcatatatttttagtggcgtaacaaatattttgatcacctagctgtaagcgcatatcatgtttaattgcattatatatagattcaaatatgattttaacttcttaaccagtaaagttaatcatgtttgaatatattagaatataggaagaatatatatatacttatatacatatcttaaaactcatactaaacctagctagagcttatattttaccgggtgaatactatgatgaaaaacaaaaaaaaaacgaatctgttacctcaactaacactactgtaccactggaccacacaaacaaatttcgttttaccacgttgtttgtaagtaaataagatttttttttttttttttgtgaaacaatttgtaagtaaataagatacatgttttttgttggaagtagtagctcatgtagggtctaaaacaaaataatttggagttacttttgtatagatattgccatattggtcattctctgagcatacgtgctgcttgatttcttgaataagacagtttcttggattgacatattttggttaaagtaagatatacaactttatttatctttttttccttaattgctatctatattactatatacatacatattaaacacaagcataaattagcgagtgtgtatagacgatattgatcttattggtgtgtataatttggtcaacaggagagacagcttcattacacatagagcgttctgtgacgctttagcagaagaaaccgctaggctaaacgcagcctcgcatctcaaaagctttgccgcaaccgctggtagtaatctaaactatcattatctcatggggacacttatcccatcaccatcactaccacaaccaccgtcgtttccgttcggaccaccgcaaccgcaacatcatcaccaccaccaattcccaatcacaaccaacaacttcgatcatcaagacgtcatgaaaccagcgtctacgctctctttatggtcgggaggaaatattaatcatcatcagcaagtgaccatcgaggaccgtatggcgccgcagccgcattcaccgcaagaggattacaattgggttttcggaaacgcgaataatcacggcgagttaataacgacgagcgattcactcattactcatgacaataatattaatatcgtccagagtaaggaaaacgctaacggggcaacttctctttccgtgccttctctttttagcagcgttgaccaaattacccaagacgcaaacgctgcttctgtggctgttgcaaatatgtcggcgactgcgttactccaaaaagctgctcagatgggagcgacttcttctacgtcaccaacgacgacgattactaccgaccaatcagcgtatcttcagagttttgcatcgaagagtaatcagattgtagaagatggtggcagcgacaggttctttgcttcgtttggatcgaacagtgtcgagttaatgagtaataataataacggtcttcacgagatcgggaaccctagaaacggcgttacggtcgtttcggggatgggtgaattacagaattacccttggaagcgtagaagagttgatattgggaatgcgggaggaggagggcaaactcgggattttcttggggttggtgtacaaacaatatgccattcttcctctatcaatggatggatttgaaacactctttaatggatttttctaccttatttatgagtgaacttaattatcaaagctgatttctttaattaattttaaaaatgatttatttcaccagaccaaaatcataaattaattttacgatcgattgtggttattagatttatcgtatcttctcaaattcaaaatgatcacctacgtctcaaaatttactcttccatcagatttttgctaaatttaggtcaactagtctatacttgtagtactcttcttattttattttttcaatttatagactacactagacacaagtataatgtagtgtgattcacatattggtattattatatgagcattttcgttgaagaatttttttttttttttcgttgaagaaaagttaagattcattcatattcactatgtgtagaaaggtgtttgatatgcttttttaaaaataaataagtacttaatcaattgtatgtattttgtatatatgccatagaaaaagtgtggatcgagaagtggtgggcacacaagaaaaacatgaaggcttttgagctcaataattctaaacttaacttgcagggcaattcatagtggaggaaaacattaagaaatgaaaaatgaagagagatagaaaaataaaagagaaaagattttctttaaagaatagctaataataattctcaccaaaataaaataaaattaggtaataatattgctagtggttctggaaaatcttaatgggcttaaacttatgggcctttgattagtacggaccaaatcttcagtcggtctttgggagatctttctctgtctatctctccaaagtttaaatctttcctcagaatcttactgtactttgttcaagtttagtactttattctgtacattaggttgttgaaagatcggagaaaacccattgtgaaattaaaccgaagctattcagtgactcatcactaggaagaaaaggagacgcctttggagggttttc

SEQ ID NO: 5048 - DNA, 3000 bp, Unknown
  misc_feature (1)..( 3000): cDNA_ID_1827151_gDNA_ID_1620758_Annot_ID_49952 3000 nt of promoter + ATG
tccgccacgtgattgaccttctggtaataaaagaacatagatgttggttagagaattgttttcaggaagatgattcaatgttgaatatattaatttgacacttttctgatgtctgaaatgctttagatcataacgctaacctttggaaagatattgtgccattggtcggatacgctgcaataacaggcaatatctgagaaggagctgtaaaacgctaatgaaatcagagaacatcaaagtgaaggggttttcttacattcagcggatcatctagatctttgtgtggatgtgtctctggtaacacttgaataattttggcttcgacccttggctggattataagtaaataaactttaggaaaacccattaaccataaacatgaacccagatgttaaatttccttggaaaatacctctgagaccctcggtgaagagctatgaccggaagctttgttaggaacagatatggtagtttcttgtttcccgtattcaaccctaccacggtctgtctcacctctacttcctttcaccaaatcatgctggatctgttccacactttctactgaagaatcaggatcttcacctctactatccccatcttcaccctccagttcttcctctatttcaagttcattcaacctggccatgattcttgcaaagtcatcgtcttcaagttcaccttcttcagtctctccttcagaaagattacaaggctctttttcacttgaatgtatcacaacaggtgcagaagaatcttcttctacatactcttctcttatctcaacaagtccatcctataaaaaatgataacaccggttaagatacatatgcagaatcaagaaaaaggaacacacgatccactctttcagcaaaacctaccgctacttcagaagcagttgtagtgaagaatgaagcctccgtttgaagatcttcaatctcagctttaagagaatgaatttgagactgtaaagtcttgtctcttctcttcaggaaatcaacagtttgtttcgatgatctatcagtatagtaattctctcccaacaacacctatatgaaatcacaaaacataatcctttaaatttgaaatttacactaacctcaatagcttactcttaaacctcatagcaaaacgatactagaatcaaattacatgtatcctgccattgaaatcgagaagagagaacatataatcatcatgaaacttaccaaacactcgttggtgtgaatcaatcgacctgggaaaaaagccattttaccgaatggaacctgtttacacaaaagcaccaactacattaaacgggagcaaaattgaatcataaggagaggaagtcaaaggattaaaaattcaccataacgttgtgatgaagctgatcgggaagcttcttgacgagattgatgagattatcgttttcgtcgacgtactgttgaagacgattcatctctactcgcttctctccgattttctcctccatgtaacttgctgcttttcgaacatcctcctctgaaaatcctaacggcgtcaccgttcctttcgccggcggctccattccggtaagggtttaagcacaacgacgacgaccgattgcagaaagaaaaaaagaaccaaaaaaaaaatggaaattgagagggaagcaataaaggcttctaagttctaagttatagtgaacttaatgggccgatttaatatggcccaatgtattttattatgttttcgaaaataaaaattgccttgtctgtaacaaatttattaacgtttgtaaattgtgttatcgttgatatttttagtaacaaatgttaaaagtttaaattattgtaatattttttaccaatcttgatttatttaaagaattatgatgcctgatagttgatatattatttacacttcacacatgtgtcacatgtaatgcaaagtgtggagataatggaattgggttggcaagtaggctaacacacgagaagaaggccgacaatgttgtgttacttcaattcaatatcatttgtattcaattccaatatttcgtagttttgagctagctattgacaatacatattaaatgatatattatttatatatccaatatatgtttaacaataagtcaataacacatcatttactacaaacactatgagaaacaaaaaaaaaatttgaactaagatctatcatcaaagttactttaactaatacaatctaccataatgaaaaaagttatcactaaatttcaataacttatcacccaaatagtgtttttaataggtttctaacttacaaaaaaaagaaaaaatatagtaacaataaaataagaagaaattatattagtttagaaatacatatgaaatattttgtggtcaaattctcctaaataagttttgatattttgccttttacgaaaaaaaaaatctaaactaagtatgtgatatccaagcagaagtagagacgggtcaattatacgcgtggtacacttttggaagtgaattacatcctctaattttgattttgtttggtaatcggataatatacgtctcttcaaaaacgtatattgtatcttttatctcgtaaaattagaaaaattatggtgaaagtccaaactttttagacgcgtcagtatgaaccaaaaaaacaaaaatatgattaaggatttgtgagaaaataagaggtttagcttaagaattcacaacatgtataataagattttagtataagggatcttagtataatttttacttttttttcccaaggatcttaatataattaacaaaaaaaaaatattataaaataatataagtatgctaaaaggtaaagaagtttctctctttcttcttcgtcctcctttgttctcctttctctctttccatcggcaccgaaccgaaacaacaaagaacgaggaaatacaaataagcccacaagagagagacgtagatggagagataaaggtcaaagctttattctttttcctctctcttcctagaagcagagatcactgttatcaaacaatcaacaatg

SEQ ID NO: 5049 - DNA, 954 bp, Unknown
  misc_feature (1)..( 954): cDNA_ID_1827143_gDNA_ID_1620758_Annot_ID_49954 3000 nt of promoter + ATG
ttcattattccttctaaaattgattgttgttccgttgtaattataaggtttaattgtaatatttggttgcctcagaatcacaatctctctttgcagcttaagaacatccgtagattcaaattgaattatccacttaataaaccgagaattaaggtaacctatcttcaaaaccataaaattcaattacaaacagaacggaaaaacttgtttttgaaacgaaaaaagaaatttaactgaagatcagaatatgatgtcattctcatacacagaatctgtgtcagaaggtgtcctaagatttatctgatttctcatcatttctccagcattactatttttccaataccaaaagatacaaatccaatttaaacaaaaacgtcgagagaattctccaaaaccgtcaaacaaaaatataaaaaatccaacttttgtaagaatcagaaagaacgtagcgagttgaaatttttgtcgatcatatgaatcaaaagaccatcaccgatatacaactttcatcatattctacacaaaacctcttgaaaatcaaataattcaccaaaacattaaagaaaaaccaaaaaccaagattgggttgaatcgacaaatggtgacttttctcggcgttatcaagaaggagattgctatatataagagatgcacgagaaaccctaaacctaaaagcatgtttggaaacaaataatatttgggcttctcttggatgctattcgaactcggcccattattactgccacaagtacagtttgggcttcgtttctatccgtatttggcccattaaaactgcacatgtataatgtatttccctttctagcctcttattttcttcaaattagaataacagcaagtaagttttcaaattgctaaatattacgactttatttcagtttctcgaaaaaagcaagtctttttcctttgctctcgcaacgcgatcgattagcgatg

SEQ ID NO: 5050 - DNA, 3000 bp, Unknown
  misc_feature (1)..( 3000): cDNA_ID_2991033_gDNA_ID_1620758_Annot_ID_167073 3000 nt of promoter + ATG
ctctgtttggttgtcgatagtcacacagtgcctgatcgtcggtcaatttgctaatccttgtgtgatttagagttggaatgatcatttggtgaaatctcgtggatcttttcttgttgaaagcttgttgacttgctcgtcatatatattcgacgatctatgggtactgtatctagttgataatgttcaaaggcttgatcgattttagccttgggatctgctaccgatgctttcaatttctgacgcttttctatgcgatcttttcgaattcgtttttctctccagtttttgccatgtcaattgattctcttagtaacactacttctttgtttgctctcttggattttttgtttcttctgaaatggaggcttgtgcattgattgttctatgtgtgtgatttcttatgcggtgttaagtcctttggatcttcgtataatgatgtttttaatctgctgacaaacgaatttatccctgcggcgttttagtttgctacatataaagttcttagctgtgaactgtttctcctgggtatctcattgcggtttgaattctgttttgctatcaggaaatgagtttcaacaaagttcccaacattcctggagctcctgctctctctgcccttcttaaggtcagcgttattggtgggctcggtgtctatgcccttactaatagtctctacaatgtcgatggaggacaccgtgctgtcatgttcaaccgattaactggtatcaaggaaaaggtttgtatttctcaaactaacaagatgtacttttatatctgaggctttgaattctaagaaagcgttacttttacttggatttgtgttttcaggtgtacccagaaggcacacattttatggtgccatggtttgaaaggccaatcatctatgacgttcgtgcacgaccttaccttgtagagagcaccactggtagtcatgatcttcagatggtgcgttttggtttcttcttcttttggcttcttttctgtgtgtgtttgtacaatatttagcccagggatttaattttaaatgatgttactgaatgtggtgctatatagatcatactagatattccttcttttgacgttatgttaagacccttcaatgcagcattaagagcatgttttagaaaattttgggtgtggtttgaggttatggagctgtagattaaatatcacttactcttttaggatattacacgatcaatgttgatccttatatgaactgtgtgagtgtatggataagtggaaaaacaagagacaagttacacttgctttcagtagacttaggtagagcaagaaagaacttagtctccattttctttcttaaaggagttgctgtgtttctgatatttttcttgggtgttgcacaggtgaaaattggattaagggttctcacacgtcccatgggtgaccgtttgcctcagatttaccgaacccttggcgagaactacagcgaaagggttcttccttccatcatccatgaaaccctaaaagcagtggtagctcagtacaatgcaagccagctcattacccagagagaagtacgtatctcaacattctttttctacaacttttctgctcttttgtttctaatggtggactctgtttactctctcctctaggctgtgagcagagagatacgcaagattctgacagagcgggcttctaactttgacattgctcttgatgatgtctccatcacgactctgacattcggcaaagagttcaccgcagctatcgaggcaaaacaagttgctgctcaggaagctgaacgggctaagttcattgtggagaaagccgaacaagacaggagaagtgcggttatccgtgcgcaggtatagcattggtgatcttgattgcaaatctaatgacatgagattagtggttttggcctgaagcattagctctttttgaatctttgtgcagggagaagctaaaagtgctcagcttatcggacaagcaattgcgaacaatcaggcattcatcactctgagaaagattgaagctgcgagagagattgcacagaccattgcacaatctgctaacaaggtttacctgagctccaacgatctgttgcttaaccttcaagaaatgaacttggagcctaagaagtaaaagagaaggaacgagtaagtttcttcatttcatattcatttcatttaaaagatctctccgccttggaagtaaaggatgggttggtgtttgaccaaatgaccctttctcgtgactgattctgaaaatagtctttaagaggacatattgagagagacgcagattggctttggtcagtattattcatcattttcaatgaaactttttgttgatattttcctgtgtttccccggacaattgatgaagttgaatttaaaactcaataatattcatatgatctgatctatgccaatagttctttttagtatatgttacatacgacatgcttatataaatatccgaatataagatccgtaccaatcctttcataaaacttaaatataaatatttcttgttagcttgctattcaaattttcttttttccactagttgccaaccttatctacctataaggatttgtattggagagcagagaaaataaaatattgcatacgtataataagattttgtatgagcagagcaacatggaccctttgtatttaatgacgtcttgccggcgccaccatgatagagacgtctttttctttctttcaccggtgaggagttttatgggggtgacgaaactccggcgaattttccggtgacgtcaaattttaaaattttgaccaagtaaactcttatttcaatatttgtatataaccgacggctgctttttatgatgtcatgtataattaaaattagctggaaacgagtgatgaccgttaaccaagataataaaatgttttgagcaataaataattccaaaaaaataaaagcgttgtggattaacaaaagacggaacgacttgctgtttcgtaaagttaaagggagacgtcatgtcgttttgtcacc

SEQ ID NO: 5051 - DNA, 3000 bp, Unknown; identical to SEQ ID NO: 5046
  misc_feature (1)..( 3000): cDNA_ID_1827178_gDNA_ID_1620758_Annot_ID_167070 3000 nt of promoter + ATG

SEQ ID NO: 5052 - DNA, 3000 bp, Unknown; identical to SEQ ID NO: 5045
  misc_feature (1)..( 3000): cDNA_ID_2990358_gDNA_ID_1620758_Annot_ID_167068 3000 nt of promoter + ATG

SEQ ID NO: 5053 - DNA, 3000 bp, Unknown; identical to SEQ ID NO: 5044
  misc_feature (1)..( 3000): cDNA_ID_1827186_gDNA_ID_1620758_Annot_ID_167066 3000 nt of promoter + ATG

SEQ ID NO: 5054 - DNA, 3000 bp, Unknown
  misc_feature (1)..( 3000): cDNA_ID_1378198_gDNA_ID_1620758_Annot_ID_167063 3000 nt of promoter + ATG
tggatgatcatggtgtgttagattttgaaaactgaggatttgtttttcgcatcttcactgactatattgatgttcaacaggcttgcttgaaggaaatacacgctgagatgctgagacgtcatctacatcgcctcgagcaactttcagagggtgaagatgatgtagaagttaatcctggcttaacacgtgtggtggaagaaaatgaggaggagataaatgatacgaatctttcagatgctgaagaagcattttctccagagcctgttgcggaggaagaagaagctgatgaggcagcagaagcggctggttcgttttcgccagagctcatgcacggtgatgatcgtgaagaagcaatcgatcccgaggaagacaagaagctactggtatatttaacagttcctacaattgaattttacacatgaattattgttgttggtgcttctactgacccaaaatatgactgcggctataacagcaaatgaaacggatgattgtgctggagaaacagaagaaacggcttaaagaagctatggactcaaaaccagcacctgtagaagataacttggagcttaaagcaatgaaagcaatgggagcaatggaagaaggtgatgccatatttggctctaatgctgaagtgaacctcgattccgaggtacccttatcactatttttctcttctctgcaacttttcagttttgtagaacaaaaataccataattttcatcttctaggtatactggtggcatgacaagtaccggccaagaaaaccgaagtatttcaatcgggttcacacaggttacgaatggaataagtataaccaaactcactatgaccacgataatccgcctccaaaaatcgttcaaggatacaagtttaacatcttctacccggatttagtagacaaaattaaggctcccatttacactatcgaaaaagatgggacaagtgctgaaacgtgtatgatccggttccatgctggtccaccttatgaagacattgtaagtactcgtaaccattatgtgggtttcatcatcacctctcgtgttatcattgtgctcaaatttatttttgtttgcttttcaggcgttccggattgtgaataaagaatgggagtattctcacaagaaaggtttcaaatgcacgtttgagcgtgggattctgcatttgtacttcaactttaaacgacataggtacaggcgataaccttatcggagtttggctggagaagacgaaagtggcacttgtaagactttggctgatgtttttaaaagccttgtttgtaagagaagggcgatatacatagtctaaatttggatttctctcaagttaatttctgaggtaagagctgtatttggatattttgttgaagctgatcatcaaacagaaccgaatagaaaatgattttcccacatgacaaactaacaatcgaaaatgtaatgatgataactaacaaaatgtgacgtaaataatttgaacaaatctggagttggtgtttctgcaagaactttttggtgaatgagtgttatatggaaaagttggtgtagagacatgaatgtgtgttttggttggggacgagagagacgaagagagagagagttaaggtgttgaagttgcttattaggttgagatctcaacatcaaaatgcttataaaaagattctgttggtaacttaagtagtggagtagaagatattatttattctgacttttcctttctttttcatcttccttttgatgtctctttttctccaaactctcctccactccaagacaaaaaaaaaacccttcttttgtattcgtattacttaaaatttgcatttcttttaataatctcgattctgaatattatatttatgtctaattttcgttactaacaaactaacataaccaaattttccgtatatatccaccatttaagtttaatgaagctttttgaaaatgaaaaactagtgcgtagagagtggagataaccactaaattaattgttcgtcgtcaacatcacaagtattgttaaatttgtaaacaattccctataaaactgagtgtgcgttatatttcattaatatattctgaaaataaaaatattaacaattccacgctctatatatatatatgataaaatcgctttcaaacttctacggtaacccgacattttctgtttttcctcaataaaagatttcttttttttccttttccgataaaattaattaggcaaccgtatcttaatctccgatctttccgcttctatcagattttcagatttgatgaactcaggttcgttcaatctttttctccaaacaatcttctttgctaccaaatttctggaatctagggttcgattatatctcttttagattatccattatttttgtaattcgttttagtttcgtttttatttccttttttagattaagaagagttcatattttagaataattaaaaaaaatggattctgcaagaagttggtttcacaagtttcaaccacgagataagcctcggaaaaaggatatgttctccggaagcacttacggcggtggcgtgacagaaaccaccgtccccgacggaggaaatgatacagaaacggcaacgaaacttccaccactaggcggtgacggagaagcactctcaaattcaacaaaacagaaagttgctgcagccaaacagtacattgagaatcattataaggaacagatgaagaacctcaacgagaggaaagagaggtacaaatattttagatatattcttgatgggtttatttatttagttatttaaatttggcagacgaacaacgttagagaagaagctagcggatgcagatgtatgtgaagaagaccaaaccaatcttatgaagtttcttgagaagaaagaaacagagtacatgagactccaaaggcataaaatgggtgctgatgacttcgaactcttaactatgatcggtaaaggtgcttttggagaggttcgagttgttagagagatcaacacaggtcatgtttttgctatg

SEQ ID NO: 5055 - DNA, 3000 bp, Unknown; identical to SEQ ID NO: 5043
  misc_feature (1)..( 3000): cDNA_ID_1827190_gDNA_ID_1620758_Annot_ID_167062 3000 nt of promoter + ATG

SEQ ID NO: 5056 - DNA, 3000 bp, Unknown
  misc_feature (1)..( 3000): cDNA_ID_2781994_gDNA_ID_1620758_Annot_ID_167058 3000 nt of promoter + ATG
caaccaccattttttttggttttcaaaacatttgttgggcctttatgtttgcttgccgatatatcaatcgaacccataattgttgggttttcagaattttattaactttgaaaaccaaaaaaccatttctttcaagtacaccggatttaaaattgggctttggtagtttattaggcccattaaatattgtttattatatatatatccacaaatcttcccagaaagcaaactgtagaagacacattgaatgtataatattttttgtctgaaacatcttcaagctcatggtacttcttctttctatctaagcgccgccaaccgcttctccagttcatcgattccagaactgcacagaaacatagaggtttggtttcgatacagatatgttctagttgtgtttagtggataccatacctgccaacatcctctgctttcttcccaccaattttcccttttggagcagatgataactgcagatggataaatacagagacaagcgaatatgaatcacggagaatacgtgattatacggaaacaatgacaagaatcgatggttataaacaaacctgcgaggcgatatcaatgccgatttcatcaagaacctaatcagtaaaacaaaaagcatttgttaaccctttgaaacagtctatttttagaaattgaattgatggatagagcccggaaatgtacctggtttgtcaaatcctctgtttcgtcttcagcttcgtcattgtctaaagcatcatctatggaatctgacatcatctcagtctggattccacatgcattagtcagattaatgactatttgagtgttcatggatttaaagaaacgatggatttgaaagaacttacagtcatgtccatttgtgcagactgcttttgaaattctctcataaccttagcctgttttgctggatccatattctggaaaacccacagaaacaacaagatcttaacaaaagagcccctcaaaattcctactggatttaagttatttctactaatttaacttgatgaatccaatcaaataattaaacatggacaaatcagatttgtgttacatagggaatctgaccttgctcatagctgccattgccttagtggcaccttgcattccagcagcaactgaagtgtgtgcatgcatagcctaaacaccaaagagaaagcttccaatactcaatcttcttggtttataaacagaaatactttagaatgaaaggatagaagttgtttaaattaagaaacctgtgtatgagtagcaatgcctcgcatttgagctcggctaccttgtaagttagctatttgctgccttagacggatcaattgccgagcaagaatcttagtcgctccctgcataaaaacaaaagatgtagtgtacataaactagatgctattactgataaggaatgcttgaaatacctcattgcctgatttagcagttcttttgatctcgagaacgagctttttttcctatcaaacatgaaagaaaacgttttttagatatgtcccttttaaaaagatggatgaaaacgttactaactgagccacactcatacttctgattgcagagatccgatttccttttcgattcctgaagccaaaacacgaaaaggtggaaaatttcatcagtttgagaggaatttaggtatatggcgataaatacttgagtaatatctagttaaagccatggaacatagtagcttatcaatcaagcaatcaaaaacaatgaattaacctttttctagattcaataatccaagcatatgaacaaagaatacctctggtagcttgtgtcatctctctcttactctcccgaagcacttctgcaattgccaaaaaaaaaaacgaaacattcagattctgacagtccgatttcaatagacattaagattctcgaattcagacgaaaccaagccagattccaaaagaaacatgatcacgaacgcgccacaaaattacagaagaagtcaaccggaagaaacccagatgatcaaaattccatttaggttgatcaatcggagaaaaaaaaaacctaattgagaaaacaaaatccataatgatacaaaagaaaaatccggtggaattaaacctctgggattaggtttcttagtgaagatgttcatgtttcttctccttgcttgttttgtttttctctgtgaaattgaagatggtctcaaagcttttagaacacggagactctgtaccacagaggtagttagagagagagagatttagcttcaaacgtgatcgcagcaaatttttgaaggttttaattttctcatcgattacgtaaatattcttatttatatttgattattagtttttttactgtgattattaaattccacaaatacgagaatttatagctaaaacgttatacataatgtaattaaatcgttttttttacacgactactactaacctaagtattttctatttagaataaataaataaatatatgatacaatattatatttttgttttgattaaattaatctaaaaacaaaattaattttaatccttggcaaaaggagataggggggtcaaacagaaagaagtgaaaaaaaaaagaaaaagaaacggccggtgagtaataaatatctctcgaggtcctcctcctcctttcctttgataactttccggcaaaatctcagaacctccccatttttctttgccgattattgatcggaattgctttgttcgctcatctgccaacttccttcctactcggtgtaggaatcttacgtgtccaatcatctgtctatttttggaaacaaatcctcagtgattttgtactttacttatatcaaattcgataactagggtttatcgaatcggattgttgtttctccaattataataattcaagttggttcacacagtagcgtcgacttttcatagccgctgttgtcgaattttgaatttctcgattttcccggcgcttttgttacgattcaaggagtttgaacaagtagggcttctcgttgcggagatcatg

SEQ ID NO: 5057 - DNA, 3000 bp, Unknown
  misc_feature (1)..( 3000): cDNA_ID_2150841_gDNA_ID_1620758_Annot_ID_167052 3000 nt of promoter + ATG
tcttgtttgaaccttgtggaaagaagattaacttagtactgaccttatcacttttagagagtgctgatccacagagaacaagctcttttgtaaaagctggtgtttgttccaaagaacatagctcagcaggatttctgagggagcaaggtaatgagatttattagttgctatcataagaataataatgtcatactgtaagtattaaattatatgctgaaacagaattatacatttttggtaagggctcggctctggaaacgcgatgtccagacttctcgttcgggaatttgacagaagaatgagccggacaaagtagaagaaaatcttcctgtaaagaccaagaaaacaatctcacattataactagaacattggtaagtaactcttatgtgaatgagaatgtagagaatgtggcaaaacatacataatcccaacggcatctagaaatctctcttgcacatggaacatgatagcttcgacggcaagacttgacaaagcagcctaaggcagcacctttcagactacatttagtgcacttgattttcatcccccttgccagttctgctttcaggttcttcactgtgtcaccttcatagtaaacttgcggtgccctgaacatttattcaactacttttagtatttttatcatgcaaaagccaaaagcgttataacactagccaaactatatccacatggacttgcagaaacaaagatgagcaaatgtagaagttttttgggtttcattttctataccattcgatacatgcgctatggacatggataacattggagcggaagatgtcatctccatccaccggtcttcccctagagtaatgcagcatttctccagtggcctaacaaatattgatccagccagttgagtaaaatacttcacaaacagagaagctcagtttctagagcagaggatatggcaaagacttttaaaggttttacctcagataccctagcggattggcagaaaccacaaatggttatgttggatgatgtttgttctaatgcctttgagattttctcacttagctgatcatcagagtttgcagagcatttaccattgcagtcaatatcagcagatttttgcatcagattattctccctcttggggaccttcagatgattttccattgcatcagaagcggtgatgtcacgcttcctttttgaatcttgttctgtatgacttttgggtaactgctggacacaaaagatcactacacatcttaagttgtttgatctcaagcacagaacaaaactatagattacccaaaaactgaagtacaccatctattaacatgtaaatgtgtgattaagaatactcataactgataaactaaaatagtcaacttatgaagtaagacgagaatgcacctgatggttctgtgctttaacataatcagtgggatcatctgaccggaggctctccatcaaccgcagcaaagtcggatcctgagtcttaggattcggactgctttcctggataaaggaatcaccacatatccgcttccttgcagcattgctaggctgctcagaagcagtgatgtccctcacattttttgcagcttgttctgtataactttccggagtctgcagcaagaagaaaaaaaagaggaatttataaacatctttcaatattgcgcactgataaatcaaaatgatcagtaatatgctcttacgtgattggcagcatcatactctgattcaaactcatataataggagatgatcactcaactgcttttcagtccaatcctgatgcttaggtcttggatcactttcttctgaggtcggaagaggagaaccatcacgactagaagaatcagtaccaccactgcgcttgctcacatccttgtcagtcatctcagaatcttcagattcgccatgtttagggctgttggaattgttcaatgcatcgttcttgtagttgcaatcatttggaatctgtaattgtgggagatgaacactaacagctgcattcaagctcttgtatatgcttataacactctccatgaatcgaagatctctcctagctgcacatgagagtaattcacaatttcacatactgtcttgaacactaatcttcaaatgatatcactggacttaccctttttgggatgtttagatttgcagacaggacatcccgattcaacttgcgacgatttgtgtacacatgaactgtacaaataatttccagaaagataagaatctatatgaattcaaatttgtaatgaattgttaaagaataacagagtagttagataatctcactcgcagaagacgtggtcgcaaggaagcaacaccggtcgattaagcaattttaagctgcaaattacgtaaatctcttgttacgattccaagaacactaaacaaaaactcgattactctacaatataatcaaggaaagggaagctgtgggtgaaacaaaccatagagggcacttgagctcgagctcgagcttctggagatgaagaacccatggattcattagcatgttagtaaattccgccattggtgatgtacaaaacccagatctaaatgacgaaagctcttgaaaccgagaagagaaggagaagatgcacttccttgcttcgtctccgtgcgattggtatttactttgagaatttagagacacgtgtacgatagatatcaaatggcgggaagataggcggggattttatgatttgattaagcgggagaaaatgtgaataaacgcccgcttgtttgttacgaaaattttgaaattattcaactttcaatttcaaaggcccaattaaaagcccatttgtttgttacgacgtgatagagagtagtaaccttctcgatgacttcgaaggttcttgtaagggtatatttggaaagttaggacgcttccaaaaacttttcaactctcaccttcaaggtccccaacaacgcacacactctctctctctcctctctcttacttttcctcctaaactctggcgatgaaaagtagttagagacaccgagcg

SEQ ID NO: 5058 - DNA, 3000 bp, Unknown
  misc_feature (1)..( 3000): cDNA_ID_2150883_gDNA_ID_1620758_Annot_ID_167084 3000 nt of promoter + ATG
agatgcttgaatctacaaaacaagaacaatgatgcacagatcacttagtcaccgtagaagcattctgatctacttaagtgagttagtcttatatgcgtcgggtttctgacctgcttattacgagcttcatcatcttgacgaaaattcaattcctgaacaaaaatgaaaggcatttatcatcagtaatctctgttaagtaacccttctctaaaactgtcgaagaggaaaaagaaaagttgatgcttcacctcctcctcaaatttatcaatatttttgaataaagctgctattaaggcatcaaagtttgggtcgtctcttaaagaacgtcggcttgcacaatgttttctgcaagtaggacactcattgttcctgaaaatgcatttgccagttaatataatacagaacaagctttacattagactccctaaagaatgctgaacatgcaaatggaatgcataccccaatctcattgacttatcaatgcactctcggcaaaaccggtggagacattccatcacagtccttgttttccttataatccctaggaaatgaaaaccagtgctggcatcagtcgaatttagtaaagatagagtgaatgactatgtaaaaacagggtaatgagaaaagttggcaagcctgaacagtctacaatgactaccagctttatgttggttgatgaaagtagctgaagcctgatttttcttattaggtagttaaacattcacaataatggtgactgagaggcaactgaagctgattgactttgtaatataaatgtggagaagagtacctaaacatatcgagcattgcacgtccttacagatatccgctagatcaacaaccatatatctgcaagggaagtcaagactttatcaaataacaaagatcaccaactactgtgttgcctactataagaagtctgtctcagtcaaaaacttatgttaagctaaaaagagactaatcaacacagatcaatcctcggcatttaaacacaacagtatcaataacatgcaagcaagaaccaaacaatgcatcggatcaatgaaaacaaaacactgaggacatcagagaccacatgttccgcttaaaacctatcaaacacaacagtgaaaccaatcatcagaaaatgtcgaaagggaaaagaattgttactctgattctgataactctcctgctgaagaagattgacttctttccttagaatctgaaactgttaataccaattaaagactttcatgttgtacatactaacgcattgattgattcatgtatctcacatcacatacgtatataaatatatccacgactataaacaagagcaaaaaacgaaactttcaccttcttcttctcctaacgcttcctcatcctctgcttctacttggtcacgtttcacgtcgtcttcctcatctccactttcgtccttctcatccattttgtctggatcttcttctttctccacagcttcaggattgaatctttcagcttctgagttccgacccagttggtcatcttcttcctcggcggcggagaagctcttcaaggaaggcattgttgattgtttgataacagtgatctctgcttctaggaagagagaggaaaaagaataaagctttgacctttatctctccatctacgtctctctcttgtgggcttatttgtatttcctcgttctttgttgtttcggttcggtgccgatggaaagagagaaaggagaacaaaggaggacgaagaagaaagagagaaacttctttaccttttagcatacttatattattttataatattttttttttgttaattatattaagatccttgggaaaaaaaagtaaaaattatactaagatcccttatactaaaatcttattatacatgttgtgaattcttaagctaaacctcttattttctcacaaatccttaatcatatttttgtttttttggttcatactgacgcgtctaaaaagtttggactttcaccataatttttctaattttacgagataaaagatacaatatacgtttttgaagagacgtatattatccgattaccaaacaaaatcaaaattagaggatgtaattcacttccaaaagtgtaccacgcgtataattgacccgtctctacttctgcttggatatcacatacttagtttagattttttttttcgtaaaaggcaaaatatcaaaacttatttaggagaatttgaccacaaaatatttcatatgtatttctaaactaatataatttcttcttattttattgttactatattttttcttttttttgtaagttagaaacctattaaaaacactatttgggtgataagttattgaaatttagtgataacttttttcattatggtagattgtattagttaaagtaactttgatgatagatcttagttcaaattttttttttgtttctcatagtgtttgtagtaaatgatgtgttattgacttattgttaaacatatattggatatataaataatatatcatttaatatgtattgtcaatagctagctcaaaactacgaaatattggaattgaatacaaatgatattgaattgaagtaacacaacattgtcggccttcttctcgtgtgttagcctacttgccaacccaattccattatctccacactttgcattacatgtgacacatgtgtgaagtgtaaataatatatcaactatcaggcatcataattctttaaataaatcaagattggtaaaaaatattacaataatttaaacttttaacatttgttactaaaaatatcaacgataacacaatttacaaacgttaataaatttgttacagacaaggcaatttttattttcgaaaacataataaaatacattgggccatattaaatcggcccattaagttcactataacttagaacttagaagcctttattgcttccctctcaatttccattttttttttggttctttttttctttctgcaatcggtcgtcgtcgttgtgcttaaacccttaccgga

SEQ ID NO: 5059 - DNA, 3000 bp, Unknown
  misc_feature (1)..( 3000): cDNA_ID_1827286_gDNA_ID_1620759_Annot_ID_49955 3000 nt of promoter + ATG
ctgcggctataagctacactgatgaacgtgtatactggtaagtaagaactaagttaggatatttttaatttctcgaggatcttactgaaaatattcatatgtgttgcagtgatcattgtgcaacttcaattgttgacttgcatcgaagctgtccaaagtgctcttatgaactttgtttgaagtgctgtcaagagattcgtgaaggatcgctttctgaacgccctgaaatgaagttccattatgttgatagaggacatcgatatatgcatggtttagatgctgcggaaccgagcttgtcttccacttttgaagacgaagaagctaacccatctgacgctaagtggagccttggtgaaaatggaagcatcacttgtgcaccagaaaagctaggtggttgtggtgaacggatgctagagcttaggcggatcctaccactcacgtggatgtcagatttagagcacaaagcagagactttcttatcatcatacaatataagccctagaatgttgaactgtaggtgttcttctttggagacagagctgacaaggaaatcagcttcgaggacaacatcaagtgacaactaccttttctgtcctgaatctctcggtgtcttgaaggaagaagagcttcttcattttcaagagcattgggcaaaaggcgaaccagtaatcgttaggaacgctcttgacaacacacctggtttaagctgggagccgatggttatgtggcgggctttatgcgaaaatgtgaattcaacatcaagctctgagatgtcccaagtcaaagcaattgattgcttagctaattgtgaggtggagatcaatactcgtcagttctttgaaggttatagcaaaggaagaacatatgaaaatttctggcctgagatgttgaagcttaaggactggcctccttctgataagtttgaagatcttctacctcgtcactgtgatgagttcatatccgcgttacctttccaggaatatagtgatcctagaactggaattcttaacattgcaacaaagcttcctgaaggatttatcaaaccagatttaggtccaaaaacttacatcgcctatgggattccagatgagcttggtagaggcgattccgtgactaagcttcactgcgatatgtcagacgcggtaaagctttcatttattttgtttttaacactcttggtttggttttaaatagtccatagactgactttgcgattcatgtaggtgaatattctaacgcatacggccgaagtgaccctaagtcaagaacaaatatcctcagtcaaagcactgaaacagaaacacaagttacagaataaggtcgataaacagagtactgaagactgtaacgaaaaggaagaagaagaagaagaagaattgaacatgccagagatttcgagcaatgaaaatgaagaaacgggcagtgctctttgggacatatttaggagagaagacgttcccaagttagaagagtatctaagaaagcattgcaaagaatttagacacacttattgtagtccagttacaaaggtaacaacacccacctgcatcaattttatgacgaatttatttccggtactgacggtttcttcttttcaggtttatcatccgatacatgaccaatcatgctatttaaccttagagcacaaaagaaaactcaaggcggaatatggtatgtaaccgtttacttggggataatgtttctagtcaatcttttgagtcaatattgacaagttaactgtagggatcgagccatggacatttgtgcaaaagctaggtgaagcggtgtttattcccgcgggttgtcctcatcaagttcggaatctaaaggtaaactgaatggtttctattcttcttctactcatacaatttgctttgtattggaaaatctaaaacttctctgtgattgggggacagtcgtgcacaaaagtcgcagttgactttgtgtcaccagagaacatccatgagtgtctgcgtttgaccgaagagtttcgccaacttcccaaaaaccacaaggccagagaggacaaactcgaggcaagtcttttatctctttgacatttctttctttcttttttttttgttcgttgtctgagcatactgtgcattgcttgctgcgggtgtttttttttttttgggatatctgaattcaattagaagagatgggcgattgaactaaatcaaaactaagaccaaaccgatttactcaattatttttgttgtttttaaaatcgtgttgagaaaactccatatcaatgacgagatagaaatcaaactaaaaatgacaaaaatatatgtttttcctccccaattctaatttacatttagactttaaatagttagcagcacatgatttgattacatatttttattatttggattttcttttctattgaaccaaaatatttcgatccaaatattggataaaattttggtttcaattaggttaatattttgttttcatttataaaattataaatcataaatcaaaaacttaaatgcccatctctacctaattacaataacaaggggaaatatctaatggccggttatccgacctattgataagctatttttatttaagctttcaatgcttgttatttgtttgcacaaatgcgtttgtctccgttcgatgggtatatttcacaaaactagtttatctaacaagttacaatggtttctttttaaatgtgattttttttattttacaatgttttcccatgtaaacttaaacacatagattgaaaactagtgaggtcttatgcaaaatattactcgccgtgcgctttattgtaatcggcctcaaaaataaaacatctttaagtactcaggtggtgctagtgtactcactttgtcaccacccatattcgaactcgcatgttgcgtgttgttgacaaaaaaaagaatctaggttgcattgtggtactttagggtaaatatgacttgtgtagaagtgttgaatcatcgatttacccaatccggtcaagattgaagacccatg

SEQ ID NO: 5060 - DNA, 3000 bp, Unknown
  misc_feature (1)..( 3000): cDNA_ID_1827282_gDNA_ID_1620759_Annot_ID_49956 3000 nt of promoter + ATG
ctatgcagatcataaatgtgtacaatcagaagtatgagagtgcgggtgcattctggccagacgttcatggacgtataatatcggcattgatcatctcacaaatccttttgttgggattaatgagcacgaaaggaaaagttcagtccacacctttcctcctcgttctagcgattctcaccttcggttttcatcggttttgcaaaggccggtacgaatcggcattcgtcattaacccgttgcaggttagctcaaaccaagatcgagcattttcggttaatggatggtagttttagctacatttgttttggttcagtttgtgttatttaatcttgtgagtaccggtttacaggaagctatgattaaggatacattggaacgagcaagagaaccaaacttgaatcttaaagggtttcttcagaatgcatatgttcatcctgtttttaaagacgaagaagattcagatgaagagggactaatcgaggattcagatgacgaagattgtgtagttgtacaaaccaaacgtcaaagatcacggagaaccaccgttgcgagcagcaatgcgagccgtggctcgtcacaatcaacgccttttaatcaacttgatttgggtaaggggaaaccggagacttgatggtccatgagtaattgacttaaccggattggtttgtctacgtagagatcttttttttttatcttttcttttgttacgtgtggtgaaaggttttgtatatttgtatgattatcattgttttgtttgagtttgatgtaaaaaaaaagagaggtgattaatgcaatttcatattgcttcgttttttgctaaatcggttttgtaattgttgtttatgcttatgcaatgaattgtatcattctttcgttataaatttgagctggaagaaatattaaactagacgttttattttaaaaatgagacttacattgaaacggtatattttttcctattggcaagtgtattttttttgtttggttgtcaacaaaagtattttttccttggctcaacaacaacaaccatcattttttaaaaagaatgtaaatatcattcaaaattaaacttaggttttaaataagcataaacttaaaacatagttctataccaaagaaagattaaaaaaaaaacatgaaaacatgaaaacatttgaggttcatttcatcaactaaaccttaaacgatgaagatcttggtaaaaagatgtagtgaactcgacaaactcctttaggcgaaaccgagagagaaatcaaaaacaagataagcattagatcaacattcaacaatatagcgacctttcgacgatggcccaaaacaagcaaaaacagagctacacgaactagtagcagaagacaatgctttcttactctaccaaaatcctcctaatatcaatagtctaacaacatcacatcctctaaaagctttatcagcacttccaatcgcaaaaattagcaactatcttacttgtatgtaccttatctttactgttgtaaaagttttatgataattttttccttaaaagcttttatttattaacataaaacaattaaaaaaaaaatccgacatgtatgtatcgtactagacgtaagcatcgcatcgataggtttggtcaagactcaagactaactattgtgcgtgtttcaaagcttactcagatccatgacaagaagatatcgtactcattctttattaaaaaaaaatgttggaactttttattttttttcgtgagatccaatgaaatggaactgcataaggcttatatccaattaaaacaatatttttttttaacatctcaactaaaacaatttttctattaaaaaaacctaattttttttatacacttcttactttttattattattattatataaactatctaattagtcaatctattataattatgtttaaaagatcttataaaacacagatagtatctacagatattaattcatgattgtaggaatgaaactcctggttagttatgagaatctaatgaattcattgagttataaaaataaaataaaagatatcagaagatattttcagtttcttattcggataaatatcatacgattttttttttataataacctttacaaattgttgattactaaaacgataaacatgccaataaatatcagtaagaacaacaataaatccaaaaatcaaaagatatctctttaaatgcaaagaaaaatccacaactacttaaaaaccattgactaaaagtagaatcaaatcaggaattttattaagactgcttttagcttgttgaaataaaataaaataactaacgctttatcagaagtgagtaaacgttctttatttgttttccacgtggtgagtatcggtgaaggtaataatcacctgcgatgcatttctttaatcacttgcgctccacggatcttataggtcccaaaaaagtgctttaacggtcagattaggctcgattctttttctttttttccgtgctcaagaaattttccttttcctaattctgggatatttctccgaataaactatttctcttttttcctttattcagttatgaaataaaaaggaaagctaagtttgagagaatccaaagtttgttcaatctctttcatctaacttagctggaatctagggtttatagatttgtttttcacaggagattcatcgttgcagagttcttcgagcttgtttttttctgtgtttgtgttcatcataaggtaaaattgagttttcgatcttcttctgatttccaattctagactcaattgtctcttttgattgatttggttttaataatgttgtttggttttgattggaatcgattgatcatatactgttttattgcgattaattttgattatgatcgaagaactcgaatttgttgtctctgttttagatattcaaatctgcatgttcgttttgtttcaattttggtgtaagaatctgtttcatagatctgaattaccatcactggcgatttttgtttgcaggagctaaagaatg

SEQ ID NO: 5061 - DNA, 3000 bp, Unknown
  misc_feature (1)..( 3000): cDNA_ID_1827278_gDNA_ID_1620759_Annot_ID_49957 3000 nt of promoter + ATG
ttggttttcccatctttttcttctctttatgctaccaaatcataagtcactcaacatcaaatgaaacttccataaccattaatccaaatgcaaaaatcatgtaatatataacattacactacataaacttaccatttactacaataatttcatacttcacctagcaaaatctcaaacatgtaaactttgtctcctaaccacagcattttcacattctaactaacaaatctcaaacagaggattttatttttctctaaccaaatctgtatttgaagtaattgtatattagacaaaaagtttaaatttttacacaatttaaccatttggggatttgaaattgatttgacaagaaacagactgttaaaaagttaaagttcacagtaaactgactgaccaatcacattattaaatttttaactaatttacctgtacattcgccgacactttaacggatacccgtttcacactcgagttcggatccgggttcagtttcggtttaagattcgtttttttcgagaatcctctccgtagccaagctcgaccttcatggagctgagagagcataaaccaattaacgaaaatgaagaaaccaacaagtacgattacaaacgcggcggttttcgccgttctgattcgtttcctttttgctctcttaaccggatttttcaaattccggtttggatctccgttgatccaagacaaaaccgacccgatacaattcgacccggtgttaagaatcttgtctccagctacttctgaaaagcgggttggaccgagacgtgtcggtgattgaaccggtgaagctcctcctcctccatggatcagatcttggactcgaagaacatcgcgagtctctggtttctcttcgtctggtctctcagaagacatggctaagctcacactctctctcagttctgttcgatcgtgagagatagatttgctgaatttaacgaagctagcgaagaaagagcgaagtgagtgttttttgctcgaatttcagtgaggatttttcttctttgtctgaacgtaattattaaagttttttttaaaccttgagattgacgctggtattaatttaaggtccctgtcctttaaaatcattttaatctttacctattattttatctaatacgaaatataaccctacgtatgtccgttgtggtttcaaagttataagaaattgatcaagtagactgttcttagtagttgttatcatttcttagaattaataacattttggtaagacagaattaataattttgttgagtatttaagatgaataataatttttcatttagcgatgtgtaaagttggattagctcctaccaactacgtaaataataaaattgaaaactagtttattactactatctacagcttgttgaagctatatctatgaaatttgaataatttttcattgtgtttcataacataaacaagtagctaaactagctgtcaaaaacaaaaatagttgcaagcatgtgtttggtatattgggctttttgtgtggagggtttcaaatacgctttctgcatatcagagtaatatgattttaattggggcctagacatctgtttttggtgttatattaattagacaagagttagagaacttattaatttccttttgtcaggccttttttttttgttaaaggaaatatagcacatgcagacacttattaacttactttttcaagataattaagttaagaatttaaaattgtatttacaaccattttaatatatgtatatagcaattgatacaaatgtttactttttcgacatggtactagtactacacgtctacaaggactaatataatgagagtattaaaaaacaattgcagttttgatgtaatcccagatagtcttaacgcacgtccttagataaatttctgtgacactgatgaaaggtggttattaaaaaaagaaaatgaagaaaaatgtagctagattattcacattgatttggacgtaagaaaagtaattcgtattgggaataaaatagacaaaaaggtgatttatactgaagaatatgattattaaaaaaaaacaaaaaaaattatagacttcaacgtgatggcacggtatttgcctattttcattattttcttacttgagtagtattagtaacaatttaattaagctaatttcatgattttttactttagtcaactatgaagtcattatcttattttagcaacaaagttattattttagttattttaatctaactttatctccaaaataagcatgggtatatctaaaacaaataagatagatgtgtaataataataaaaagttagagctggtttaagtttaatttaggaataaacccaattgggacatttttttgaaatgaaactttttcaaggaataataatagtctcttgagttagacggccgaccaacaacaactagattcaaagattttaaaaagatccaactttttcatcatcttcttcttcttctatttctccgtgtattttcagcgttttgtatcaacaaaaacggcacgaagtttcttttcttctcttccccatttttgtgctgttaacagaaccaatctctctgttttttccatactctgttttttcttccctctctctgtttctgttttcagaggaaggagaagagaaaactaaagaaacttgtgcaatacttttccttgaagaaaatttaaagattatattcgaagaagcttttatacaaaccacacaaatctccacttcaccaatatgatttcttgattcatctcatattattttcttcttcaatctgatcgcaagaacattgtgaaaaaaaagagtcaacgaaagggccaaatttttttgagtaatgagtttctaaaggtgagattagtataagcgtctttgactattatacaaatctaaaacttgatctttgtgtctaaactcttatgacaatttttagggctcttatatatttgcaggtgaagaaagaatttgtgagggtttattataaattagtttgaggagatg

SEQ ID NO: 5062 - DNA, 3000 bp, Unknown
  misc_feature (1)..( 3000): cDNA_ID_1827274_gDNA_ID_1620759_Annot_ID_49958 3000 nt of promoter + ATG
aacctgtcaaatgcatacaatatcctaaaaattggaaactatctcttcagaccaaatagcaaagagagattctatattaatgaaaacaataatctttacagtgaattgatcagcacgtcgcttctctgattggagaaaagataaccgcattgcagcaattttctcatattccttcattagtacatagcaagtccaaaatgtgaatgcataagccatcacaagatgtgcccaaaacctttttaccaaattaagaaaaattctaatcattataaagtttttaacaaaaatcagaagtagcaactacataattttctttcactaacaaacctgtctgatccacgttcgacattcgaaatcgaaagcttatcgatattactcgatgttacattacgaagttttgctagctgcaatccatcacttgtccaatttacaggtactaaaattgaccatgaaagtaatgcaatcggaccaaagatcttaagcctataaaatagtaaacaaaaaaaaaaaccattagaaaaaaaaaacaaagctataattagtaactgtatgcaagaacaaaacattttttgattacccaatcaagtaaatcctcaagtaaacagcagaatccaaaccagcatgatcaataagttcaggctctggcatcttaagagcatcaggcatccagtttaaaaaccgaacgtatgatcgaaagtccaaattcataatcttgctaacgaaagcacccgaattcacagggctgcttctaacaccttttaagtaccatttagggaaataaaccctatcattgaatggttgaatcctcaagattgcaaatagcaatagaaatatcaatgcacttagaatattaatcgctgctgctagtccaatatctgctaatgtcgccatctcctcaaactaatttataataaaccctcacaaattctttcttcacctgcaaatatataagagccctaaaaattgtcataagagtttagacacaaagatcaagttttagatttgtataatagtcaaagacgcttatactaatctcacctttagaaactcattactcaaaaaaatttggccctttcgttgactcttttttttcacaatgttcttgcgatcagattgaagaagaaaataatatgagatgaatcaagaaatcatattggtgaagtggagatttgtgtggtttgtataaaagcttcttcgaatataatctttaaattttcttcaaggaaaagtattgcacaagtttctttagttttctcttctccttcctctgaaaacagaaacagagagagggaagaaaaaacagagtatggaaaaaacagagagattggttctgttaacagcacaaaaatggggaagagaagaaaagaaacttcgtgccgtttttgttgatacaaaacgctgaaaatacacggagaaatagaagaagaagaagatgatgaaaaagttggatctttttaaaatctttgaatctagttgttgttggtcggccgtctaactcaagagactattattattccttgaaaaagtttcatttcaaaaaaatgtcccaattgggtttattcctaaattaaacttaaaccagctctaactttttattattattacacatctatcttatttgttttagatatacccatgcttattttggagataaagttagattaaaataactaaaataataactttgttgctaaaataagataatgacttcatagttgactaaagtaaaaaatcatgaaattagcttaattaaattgttactaatactactcaagtaagaaaataatgaaaataggcaaataccgtgccatcacgttgaagtctataattttttttgtttttttttaataatcatattcttcagtataaatcacctttttgtctattttattcccaatacgaattacttttcttacgtccaaatcaatgtgaataatctagctacatttttcttcattttctttttttaataaccacctttcatcagtgtcacagaaatttatctaaggacgtgcgttaagactatctgggattacatcaaaactgcaattgttttttaatactctcattatattagtccttgtagacgtgtagtactagtaccatgtcgaaaaagtaaacatttgtatcaattgctatatacatatattaaaatggttgtaaatacaattttaaattcttaacttaattatcttgaaaaagtaagttaataagtgtctgcatgtgctatatttcctttaacaaaaaaaaaaggcctgacaaaaggaaattaataagttctctaactcttgtctaattaatataacaccaaaaacagatgtctaggccccaattaaaatcatattactctgatatgcagaaagcgtatttgaaaccctccacacaaaaagcccaatataccaaacacatgcttgcaactatttttgtttttgacagctagtttagctacttgtttatgttatgaaacacaatgaaaaattattcaaatttcatagatatagcttcaacaagctgtagatagtagtaataaactagttttcaattttattatttacgtagttggtaggagctaatccaactttacacatcgctaaatgaaaaattattattcatcttaaatactcaacaaaattattaattctgtcttaccaaaatgttattaattctaagaaatgataacaactactaagaacagtctacttgatcaatttcttataactttgaaaccacaacggacatacgtagggttatatttcgtattagataaaataataggtaaagattaaaatgattttaaaggacagggaccttaaattaataccagcgtcaatctcaaggtttaaaaaaaactttaataattacgttcagacaaagaagaaaaatcctcactgaaattcgagcaaaaaacactcacttcgctctttcttcgctagcttcgttaaattcagcaaatctatctctcacgatcgaacagaactgagagagagtgtgagcttagcc

SEQ ID NO: 5063 - DNA, 3000 bp, Unknown
  misc_feature (1)..( 3000): cDNA_ID_1827264_gDNA_ID_1620759_Annot_ID_49961 3000 nt of promoter + ATG
cgaggtcgaatatcccgagtaccgtgggcttatccaccggtggttcgtctggtccaaccgatagcgtcaacacatctacgccgtccataattgcctatgacaaaattaaataagtaaacaaataaaattggttaaagatcactaagagaaatataggccctaattagtattgtttacttggtcgatggctgcaattacgtcaacaagagttccgattgatggataaatcgccttgtagacggctattctgccacacaaaccaataaaataactcgtcattttttttccaaaactataaagtatcatttagtctttgaactttcaatatatgagctaatgaatatgcgtgaggtgacaaaccgtgaacgtggggccataccgctagcacggccgtagaagaatccgtcgacgatcaccggaactccagcgttcccggctgcgatggatgccacgtggctgaaccaacccgaccaaatagtaaacacttatgcaacacatacaatgcacaacaaacttacaaagcaaatgtatagaccattttacaaacacaaacaatataaagacatataatctacccccataatatggccgtaaagagactttagcaaaacttattgtcattaccgccaataatttaaaaccattatatagagtcaagtctacaacctcatttccatattctcaaaaaataatatgaacatatcattacagtttaccaaaaaaagatagatttatagttttttttctaagatatatagttgactacaaaataaagacatgtatttataatacaatggctaagtgatttatcaaattcaaaaatggtatttcacaaaatctcttcaaaaaagagagagacatttataccttccgtggccggacgcatcgaacggagagagtatatccaaggaggagttaagagcgcctgaagctcgagctccggcggaaaagaaccttgcggagataatttttccgttacaagatccgggtggaaaaaagggaccgatctcacagtcaccggagaaatgcaaacgtgagagatttgatgagtaagggtttgtgagatcaagtgcggcgaagctaggatgagtagggttaattccggtgtccacgaaaccgatcacgatgtcttctccagcacgtctgtctccttcgtttgagatcttttgccagacttgttgaggaagttccaagaaatcgggagtgtatgttgtcattagtttcactcctttgtcttcttctactgccttcactccttttgttttcccgagtttcttggcctgcaagtatcagacaaccaaaattaaccagtgattgaactaaacctaattaaaaatggaaattatcaagagattcaaaactcggcgatcctggttggtttagtttcaattgtttttgatattttcttaatatatcggattcatagtagttgatatcaagtaaaaaaattgggaattcatttagttatgcacttgcgatataaagtgggttcaatttcttaaaaatatgactttttatccaaaaaaaaatgaagtccttaaacttgactaacgaaatgaaccaaaacagaaaagtgaaccgagttatattcattttgggtaagcggagaacctgagaagcagtggtacggactgcaatagcattgatgacatgtttgaagctataaagctttgtataacttcccttttcaagtgtgcttccaagtatttcgtcatgaatctcttctatcttctttgcttctaacgccatagctttgctaattaattgtcgaacatcaaaaaagtattcctcaataaataaatgaattatataatgattaatttagatattggccaagtcaaagacatattgttaatgaacatggaagatgagaaaataagaacttatagatgaatttaaaccaagtatatgaaaaaataataatgtgataaattctttaaatttcgaagaaaaatgtattgatgtggacctgttgatattagtagaagctcgaaaggccaatggttcaccttcaaccaaaatagagtaaatctttggtatatgatcatcgttttcgccttttccttctttttcttctgctctggacaatattgcacaaacaaccaatacaaatatacatactattaaacatatgtaggaatatgatcttagttttcttggattggtttccattagatctttattaggattctccatttgcgttaatgaagataatttatatcatgtagagggcaatgagagtcatgttcttggacaatgcacattaccaacgtgaccattttattctatcagaggtttatatatatgcgttacaatttgtaatatttggtattatggtgtgagccttgcttataaggaagttattttcttagttcaaaccataaagaaaaagtaaaaaggaagcttatttagaaaaagttatatcttaaacaatctgtcattcctttttttcccatttaatgttatttttcaacttatataaaataggtacacaatttatcgtatgccacatggcatgttttgattcgttttctaggtttttgctgacccagattgataagattgtgaactacatttttcaagagtaatttcagttataatgagaaatatggaaaattaattaaaatatagcaatgtaaagataacaagattgtttgaatattccttaagacaagtttaaaccattttacccttcatttaaactgttacagaaaagaaaattagattttttcattagacattttatttctgaaacatgtgaatatttgcattctcaatctcatattctcatatagccacaatattcgaaatataattcatgtaacaatattatcgtccaaatcccttatggaattgtacacaaaccacttcatttctcgactcatttattattgggccaagatgggccggactattgtcttaagaaaatataatctcaaaacccaaatctgctaacatatatcgaacaaaaaacctcaggaactcttgaaaacttgttaa

SEQ ID NO: 5064 - DNA, 3000 bp, Unknown
  misc_feature (1)..( 3000): cDNA_ID_2781280_gDNA_ID_1620759_Annot_ID_49964 3000 nt of promoter + ATG
attaattaaaaaaaaatatgcttctcgtttaaccaaaataccattcacatataccctttaaaatttttaaatgattaatttcatgtagaaatcatatagactgtaaatgggttcacgaaaaaaaaactggaaaacgatgaatattgatagaatgaataaaaatggtattgatagaatgaataaaaatgagaatgtaacaaaaaagatacgtgaaatttgctaatcccatgacaccgtgcttgcactctttttaagatctaaaaacttatatatttcttctaactagtagtaaaaaactaacccttttcttaatacaacttttttgcaataatatatatcttaactggtttaaatcttatggtataacaatttgtcccaaaaaaaaaaaaacttatggtatacaattaaaaaacagctactaatagtctaatacttcttgtttttttcatcagaagctactaatacaaaccattaaagttttttatttatttctatcaattatttctcgtggttttttgaatggtcaaagatcaaattgtatttaataacgtcacaaaataatctgagaaaaaacgagagaaatggtttgcgaaagtttctatcagactagagcaaactgaaaagacagaaaaacgaaaataggttagcaagcaaattgccacttaaaatatttcattaaattaacaactcaacaagaccttgttccggcaaacacatacagtgcgtcggattataaaaacatagtcggcattggtaaaatacaagttaaatgcgtattaaacataaacacataagctttacttttagttttattgtagtgaagcaatagttttgttaaaacatttttccaggaaaataaatcaagaatgatgcggcaatgcaaatcatctatctagcatcaacacctttttgacttttggattcatttctaaattaactagtataatttataatttaggatgatttgttttatattgaattaaaatggatacagaatctatgatcgagtagattacaaaaaatgattaaaaaaagaagaagaattaagttgaacaaaaaaaattgaaccaaactcgcatgaaatagtgaatatacagggtatgatgggaaccaaatatatatttaaattttaaacttacatctatcttaatttttgcttcccatgttatcttttggtactcatatcatagttcatagattatgtgcgtacacactacacatatgattatgatttatgaatactgcattaaactgtttcaaatgcacactttaatttctctttttctccaaccaaactttaatctagatctaaacattatatattcataatcatgtgtacccattagacaattattggaaaataaaaaattatatcacgcgcatgaatggagtctaagatcgcccaagagaaaagtaggtagcagccacgaccgaagtctttgttctcactttggttaacgtttttaagacgatagggagagtgagaaagagacattgtgttattcaacagtttattatgtaatataagcttaattgcaactagtaactaactaataacattttacattgtgtatacgtaacgacggcttatggttgtgatattgttttggatgaattattgagttagaaaacaggttttttaataaagtgaaaagaaagaagtaatattttatggttttataccataatgcactctttaagttgagtaggaatattcgataaatttaattccaatatataattatttgacttgtattctttaattatgaaacatcagatcaacgtagaaagtgtgaaggaattttaagatgaattgatatattaaaaggtggcgaatattatcaaacaagccaccctgtaaatttggtagtttatatcccatatgctttctatttttctgaaacactgatacataatatctcctaaaaacaaatatattagagaatttttttgataaaggtttcttagttcttacatcaattcgaaagatgatatacatgctatcaatatcaccatgaattatccttgatactagaaaattgatggcacacttgatataagaacttgtattttcaatatacatttattctatacaaaaaaaaaaaaaaaatcctagaacaagtgggtagagaatctctaacaagtaagtttcaataaatatacaagacaaaataaattatgtgataaatgataaaaagagacaaattaagcgagttttatggatcaacagatgatttgtctgataaaaataaaatctttatactggaaataattcggacggtgtgcaaagccaaatctaaaatacaaaagaagtaaagtgttacacatttgaaaagaatcctagaatgttacattattgcaattttaaaaattccttataaaaaggatatcaagtaattttcgaaatcagtatcctgaaaatggaaaatgtaagtgatagaactagtctcctttttaggaagggtctcttctcaaatttggttatatgattcaaacgatgggctcaactagtaaactttgtcattcagagttgtttcgaaatacttgaaatctctcattattgttctcttttttcgtaaatttttcaaactatttcgaataaaataaccccaaaagggaagagaaaagaaaccaattgaagtgtataaatagagacccaaaaggaaaatgccaaatgaatcaatctcttaaagaaaggagatggtaggggtccatctatgatgtgctcacatacatgctccacgaactcttgtttcttttactttaacttcttcttttttaacaatttgaatgaaacatatttatacatcttatctatgactatgactcgcacatattttctcagaattttatttattttattgaaagccaatctctctcatttgcgcctataaatagcaaccctctctcattctacaagtctcacatcaaagcaattaacaaatacacaacttgtaacttcaaatagattactttcaaagaagagagagagaaagaaag

SEQ ID NO: 5065 - DNA, 3000 bp, Unknown
  misc_feature (1)..( 3000): cDNA_ID_1827254_gDNA_ID_1620759_Annot_ID_49967 3000 nt of promoter + ATG
aaaactagaaaccctagctcaaaggggaatcatcaacttgttgtctctccactattttaccaagtcgtgagataaattttgggccgaagatggaagataatgggcctagagattttcagcccaatggctgaaaacattttatgcatgaatggatttgtaactagtatcggaaaccatccaaacatgtgatgttgtagactagatcatctataaaattgtatggtctaaactatacaagctatgtaaatggtgtctgtttctaatactatgtaaactagttaacaagatttcgttaaaataaactataataaccaatgaatcaaatcggtaattggaactaattgagtgtccaacgctcacaaagccaacccctaaatctcataaacctacaaaaggacaaaatgtattagaagattgtgaatcgcaattttgacaaaaaaaaaagagtgagaaaagaagaagtatagttatctttctaagtctagttaaatgatctacttgttggaacttcaattctaaaccaatgacttctggtgaagttcattaccaaaatgatcggatcttgaagtcattagattctctgcaatgaacattataaactaatgtaactacatgtaaaaattgaagtcatattacataagaaattgaggtcttagtttgaaagcttataatagcaatgaacaaatataaacatttatttcacattggaaaatgaaatattttcctctatatatattatacacttactacaagtttcactagctttgtgaagaggacattatggtataagtgatgaatagacatgcaaaacaaacatcgggttttggtgaatgtgcccacaaaagatttatgaaacatttgttttttgaatttaatgctaaattatattcaaaataaaaaaaaacgttttttacacaaaactggaaactgattgaaactttttatgaaaaaaaaacttctcttctctaagctctcgatgcaaaccaaactctcatttcatccttatacttcaaaacaccacaaccactcatcgtacttaaacgatttctgacgtttttgtctatcatttttataagtctctccggcagggatgggctcttcccgtgtcttctttggttcctttcattccaaattgagtgtatgaaacattcgtcacatatttttggtccaagatcaaactgttttctcttcggatttttattcaacatttgtcacatatttttggtccaagatcaaacagttttctctaacggaacaagattctacagcttctcagcttccacgtggtcccgatcatggattgccacgtgtacgattccacttggtaaacatgatttttttttggaaagacaagttgtatctgtaagattaaataattcagtacgaaaaggcatcgaatcctcactcacggattgttcacaaatgttgtctccaagtagtgtaaaatatttcgctttttacacattgccaaagatcatctccatccattaacgttacgtttatctccgaatatactttatgaaacagtttgttaattaattaagttctagatatcaggtagaaagagagtttatgacactttctgtcatttttagtcatattttaagggaaggtttttgcagagactagaaaactgcaaatcatatagtgtttctaactttgatatattgaagatttttttttgttgatatattgaaattttgatgtaatattaacatgtcttatttatgtttctttatctcattcggatgtatatattttttatgccacaaggttttctgtgacctaatatcttatatgatcaaatcaatagtttctatatccaaatataacatgatctaatggtacaccaataaaaatgctccaacgatgatcgtgaaaaccaataagaatgtgatctgaatttggtttattattacggtgtaattttgttattttactagccagtgttgtatatggatgaatcaaagtgtaattttttgtgtaactaattattcgtcgatcgcgacaattcccttttaagataggatagtttattgatatataaaataatcctaatactaaaatagaaaaagacggtcagataacaaatattttcgcagtcgcgtctaatggtttttacgaagttgaatacagtgtgatctttggattatttttgaagtcaatcttcatctataatttttttttaaataatattaggataataataggttgaagagaaataattatatccataattttctgtaaataaatacagctttactttatatttattatcatcatcgaaccaatgatatgaagcaattttagtcggtaacttggcgagtcgttaattcagttcgaattataaaaagacttctaaacacgaaccgaacacgatttgatttgttctcaagagaaaatatataaatagatttataactctttacttctcaaaaggctaacttttgaaccaagcaatcacgagaaacctttgaaaatctcttactttggatccgttcccttattcacttggtttcttctttaacttccaaaactcaacttgtaaccaaaactttctggtgcttttctttcttctcgtgtcctttatttccccggaaaatttaagctcctcttcgttagtttccccggaaagtttcatcattgttatacactaggaaaaaagaagaagatgaaacccatttgtttccttctctgtttctgcttccttcctgtgaaagtctcttccttttgacacaagtctcttctgtttcaaattttctctgttggcttatttcttcttttccctgattctgttttgttttccctagaaaattaatgaaacgacggttagattctcgggagatcctatcgaacccatgtttttgaatcagttcatgcacttcctgaaatctattcatactttcagaaggaaaaacctagtttaacatatctttaaccctaatttctctgctttcaaaccctaccttgtgaaccaagcaaaactctcctttgatcaat

SEQ ID NO: 5066 - DNA, 3000 bp, Unknown
  misc_feature (1)..( 3000): cDNA_ID_1827250_gDNA_ID_1620759_Annot_ID_49968 3000 nt of promoter + ATG
aaattttctctgttggcttatttcttcttttccctgattctgttttgttttccctagaaaattaatgaaacgacggttagattctcgggagatcctatcgaacccatgtttttgaatcagttcatgcacttcctgaaatctattcatactttcagaaggaaaaacctagtttaacatatctttaaccctaatttctctgctttcaaaccctaccttgtgaaccaagcaaaactctcctttgatcaatatgtctggtttatgtttcaatccgtttcgtctacgttggtctctaagatccaaattacctttagagccgtccctcccgaatttaccctgtaacccatcttcctccaaaaccaaccggtatgcagaagcagagacgatggagaagaagagatttgacagtatggaatcttggtcgatgatcctcgagtccgagaacgtggagacatgggaagcttctaaaggcgaaagagaggaatggaccgcagatctttcgcagctatttatcggaaacaaatttgcttccggagcacactctagaatatacagagggatctacaaacaaagagccgttgccgtgaagatggtgaggatcccaacacacaaggaagagacaagggctaagcttgaacaacagtttaagtccgaggttgctctgctttctcgtctctttcaccctaacatcgttcaggtctgtattgtttatcttcttatcaaaacatgtagctttcattatcaagaagtaatatcattgagggagaaaaaaaacagagcaaagatcattggctttagaaaatatgtgtctctacaaggtttaaaattcttgctaatttcatcttttattttgatatatagttcattgcggcgtgcaagaaaccgccggtgtactgcattataacagagtacatgtcacaaggaaacctccgaatgtacctaaacaagaaagagccttactcgctttcgatcgagaccgtactaaggctggctctagacatctcaagaggaatggagtatcttcactcgcaaggtgttatccacagagacctaaagtccaacaatttgcttttgaacgacgagatgagagttaaagttgcagactttgggacatcttgtcttgagacgcaatgcagagaggccaagggtaacatgggaacttatagatggatggctccagagatgatcaaggagaagccttataccagaaaagtcgatgtttatagctttggcatcgttctatgggaactcaccaccgcgttgcttccgttccaaggcatgactcctgtgcaagccgcattcgcagtcgctgaaaaggtcagtctccattcatcttatttaccagattgttgtttttcttgggatacaagttattgatttttttggtttctttgatgagcagaacgaaagaccaccattgccggcgagctgtcaaccagcgctagctcatctaatcaagaggtgttggtcagagaatccgtcgaagcggccagacttctcaaacatagtggcggtgctagagaagtacgacgagtgtgtcaaagaaggactgcctttgacgtcacacgcaagcctaacgaagacaaagaaagctattcttgatcaccttaaaggctgtgtcacatccattagctcaccattttcttcctcctctgttcctgtaaatgcctagtagtagataaaagttatttgaagtacctgtaacctggtctcattccaaagtttacaattcttctttttctttcactagttatttgattgtatatttgcatctacgtgatgttatgatttgatatacacgaacttaggctaactaatttgtatgatatataatgatacttattgatcactggtctctcgtttaaaagggaatgagctcaaaaagaatacgtaagtgtctaattatctaaatgtgtcgaaagtggataacttgaactcacaagaagtgacttcttagttatattgactcattgtttttaactttttttttctcaaggaattaaaatcataggctattacaatgtaaaggcagactttttcagtttataatgatattaacattcataactagaaaaaaaaatgatttacattggaaaacggagaccatctacatttataataatatcattatttcttttccaaatgtaattccattttaactaatcttaaataaaaattaaacaataaatttcggtcgccgacgtttcagttttctaggctcgattttttctgaacattgacgcatggggaaatattccccattatcaattttggacacgtttccaccatgctgtggccattcctttcttatatattgtagattcttctaagtctttgcacccaaaacgtgtcataattcataactacagatgacagaaaaatccattgaagaggctaggttggcttgtattcgatctacagtattgttgcaagattggataacattcaaagcattggctttggaaggaataagctggtaatttaattcctctatccgctattttgtacagaatatatatagatatatacacttctgatctctcatattggcatcattatgttatttaacttccaaacatcaaatctttagatttatctttgtgttttatacttttcttgggcagtataacgaaccagatagccgaagagaaatatggtcgtctcatgacccaacttatcagctcttgcaatacatctgatatcttaaaaggtgcatgctcttaccatatagtaatatatatagattaacttttatataattatctgccagaattagttctatatatcatatttgttaaaattacattcgtttatactacatatattaaagctctacgtaaattattttctgtcggggttttagctatggggaaaaaagtctgagctaattaaccatgtattaagtttttttttcttggtttttagttattttttttatatgaataacactctgatttgaactgaaaaaaacccaacgaacttaagaaggtttggttatggctt

SEQ ID NO: 5067 - DNA, 3000 bp, Unknown
  misc_feature (1)..( 3000): cDNA_ID_2130298_gDNA_ID_1620759_Annot_ID_167124 3000 nt of promoter + ATG
caaaagaattgtaggctgaattcttctaagagtttgtattcattttgacagaattgtttatgtttatgaccgttattctacctacattcaaattaatagtgcccaaaaaacggtctacttacaagaaaagtgaagagtaaattccataaatacacaaacggtctcttatttctgctcatttaatcaaaagctaaatcatttttctagtcttgaaaatcgaatgtaagattaaatagatattgatgatcaaatattcaaacgagcattgatttagactttgggagaatgtatatacggtggatcattgccaactcttgcggatgtcgaaggtgtagttgatctccaagtagcatttgttatcgtcatcgatgaactgaaatatgtacaataagatgacatcaaactcaccaagttcagtgaaaataactgtattatttaataacaatctgatcagtttctgcaaaacctttcatcatgtatactaaatgatataccttagttcttgcggaataggatcctctagcaaacataccagacggtgtcatttcttcaggcattacatgttggtaagactcagcttgaggactaaacgtcccaagcattgcttttgtactatccactgctcagtagggaaaaaaaaaaactgaacatcaaaagagaacattcgacaatatttttaaaatgaaggagaaacacacgaaaatacaaagtaacctttaacaccggttttccacacggtattgttatagcgaaggcccgaaacgatattgtttgtgacacggaagttgaagacaagtgtgtatttagaaccttcctttatcgtaaaccaagggcctttcgggtttggcaacccatcttcgggtattgtcaataccatttcctctctgtctggtgatctaattgtgagatctagtatctttactactggatccggtgtttctgcatttcagtttaattaattttatgttagataacatgattcaatagttttgaattttgtatccgttttttttttccttttaaccgagcctaaggcaagccaaaatgtcatttaactaacatgcatatgattcgttcctttcgtacgtaatacttcatttgaatcagaactagtgagaccggtataatcttttcaccattagagctaaatacatttgattcttaatcaatattctaaaccatacttacgaaccatggaatctaaatcaagtaatgaatttggtttacctccgacatcctccaaatccacgacgccaagaagctgttccttccatctcctcaggctttcatcatcctatcaaattttcgtcgaaaataagaaatatcgaagaaaaaaatttaaattatataaagccatttttaaacaagaaaaaccagatagttattcttgacgttatcatctattattaattttaatttcaccaagttcatactttaatatgccaagaatatagtaaactactaacattttttccccattcataatatggtatagtttacatatttcgtataaataaacaaagtaaaagaccttgtctctctcgagttgttctttgagagcgatcatgggaccgagttcgagcttcttgtcttcatcttcttcatcatcctctgtcggagacaaagagctcccactgttctttctgcttaaccccattttctctgatgtctctcctgacgcttcacctttcttcatctcatcttccaaaaccatcttaattttgtttcctcttaccaaaaaaataagttcttgttgatctaataagaacttacacaatttcaaccgttggcttggagtagaatgcaacgatggctatagagaagacagagagagaaagagttttttggtgtatttttgttgagcaatgtttatatttggagcatgaagaaatggtcatgtggtgatcctacaatcttgtaagtctcactttcaaatcaaaattgtctaaatatatacgtattctacaatgcacatacatttgtaggctcaacacctaaatacatggcaactaatttgacttataggagactaaaaagaggattttaacaaaaactataaaaggagatatacctagtactcggaggaatcaactcgtgtagttgggctattattatcagtttccttagcccaatgtggcctcgtgaggtttgcagtttcccaatagtgtgattgaaaatattcatttctagagatgaccttaaatatctcttggtttactctaattacgttagaaggtttactttttgtttgatggtcggttggttatttttgaaggcttagaaaatttcttgagtgctcatatcaaacacgctggacactaaagctttttaagaaagatctacaaaaatcaaatttcaaagtaatttattttgagaatcaaccatcaacaacaacctcacgagtcacgagctaataagttgatgattgacggctcaaaatctagtggatttgagagaaaacagtaagtactgtaacgggacaatgtgaggtggtaaccttatttcttgaccagggggagagaatatatccaacaattaactaagcgttattcatataagaggataaattgagcttgcgaaaatggtgtagaagacaacctaataaatagaacgggctttgacaaaaacaaagatatggtagcccaaactcaacaaagcccactacagaagcccagtcaacatatgcaaaagaagataaagaccaaaagctctttacctgcaaaacagaagactgtcactaatacggagaagaagacaataacacttgaaaacaaattcaagccgttgcagtcgctgccgttgcagtaattcacaataaatagctattgattaaagataacattgtcaaggattctagattgttctaaagaagtctataaaagaaagatgtaaaactccattgaaagataagcaaaataaaaacatttttgtcaagaaataatcacagttttctttttctcttcatggtatcagagctattataccttaacaggtgattca

SEQ ID NO: 5068 - DNA, 3000 bp, Unknown
  misc_feature (1)..( 3000): cDNA_ID_3075516_gDNA_ID_1620759_Annot_ID_167118 3000 nt of promoter + ATG
gccaccacatggcacatcaaaatgcttacatcatttcatcatctttttcttcaccatgcttctgaaatgttttgtatgcgtaatgtttcagctggcaaatattttgggtcgtttcccttggttgacatgcccacgacaggttagtcattgagcacaaagaataacactaatcttgcagacgatcttttagggagtttatagtaaatctttgaatcatgatgcaggatttgtccactggctggctacagtgtgacgctgatccattgttcaaacctgaaccttttgctttacctgcatggattccagaatgggtaagctttggtatcatgttgcatcgtgtagaagaaaattatctatgttgtatattttggcgtttgtacttggtatatttctagtcatgaataagtgaatgtaggcgaactccctcagagtataacttatttcatagtgtattcttagataggttcagatcctggcctttttattagtttctgaaataggtttggattctagccattttatggaggttactcagttagctcttgttagctaacagatagtagtgttagactgtgcggttagcctttctgtttgaataatattgcatgaggtttctcaactttctagttcatttgtgcagtttccttggaaggaaatgacgatcctccctgttcagtggcatgctttatgcctcggtttgttcgcttcaatcatagcaccttttggaggatttttcgctagcggtttcaaaagagcattcaaaattaaggtcagtaatcaatacctccaaatatgagccaagcttcactttccatacgcatctaacctctaacaaaaccttgcttgacaaaaaccgtaatcgcaggactttggtgatagtattccaggacatggtggaatcacagatagaatggactgccaggtaactctaatgaaactagtatctcttcgtaagattatgattaggtctttagagttttcattcacaagattcgcattgcatattcttcttctctaactctcatctttaagcatatacataaaccagacctaatgttatctattgttacagatggttatggcagtatttgcctacatatatcttcaatcatttattgtctcccaaagcgtttcggttgacaaaatcctagaccaggtaaatgaacttctcgactttgtatcaaaactgaaaaatattcacttttgcactgaatcattgaatcaaacatgtgatggtttcattgtagatattgacgaaccttacctttgaggaacaacaagcgctcttcgtgaagttaggacaaatgctgaaggacaagctctcataggctccattgccaaaagtttcttttattcagattctgattctccaagaacaggttcctctggaatatccttttatctttgtccttactagagacaataaatttaaaattggattaagatttgttgtttcctgccattgtaaatcctctcgaaatttgtcgaaaaaaatagaagtttttttttttaagtcttctcattggatacaaaaggtttgaaggaagttgtatctactactatctacttatttagtagctttggtggtttttagctgtattttgtatattggttaaaatgaaacaacatttggtttgtttgtctcatgattcgatttgttctatgttttcttttttaactggagaaattgaatgcataacgatgacatagtaggcccatattctttttgactcttctgggctttgaagataggcccacatgttttgttggaaataggctgagaatacgtatctagttttccaatgtttgtgaacatccttcggcctttttactaacagtgttttgcatgaactaatcatagattatatttcatatcgcagcagaattacagaaattgaaacagaattacagaattatcgcaccaaagaccagtctgcggccttgtattcacgggtttagtcctaccatgtcttatgaccggcgagtttatctctagctgacggacttaaaacccaaattttgacacctcaaaatgaaacaatgatcaactaaactatgacaaaaatgattagccaaaacataactaaactaaggtgatactacgatactagtatgaaaaagatgattttatcacgtctttcacgtttgtaccaaaaaggtgatgcgattaattttttcaacaacttcaaagtgataaatagagaggcattgaacaaacgaaaacgctattcattaaatacattgaagctagacgttcttaggttataagcctgcttcttatttccgcgtctgaagataataccaaaaatctggaaaaaaaaccaagataaccacatattatcacgtgacaatcacatgttaaccttgagtcacttgttatctggcacgtgttctcacgcgccggcacattagactaaacacgcaaggtctttagtacacgtcagcaactgataaccgataattactatgacgtggacgttggttaaagaaaataagaacaacaaacacaacacacaaatcaaagtaaacttttttttgtcgtttctttttttctttggtcaattttttttttacatgttttgtcgtatatcaataaactcttaagtgataaaatacatagaaataaatctgaataatttaattcagcactaattatttttaagcatgaaattataataaagagtataaccattgaagattttattttgatacaaagtgaatctagacgctatatgtgcgataaaactgagaatttaaccatcaacatttcacaattatattcagtaagttataaaaaacattacatcaacgacgttcaatctttttaattattgtcacataatttcaccactctgtcgtcatcttttaacattttgtcgtttactccgtttagtctctctctattaaatcgtataggtattataaatatacgttataaattcttcgaatcatttgtgtatcgtcaaaaagattttatcaaaaggacaaaagaaagagatg

SEQ ID NO: 5069 - DNA, 3000 bp, Unknown; identical to SEQ ID NO: 5064
  misc_feature (1)..( 3000): cDNA_ID_2781280_gDNA_ID_1620759_Annot_ID_167112 3000 nt of promoter + ATG

SEQ ID NO: 5070 - DNA, 3000 bp, Unknown; identical to SEQ ID NO: 5063
  misc_feature (1)..( 3000): cDNA_ID_2130272_gDNA_ID_1620759_Annot_ID_167105 3000 nt of promoter + ATG

SEQ ID NO: 5071 - DNA, 3000 bp, Unknown; identical to SEQ ID NO: 5062
  misc_feature (1)..( 3000): cDNA_ID_3075538_gDNA_ID_1620759_Annot_ID_167102 3000 nt of promoter + ATG

SEQ ID NO: 5072 - DNA, 3000 bp, Unknown; identical to SEQ ID NO: 5060
  misc_feature (1)..( 3000): cDNA_ID_2130256_gDNA_ID_1620759_Annot_ID_167099 3000 nt of promoter + ATG

SEQ ID NO: 5073 - DNA, 3000 bp, Unknown; identical to SEQ ID NO: 5059
  misc_feature (1)..( 3000): cDNA_ID_1827286_gDNA_ID_1620759_Annot_ID_167098 3000 nt of promoter + ATG

SEQ ID NO: 5074 - DNA, 3000 bp, Unknown; identical to SEQ ID NO: 5068
  misc_feature (1)..( 3000): cDNA_ID_1827242_gDNA_ID_1620759_Annot_ID_49970 3000 nt of promoter + ATG

SEQ ID NO: 5075 - DNA, 3000 bp, Unknown
  misc_feature (1)..( 3000): cDNA_ID_1827383_gDNA_ID_1620761_Annot_ID_49994 3000 nt of promoter + ATG
cagatagatacctgaaatagaagcaagctcgagtgctcgggatttgaaatggaggaactgcatgagctgaatgttgagagcaaaaggaacatatctgggaagagtggaagatccaacaattgcgaaattggcaccgttttggaactttgatccaaccaatgagtctaagtatgggttcaatagacttgtattcaaactctggcctgccaatatgtcagaaaagaatggaatattagattcatatttacttttgaagttagatatagaagttgcatttcaactttaccaaccaccaaaatttaacttgaatctgcatatcgttagtaacaaaatattttcatgcattatagtatataaatgactaaaatatgaaaccttataacatgtgatttggacaaaacagaacgcatacttaacattgataccaaaaaaaaaaaaaaaaaacagaacgcatcttttactatacggcgttgtttgactctttagtcacgcaatctaatgtaacgagtgggttcacgcgccgaatctacatggtggcacccacttttgattgtgatatcttcccatgttggtaagtgggacccacttttctttggattagattttcatcatttcaacgagtgaattgtgtcgttttgtggcatcacgcaacgcgatcaccgtcatcaattattagccgttgattaaggtttacatctattccatcggacggttgtcacgacttcattgcacttacctctaatctccaccgtctaaataattaactagagttaaaaaaagtcaagagaaagttgacttacaaaggaaatcgatgacgaggcgtccgtcggataatcggccggtggatctctggaaaaacgaacgaccgttaggaagaccaatgctgtatccgagtccggcgacgagtccacccgtgtcggagttggaatcgccaaagttaaaaatcaccggcggaacctgacatcctccggccactgccaagttttgtcggagaatgaggataaacggaaggagaacaagaaggaaagagtgggagtgaagagagagagtagccattgtaacttgctagtagagatttgatcaagatagagtgaagatcgaaagctttgtaataaattgtaataatggtaagccttaagtgtgtgggccttatttctcttattttaagctatagtgtgtgagtgtgattctttagtgaatttaaaaacaaagcctaagactttgtatgttggtggttgacagtgacagacacataactcaagcttactgttggctccagctccaatgtagatgctaattgttcatacataaatatgcatatgcatcctaaagtatatatccaaaacgaatgtacaatggaattttccttttgtacgtaacaacgaaaagataagatcgaaaaaatatgcggcgaaaatttacgttggaacttggaagccaaagaggacgcggaaattaatcatctggacgccaacgctagcttgtttgacttatgcaaatggagcattactcataatttattcatcttcaactccaaaagcatttcgtataaaaattaaccactgatatccagcaaaatgttaagcatcacttactttctcaaatttcagccaacaaaaaagtttaacgtgtttggtatacctatgtgctgactacagaccaatgttttatctctatccatatgaaatgacattcttgctcaaggaagtcactgtacacctaaggaaaggccttttaagaataaatgaggccttttaagaccaataattggcccaacaatatatgttgttttgtatatgagattttcttatattatacaagttttcattatgcattttactttagtttactaaagttttatatataaatcattatgtttcagtatagtttttaattaaaaattaattagttttctgaaaattatactagccactctagttatatcctactttttaatgatataaattccagttattttcaaagatattcttaaattacgtatgtccaacccattgtgtaaatgattacctagttcatacattaaaaatatatagtatatatacagtatgcagtcgaactgaaacatgtaataatataatcatgaatttaattatatattaaattttagaaataattagatgcatacattttgcggatacttacctagttatatttatattgcataagatgcatgccattcaatatatattcgataatccatgcccaacttccaacccttttgggatataaatagttaatttaccatttatgatatatattacacacacaaaagtttgacaaaaagcaagagtgatataatgaaaatcaattcaaaatacgtaagataatactaattcgatattgttaatcaagcgataaaccaagcccttggtttaatatcacagaaacgagttttagcaaaggcaaattgattgcttgaagcttgagaaagacattcacaagctccaccaaacccatgaaaaaacggaaaccaaaaaaatggattaaaacgaggaaaataagttagatttttttttgacaaaacgccaatttggattgtattagtaatcagcaaggagaaaatttaaataaattgccaaaaatatcaaatgattcatatcacctattgtttcgtgttcttatgccctaaagagagtccaagtgttacaagcaaacttcattctcgaaccgtttctcacctttctgtttaaaacatctctctctatatatatgtatgtatataaataaatatatgtatgtgcatgtatatataaatgtgtgtatatatacatctttggctataaatataaggtcgaaccaaaataaaatatagatttggggaaactaataaatgatatagagaatccacctctctcccttatttttttttcttggtttcttgacctattattattgattagtaatagtgagagaggcatattttggagatacacataaacacataaattggaagaataaaataaaagagagtgagagatg

SEQ ID NO: 5076 - DNA, 3000 bp, Unknown
  misc_feature (1)..( 3000): cDNA_ID_1827379_gDNA_ID_1620761_Annot_ID_49995 3000 nt of promoter + ATG
ttcaactaattaatcagcgtcactttaccacttttttgtcttttttttctttaccacatttttcttcacattctgaattaatattattcatcaagaaacttatagcttaccatataccattatatgcgtattctatcgtaatctccggaaaataagacgatgtcgtgctaaactttttttcttaattattagtttagtgtttttaatttttagtcttctaaatggaggttcatttgttgccaaaattgtaaaataataagaagtaaattaatgaatttaaatctattcaacgtatagtactgatgaattaagttattaacatatatcaaaaaaaatcttgaccacaaaaaaaaaagactttaagcatgcagtacttctatgtcaataaattaaaaagcttgatttttgaaacttttggaaagtaataaatttaggtgacgcaagaaagttcaaagacgtaaaaacgttctacatgagactcacaaagccatttagtaaatggtttttcgtcgttaatattttaatatacgcactcaccattttgacgtttatgttgatgaatatgatttcatcattttctactttcgcagttaagacaaacttgaaaacacaaaaaaacaatgctaaaagaaaaatttagctaatcaaagtttagcatttcttgctgatctttgtaaaacatagactcaccacctaaaacctaattacttttaaccccaaaaaagtaataaaaacacccatatgctttattcaagaattaaaacaaattcaacatttcatcgatgcaattgttttaatcgtgtaattcatacatgtctaaaatcgttagttgatcaaataagatgtatatgggcagatattagtatggttttttttttaccgttcgagaaaaaatgcgaccggaaaagtggcgatagtggcaaatatctgacgataagcgaccaggatgagtggcttcataccggcctccatagccatcttcgacgtaatgttcatgcctgcgtagccgatttgcaccaacaccatcgccaagaacggcaacatatctgatttagccatctctcactctcttttattttattcttccaatttatgtgtttatgtgtatctccaaaatatgcctctctcactattactaatcaataataataggtcaagaaaccaagaaaaaaaaataagggagagaggtggattctctatatcatttattagtttccccaaatctatattttattttggttcgaccttatatttatagccaaagatgtatatatacacacatttatatatacatgcacatacatatatttatttatatacatacatatatatagagagagatgttttaaacagaaaggtgagaaacggttcgagaatgaagtttgcttgtaacacttggactctctttagggcataagaacacgaaacaataggtgatatgaatcatttgatatttttggcaatttatttaaattttctccttgctgattactaatacaatccaaattggcgttttgtcaaaaaaaaatctaacttattttcctcgttttaatccatttttttggtttccgttttttcatgggtttggtggagcttgtgaatgtctttctcaagcttcaagcaatcaatttgcctttgctaaaactcgtttctgtgatattaaaccaagggcttggtttatcgcttgattaacaatatcgaattagtattatcttacgtattttgaattgattttcattatatcactcttgctttttgtcaaacttttgtgtgtgtaatatatatcataaatggtaaattaactatttatatcccaaaagggttggaagttgggcatggattatcgaatatatattgaatggcatgcatcttatgcaatataaatataactaggtaagtatccgcaaaatgtatgcatctaattatttctaaaatttaatatataattaaattcatgattatattattacatgtttcagttcgactgcatactgtatatatactatatatttttaatgtatgaactaggtaatcatttacacaatgggttggacatacgtaatttaagaatatctttgaaaataactggaatttatatcattaaaaagtaggatataactagagtggctagtataattttcagaaaactaattaatttttaattaaaaactatactgaaacataatgatttatatataaaactttagtaaactaaagtaaaatgcataatgaaaacttgtataatataagaaaatctcatatacaaaacaacatatattgttgggccaattattggtcttaaaaggcctcatttattcttaaaaggcctttccttaggtgtacagtgacttccttgagcaagaatgtcatttcatatggatagagataaaacattggtctgtagtcagcacataggtataccaaacacgttaaacttttttgttggctgaaatttgagaaagtaagtgatgcttaacattttgctggatatcagtggttaatttttatacgaaatgcttttggagttgaagatgaataaattatgagtaatgctccatttgcataagtcaaacaagctagcgttggcgtccagatgattaatttccgcgtcctctttggcttccaagttccaacgtaaattttcgccgcatattttttcgatcttatcttttcgttgttacgtacaaaaggaaaattccattgtacattcgttttggatatatactttaggatgcatatgcatatttatgtatgaacaattagcatctacattggagctggagccaacagtaagcttgagttatgtgtctgtcactgtcaaccaccaacatacaaagtcttaggctttgtttttaaattcactaaagaatcacactcacacactatagcttaaaataagagaaataaggcccacacacttaaggcttaccattattacaatttattacaaagctttcgatcttcactctatcttgatcaaatctctactagcaagttaca

SEQ ID NO: 5077 - DNA, 3000 bp, Unknown
  misc_feature (1)..( 3000): cDNA_ID_1827367_gDNA_ID_1620761_Annot_ID_49998 3000 nt of promoter + ATG
gtctggtaatttggtccacctctccttacgtaaatgtgcattcttgatgctttcaatcttgtttcctgctcatggcacacaaaaaaaggtcagcatcgatttcattcttgagcattcctctcatcttcatcaaaatacagtagcaactgtttgttcgttcactaaagtttgtgagaaagagcaccttttctcttagcgctcgaatgataccgttgaaagtagctgccacatcagtgaaattggcaatgcctcctccaattagaagagctcgtttacgcccgtcaggatcagtagtggcacactgagaaagcccgaacgtttggtctgtgaatctctaaaattttatagatagaaacaattaaggaaaaggccaagttctttgccatgactcacatcaatgacaactcttgcatattgtaacacctcttcctcattaggtgctccactatactctgcgtagtttccaagctctgatgcataacctaaatccccaaccttaacaaaagcagataaggacaacaaaaacaaattaatgtgagaaattctttggagtcatcatttgaaggaattttttttccagtcttttgaaatggtaaggatatgagattttttaaaaatcataatctataatctatatttgagttgattcaaccatgaaaattagcatgccttaagttcaggggttgcaactcactgtatcagcatatatgacgctagcaccacctccagctaccatcgtccaaatgcggcctttaggattcaaaacagtgaacttcaaagaagcacttgtctgcaataagtaacaaacacacacacacacacagacatgaatggtcagtaacattactttcaagtctttcctgtctgagtcacaaaagtggtgtttttagaaaagctggatgcttaaaccttctcatctaaaccatggatgaagttctctgtagaactgaggacccttccaaatggcagaggaaattcaatgtctccccacctgtattaataaaacttatcaatccaatgagtttccaccggaaaaattgattgcgggtctctcaccgggaacttagaaatgttagacatacttgttgaaattcttgaaggcagcagtgtcatctaattctcctctcatatccagagggaatggttctccatcgactagtgtaaaaggattcatctccataaaactgaaatccaaatctttaaagaaacacacaagtagataataagaagatgtccttgagagatctcgaatcagagcaaagtcaagaagtggcctaatctaatatactcataccttgaaatacagcaaaggcacccattatgaagttgccgattttagctcgaacctgaaatagatagaagcatttgttagagcaggcatagcatagttcaaaacaacctaaattattaatctccttaaaaaagaatgcaagtactgagcagcctaagttcagactaacagatctttgaatttgcataggattgaaagtagaacaccatacaaagaccgaaaatgtacgcacatcaaaaccagatttctagggttatctaaagcaaatagttgcagggtgccgctggcttactaggaagttaatcacaggggaacagaaacttacctcaagaggaagagttgctattaatggagcacatacttctagcgtcatcgacttttccgcaggaagaaatatagtcttcacctgttgataccagaaaaccaagttccccaggagaaaacaacagaagtgagtcgaaaaagataatgcaacaaaacaagaaaagaagcacaaaaaaaaaaaaaaaggtagtactttgtcccaattctcttctatttcaatgccaccacattcagagaagcttatagtgcatccaagtctatcagatactatagagaggtagtattcttgatcatgaggcacaaaaggctccacaatgaatgtagtgataggtgctttacatccctccatctcgacctgcgactcataaacaaacatcaataccacaacaaaatttaccagctgatctataactctggctgcgatgagtcacctcagtgccgaggcgggctttgacaaagtctgcaacttcagcaagatccagctttagagctaccaaaccacttttcccgcgtttcccaaatagcatatccggtttcacaactagctttgtggacgatagccatgactcctggttggttaactcagtgaaatccgtagattctgtcacctaaaagtatacaacaataaacgaatcacccatcatcagtagttctagtaatcaactaatcatgccatgtccaaagtcatcagtagaaagagatctttcccaagattctcactttcattagctctatctaagtccaagattactctcaataacattcagacaaaacacgattcattcaagagttccaattgaattgtgctatcgaatttccacaaagcagatcgatgaaaacaaaactagaattcgtgagaatgacctgagcagagcgaatctgcaggtcaatattagcaagacgcttcaaatgctccttgagaagtctcttggagtcatattctctgatcttcttcctcgccatcgaattacaaacagtgatcgtcctcaacactaaaccacggaaagtgtttctccgcctgaagtagctgagaagaaaaggtgacaattttcgagacgataagatcgatgaagttgagaagaagatgatctcaccaactcaacgatgacgccgactcggcgggaccagaagagacgttgacgttgagatatcgaaagtcaacctacccacccccgcctaaaccacaaattcaattctctttcctcgagaaccaaccggtacggttcggtttagaagaacccgacgattatctgaaagttggaaccattaatggaggcgtcaatcagaaaacttaaacttgcactcgtcttccactttgatccacttaaagcagctttaaagctttgaacatgtttagctataatccctgaggaactatcctcatg

SEQ ID NO: 5078 - DNA, 3000 bp, Unknown
  misc_feature (1)..( 3000): cDNA_ID_1827363_gDNA_ID_1620761_Annot_ID_49999 3000 nt of promoter + ATG
tccaggaacatgccggaattgcacatgaatctccactctttcaacattaaggcacaccaatcaattgttatgacagttggatatgtctatgagtaggaataattattcttacctgtgtttaatgaggccagtgccaactcttacaaggaaaggtacaccatcccaacgtgcattatcaatatacaaggctgctgcacaatatgtagggtctacaccgttcaagatcacaccgttcttgtctcgggaactggatttatactggccaaggatgacatcacgcgggtctatcttgcgaattgatcttaaaaccttcacctgcagaagcaggtttgtcaccaagtcacttgacagaacaagagtacacaacttacatatataccataagacgattttgttctttacagtacaggttgaccttttcatttcggatatcttcaccatcgagacttatcggaggttccatggcaagtaatgcgattgtctgaagtatatggctgtgcactatgtcccgtattattccatatccatcagaaaaccttaaaaaaagcagtaggaaattagaaaataacattactgatttgtctaagaatgctgaaacaacacaatttactctcacatgcaaagaaatggtgaaaatagaactattgtgccttacttttctgtttgcgcaattgattctgatataataacctggaaacatcatttatacacaaagtgaacaaaccagaatgtggaagaggaaagttcaggcactatacacaactacaaacaatcagaaggaaacactacctgtatattgcgtatgtatgttctgttccatagtggttcaaaaactagatttgaaaaccttaacactgtcagattttcaatgaggtttcttcctaacatgtgatctatcctgtaacgggcacagaagtgtgaagaaatatgaacttgagagctgtgcatgcagaaagcaactagatttaaaagaaggacctgtagatttgcttctcttcaaacttagagagaagtgactttgttaactgatgagacgaatgtgagttaaaaccaaaaggtttctcaactattattcgagtccagcctcgtggtgcctgagcgttatctccaatggtgcatgccacatccaccagagcttcttgaggtactgagaggtaaaagattctatttgcttctgattctccctgaagaagaaaagctgttaatgtcttattctatcttgcttgtctgttcaaaatgttgtaaactcagaaagaggactacttctgggacaaaatgtaatcattgaaagaaagaaaaaaaggtacttaggaacctcaatctgtttcattctctcggcaagtcgggacatcccatccctgttattataacctccattgatatagtatgttctactctgaaatgcatccatcttgcccccacaattctccctgaacatttagcatcattctttagctagcacggccgtatatcagagataccaaatttaaggtagtaccaagaattatacatactgatgatcaacacggcaagtcagcgttgatgcaatgatggatctgaggtcttcatctgtcagattctttcttgaaaccccaaatatagcaacatcctgtgacaatgaagaccaatcaagaagacaaccgaaaaaaactatccaactgttttgctgcttactttgtaattgttcatgagcacaaaagtcatacctcaggaaggtagccgctataatacaacgcaaacaatgccgggaaaatcttccctcttgctagctcaccagtggctcctacaacagcaatgcaaagtgaggcccttcttcgaacatctgaaagatcatccgagagttgttttgacacaggtggtaagtctccaacattgtgaaacccatcattcaaatccgttcccagaatattctcttctggtcgtaaatcttcagctctagtttcttcagcaaaacctgcatcacattctacctcaggaagtgctaaagaatgatcaagtgaagacatgagatgtaaattgactcatatcttagaactagacctcgttcatcatcgctgaggaaagtgtgctttgagtgtgttgtaagctcgtttacaggctgatgttttctgttgttgccttgtctacgattcaagctcttaagtatccacagtttcaaaccacagaatctccggcagagattcgagcctcctccgttgagaacaaggcttccacttctggagaaactatagtctcttgacgaaacctattcacacaaaatagagaaatttcaacaactagaaatcaagttgatttcgaaggtcaataatatactaaagcttagattcagagggcatgtaacacgaatttgagatctttggtgagattgcagaaaacattagcataatccaagaaaaataataatctttgtttctcaaagtaatgaccttttgataaaacgaaagcatgcatgaaaggtagagcgaatacatgtgcttaccggaaaattagaaaaagaggcggcgagatggcaagagcagacggaggaagacggagccgtcgctgattgagaaaagggaagcaagcaactggagagagacatgaggatagttcctcagggattatagctaaacatgttcaaagctttaaagctgctttaagtggatcaaagtggaagacgagtgcaagtttaagttttctgattgacgcctccattaatggttccaactttcagataatcgtcgggttcttctaaaccgaaccgtaccggttggttctcgaggaaagagaattgaatttgtggtttaggcgggggtgggtaggttgactttcgatatctcaacgtcaacgtctcttctggtcccgccgagtcggcgtcatcgttgagttggtgagatcatcttcttctcaacttcatcgatcttatcgtctcgaaaattgtcaccttttcttctcagctacttcaggcggagaaacactttccgtggtttagtgttgaggacgatcactgtttgtaattcg

SEQ ID NO: 5079 - DNA, 3000 bp, Unknown
  misc_feature (1)..( 3000): cDNA_ID_1827359_gDNA_ID_1620761_Annot_ID_50000 3000 nt of promoter + ATG
cgcttcagctcatcttcaaggtcgattgattccatcttgatttttctaacaggcacatcttcggcagccaagttctcatcgcagctcgggatgagccggaaaactgaagtgttgccagcagaagacttgtctggggtttttagagacaatgaatcaaaggcatcattatcacatactgactcctggtgtatggctgagttttcaagtatcttagagagtgtgctcgaaggaccacaagtatgatttaacttcttcgaaattagccatttttctaatcttgtggacagatgtggcatctcaggaacaacttgttcacccatggtccatgtactagatttattgggagaaggactctcttctagaagctcaaaagcatcaatatcacgaaagtactccttctctttctggaagtctggagctttaacaacttttccctgagagtttgaaaagatactacttttatatcatctcacaagagaaaattagagtctcaagaaagaagaacatatatgttgacaatcttctaggggacattgaaaacccaaaggcaggacattgtttgttcagagaacttggtatcaaaaccacataagtcacagagcaagatagatgcaactaagcctacctttggaatagggggcttttttctcccggctgccttcttctgaggctgattgttgacataagcgcgcactgcaatactctctctccctctgtcaataagcaccagaagcaaactacagttattgcatcaatctactcaaataagtggtggcctttccttgacatttcaacaaacaagtgatgtgcagtaatttcataacttaagaaaagaattggatagacgagaaatggaacatgaatctcttgcagcaacaagccaaaaaccaaggagaacaaattagggttaagctcagaatgtacacctggtggaaagggaacgagcccagctatctctcttgggtccattgaccgaactagtacgagcccctttcaccaaccagccactatttctcagatacacagccaaagaaacttatcagatacaaagccaaataaccacacacacatttcaaattttggggtataagaagcagaaaaattacaaattgacagcttctgaggatttatcaggcttctttcttctctgaaaaacggcttcaatcttaggtatatctccgtcttcttcctcagatttaatgacctcagaccatagatcaactgccacaaacgcacaaacctttacacacagaaatcgaaatttaaaagcaaacccaataacgatttaaacttcggaactcaattgattcacctctctgccccattttaggttagagggaacacaaatcagtactgcaacagtcaccgagagagagagagaaagagaaaagtcgatttgaatcgaagttgtggaccgggaaggcgggagaaatttcgtgggtctaaaatttaaaatccaaaatcaaaattgggctccgaatctaatttcaagcccaagacttgtctgttcttaaaccgggtttctctaaccgaaccaaacgattattaatattggttttatcgcaagcgatgtgcaaggcttttcaatttgttggagtttctctttcaaggagaggaacgatgatgaacaaagattaagcaacaacatgtaaaatgttaattacttcacaagtcaaaagctattctagaagactataacttctctctattttcggatattgtatatataatgaaagaaaaaaagcttaacacaattgttgacgcacacacacatatattttggatccagtttgttgatctgcttgtagattaacgtctgttacgtaaagatgtactactctgcgattgtataagattaacacattattagtgtgctgtattcaagttatcacaacacaacatactaattatgtatgtatatgtatattatgctaattatatatttatacataccgaacaaaaatttagaacgtcgatgtgatcatgtgattgtgcggatttagctaaagccaaaaaaatgttacgtcaacattccaaaacaacaaatgaaaaaggaattaaattaccttaattgtaatttgaaatgtaagaaaaacaattttcaaattttgaggtcagccagcccccactactccatgattcatttgaacatttctctaacataaatattattaatttgataattactagtccttttaatgttttaacgcaatgccatcaacaatactttcttatttaaaggtttcttcatagccgtgtaatataaaagatcggacagttactttgggtagttaaaacatcatactcttcacggaaatgtagaggatgtttttatgttttgtaatgaaatgtaatttgcaatgcaagctctctctgtcacaccacctatattaaagaacaattaatagaaagaaaaaaaaattaagatttcatcacctaccacttgataactccatttcttcttccttctcttaagttttctcttccaccagatttcactgcctaagtttttaagttttctctttttcttttatttgattttgaaatttttcgtgatttcttgttcttttcacaaaaaagttcatcattcgtcaaaaaacaaaacactctgtttcctcagttccatctaaaacatctttgaagtgtttctcttgtcaaccttcattcatagaggtaataatcattaaattgtcgtctacttgttctctgtatttctatcatcattgatttgtcctatgcatcttccaaatagataatgaagatgttaatgattgctgcattttgttatcttcttgctttcttgggtttttagctacttagtggtcctttttctataattcgggaccactatatcaacttggagtctctctcccacagcatttttcatgtagctagttctttcaacatttacttctctattctttctcttttctgattgaatcaactttaatctcttagtttgatgattttgagtctagcagattaggaaggagaacaatg

SEQ ID NO: 5080 - DNA, 3000 bp, Unknown
  misc_feature (1)..( 3000): cDNA_ID_3409194_gDNA_ID_1620761_Annot_ID_50003 3000 nt of promoter + ATG
ggctgacgaaagagaaccgcagccgtggatgatgtcagaatgacccttctgacagagggagtttctttgcatgtattaaggacgttcatagtaccctttaaggctggatcaatcagctcagtctgataattattaaaaaaaaaaaacacacacattttgataagtttctttacggcgtcgaaagcaaaagatttttttaaaaaaatgtttcaattaaggtgttttcaaatttttaggtgtagttattgttcttttttcttctcaattttgcccctatgatatttattatttaaagaaaacttaagaaacatttaataaacataaggttataattgtcactttagaaatctctttaacatgtgtgaaaaaactaaaacttggatgaattcgaaacagagtgagtagttaaaattaacatgcattggattcaccacaacaaatttgaagttgttgaaaaacctgaggatctttgacggtgaagaaaactggagatgcggtgtggaagacagcgtcacatccttcaatagcttgttcgaaagaagattcttccaaaagatctgctttgaacaatttgagtctttcttttgcaccatcaagtgcaagaagatgttctgttttcttcctgtccgctaaagaaaaatataacatatacgtcaaaacacacttcaagccttcaaggtgacttacttactttacctaggttcgatgagtgatttacgtctttaattacttgtactctcctacagtcctacttggtacggaccggaatgatgtctctcaactttccatatttggtaatactattaaaaaggtattatatgaaaacactaaaagtacatttgtttttttatgttttaatatatatatatatatatatatatatatataatataactcaaacatactgtatccatacatattatctccctttccagcaaatttcatctgttcaaaacacaacagcttttttttttttttttttggccaacttcaaaacacaacagctaaacaacaaaattgctaatcaaataaatttcagttttgttgtttaagaaaaaaaaatcaatttggatttcatggtttaatttgatatgtattgtgttgtttaaagactaaagtaaagacataattggtttggttccgtcagaattttaagctagattccgatttggtttagttgtctactcttaatgatccctaataatggcagtctttctatactttgcaaaagaatgatgtatttagataaaagaaaagagtaatatgggaacaaacttagatctcgaacagtggccttgacggtgtagccacggaggagcaaaagcttgacaatccaagacgctatgtaaccggaagctccggtgacgcagaccaactttcctccgccgttcataatctcctttgacctctctttatctgaaaataattgtcttaaatgaagaatcaactcttcaaacgcatgggagtgttcaattagtaaatggtttggtaaattagggcggctcaattagaatatgggccttgtttaaaactggcccttcagttttagaagatatttgtaaacaagaaataaggcctacatgttatatgcataagcaaaaagaaaaaaaaaacatccacatgttaagtttttcaacaaatcacgttgccgtaattcattgttcagaatatttctccttttctgagtttatagatattatttaaaatttataaatatttttaattatacatattgtaaagcctagacatcctccatacaaaattatagttaaaaaatagaaacaaccagaaaatgaagctatatgcctatatatgatgaggatcatataagaagacaatcctccataaggctaacaatagtgtctctgagggtttcttctataggagtagtgaactcaattcccaaactcttcactttctccacacacactttgtatgccatttcatgcatcatctaactctcttcattcctaaaataaaagtccatcaataattaaaaaaagttgttctgtttatagattcaatatgagtatgaggaaaggatgaagggaaaaagataacttacttatcaacacgacacaaatcgggacattactcatgcaaaagctttttaatatctttcgtagttgtattcgatcggatctccaacggtttgatatggctgcaaaagtggtccgactacgtttacactatgcacacgtggctttctatagtttgaactttgaacgaatagattttgccgcgctacagtcaaacctagcaagttagctaactgcgccagatgcgtaggttagctacggattcgttactttaaatgacacaaaattcgaagccctaggctcggtaactccgaagctaaatattttagtcactttccttaaatgatctctcatccgaacctaacggatagggaccccatcctccaggtttcattttcactgtcactttcctcctctggagaaatcacgaactcgaacaaatctgcaaattgattcttcttcctaccaaacccagaaacctaatatttccaaccgttcgatggagactggtgggtcgcgagaaagtttggatttttagggtttgaaaattaaaaaaatcctgtaagagattttgaatttttaaaaaggtcacgtttttttggctgtatacttgtaaagtattcgtctttatcagagtttatttattgatgtgaaagggacgacacaagtttctttgtctcttttgcgtattccctacctcgataatggctgttatttataagaaattgattgttacaaacaagatttagaggatttaattcttgtggacatatttgaatgatttcacattctttaactatactgagattggacatttatgtgtttcattcgtttatgtacagggtcacgtgaagaacatgaatagctgcttccttttacgtttttgaattttggggttttctggagaagttatctgtctagattaaagaacagagcggtgatattccagtttcagaaaatg

SEQ ID NO: 5081 - DNA, 3000 bp, Unknown
  misc_feature (1)..( 3000): cDNA_ID_2994800_gDNA_ID_1620761_Annot_ID_167165 3000 nt of promoter + ATG
atgaaaaacaaaaaacaagtctcattttgattgcatattagaaacgatctaaaacattttcgactaatatattgacatacctggaagtacctgctttcaacagtttgcttatatgataatgtgaatgaagaagacgaaggaaaataagttttagcctttctatccacggcttgagagtttttgcattcttttgaaacgaaagcaataacaactaattatgttctctcttgttttgccctttttctctccttgagaatagtagatttgatcgttatacgaccataagggccaaattctttatttaaacttttttttttggtaattaaaacccaatttcataggaaataaaaactagtacattttaggaccccagctaaatatgatgataattaatgtaaaaatacgacttgggaattcatatgtttttaatgctcgacttttgagctgactttgcaataggcttaccacttccgttaaaggataagtttatgaaattattaaaacataaccaaacaatgacatgacgagttgtatctaagaagagatgcaattaaaaaaacacttaatctaaactaatactacttagttagcctggccatactattattaaagatgttttaatcttatgcaatagtttttttttttgtcaaacaatcttatgtaatagtttaagtttgtcaatttgtcttattaaaacaggaggaactgcacaactctaccaaaaaaaaaaaaagtctcaaagactgtgccaaatcttgcctttatgactccaaagtgcacgtttattcagataaagtattcaaaaaacaaccaaatggaaatgagattagagagcgaggttcagagatgatgggcgactagttgcaaatacaaagtgttgtttaaatgaaaagtgattaattatttatatagatctttattggacccaatgctatcacctcatctcaattatcaagcccatgggttggtctcatcaaagcccaatcaaagcttcccaaacaaaaaggaattaagatgaacaaacaaaaaaaaacacttcggagcaaaagatctggccaccacaacacaacgatcgacgaatacaataggaaaatttgaaatctcgtcgatgaagatgactgctaagatgcgccgtgaattcccgacggcgttccttctcttgtttctggttccggtgatgattccggtcggtgaggctgtatggctagatgtgcctcccaccggaacaaagtgtgtatctgaagaaatccagagcaatgtcgtcgttttggctgattacctcatcatctccgaggatcacgaggtcatgcccactatatccgtcaaggtaagtgtcttcgattttctgttcctatcatcttgcttgttcagtgatttgaatctgcattttgtgttactcgatccataatttcaactgattcatgagtcacgtttaggaattagaaaggcatgtattaattctcgatccaagtttccttatttggaaaattatgatcatgcatgtctttctttgattgtttgttatgatgattttcggatttgtataaatgctcagatgcttgtgtatagcttaatccctgtgaatacccttttttttttgccgtaatatcagtaattagctgtgagattgagataagaaaaattgaaactttatgtggtcttttaatgaagtctgtgtttttgatgtgtatgtttgggaacaatgataattattacgaacaagggagtttcttttattgagcaagtatcatttggtatttagtaatcattgctatgtgctagttccagatagtttgatggattgtttaagatagtgtcctttggattgagagcagtctttgaagtcgacttgaaaaaaggaatacaatgtttctgaatggtaacctctgttcctttttattcttggctctgagttttgagaatcattatggtgcaggtgacatccccatatggcaacaatctgcacaatatggaaaacgtaacgcatggccaatttgcatttacaacccaagaatcagggaactacttggcgtgcttttgggcagatgaaaagagtcacggaaacaaaaatgttagcatcaacattgactggagaactggaatcgctgctaaggattgggcctctattgctaagaaagagaagatcgaggttagctttcaagagattttacagttcagagagtggtattgcttataattttgcttcaaaatatttctaaaatttgttactctatgacaattgcttaagggtgtggagctggagatcaggaaactcgaaggcgcagtcgaagccatccatgaaaatatactctacctaagaaacaggtaaagtcatcttcagctgcatgaactgctcttgccttctttgctgactctcattatcaaaatggtaattgcagagaagcagacatgaggacaatgagtgagaaaacgaactcgcgggtggcttggtacagtataatgtcactaggtgtttgcattgctgtctctggtttccaggtactctacttgaagcagtactttgagaagaagaagcttatatagagattccctgatattcaggtcctttaatgagagtttcttcttaaagaataatattcaattcatctcctttctttcctctttacacgcctcctttttactgacgctgtaaaatttttgttcatggattgtttatgtagcttctctctgataagaagtcattatttctgattctgaaataataatattaacttcttgtcatctccaaagtccaaacgaaagagattctagaaccattgatattgggttgtaactgatactttatgttagtttggggctataacacgtaagtttgacagtacaagggttaagattacaagaaaaaactaatcaaatgggtattacatacaaatcagcccaaatttctgacccaacaggcccgttaagagcaaaccctaatttcaaagagaatatatataaaccctaatcacatttcgcaaccaccaaagcggaggaaaa

SEQ ID NO: 5082 - DNA, 3000 bp, Unknown
  misc_feature (1)..( 3000): cDNA_ID_2137255_gDNA_ID_1620761_Annot_ID_167164 3000 nt of promoter + ATG
tccgtattaaaaagaacatttaaaatctgttatcgtcactgtaataaacaatgtcaatggttacttatgtataagaagtagaagaagatgacggaaaacaatctttgtcactcttttgcaaggactgatcatcttcttcttcagtttgatgaaccaccggaggacatgaagaaagtttttcataataatcagtccctgcgactctgcaaagcatcctcgagatcaagttctaatccaacacgattccttatagacgcagctgcatgacaagacgacgtcattttaaataacctctccaattccttaaacctctcgcagtcaaacttatgactcttcaacaacttcctctgtctcgacaagaagagcctcttcatgaaatcctgatatgtcggatctctcgaagtcatcaagaaataagcataacccacaatgattccagtcgctgtagcgaagaaagtgattggttccatcacatcccatgagaattcccagaaagttaatctaaaaaagagtccaatttgaaccatcgaagtagctaaaccacaccaaagaatcttcctcacttgtctatgagccaaaacatcaatctcttctttcatgattctcaatttgttgaattcttccttgatttgatcttcctctggattctggtccaaaggcatcgctcttctaatcagatccaccacctgaacaaaacaaaaaagtccagatttttagagaaatcgagacaaaacagagtaaagtgagacaaaacagagtaaagttctgtttttgtgttctaattaagaccttgtctgggtgaagatagactttatcacgaaagatcaagacaacgccagcatcgtcaagaacacgagcaaagacatgagcttcatcgggagatctagcgatacccattccttgagaagcttctaaaagtgtagagtaagagacaacatctctatcagccacaccaacaagcttcttcttcatgtcttcaacattcacaagcctcattagcttcttcgcttccgctatagttatctctttcttcttctcctcttcatcctccgacggtgttttgacggtgacgcagcttcttaatccaccgtgaccaagccatgtcctttgcgaagaagctctaatggcattggacattgccgtacgccttatcaaacccattgaccacattatttgacccacgaatctgaagatcttagctctggatttggtgaaagcgaaattgaataaaagttaggttcacagatcaaacgattaaaagatatgagaatcggagaaagagatggaataatataacgcgcttaattatgattcttctgttattaatatcataagattacacgattaggaaaatcgaagaaaagaaaaaagaggacaagcacgaagccatttgctttttatctatcgaaaagtaaaaagattggtactagccaatggccattgttgacttggcatgaagaatggcttttacgaaaatctcaatcaataagttacaactttttgttaactcaaaaatccacattctaaatttgattttcttgataaagttgtatttattctatccaacaaccatcccgacaaaagaaacagtgaaaatgccgttgttgagacctatccttttcatcggagttgaaattgacgcggaatatatacggatttaggttactttattacccacatgacaaacaaacaacacgtaactgagtttaaaaagagaaaaacacgattagtttacgtaaactcttgtttagtttttcttgtcaaattgtttaggtggaattcctaattacaaatccatattctaggctactagcttgcattcactaatattcgttgtgaaaaactcatatgagcatatatagacatcaccatctttttgcactactatgaaaaacaaaaaacaagtctcattttgattgcatattagaaacgatctaaaacattttcgactaatatattgacatacctggaagtacctgctttcaacagtttgcttatatgataatgtgaatgaagaagacgaaggaaaataagttttagcctttctatccacggcttgagagtttttgcattcttttgaaacgaaagcaataacaactaattatgttctctcttgttttgccctttttctctccttgagaatagtagatttgatcgttatacgaccataagggccaaattctttatttaaacttttttttttggtaattaaaacccaatttcataggaaataaaaactagtacattttaggaccccagctaaatatgatgataattaatgtaaaaatacgacttgggaattcatatgtttttaatgctcgacttttgagctgactttgcaataggcttaccacttccgttaaaggataagtttatgaaattattaaaacataaccaaacaatgacatgacgagttgtatctaagaagagatgcaattaaaaaaacacttaatctaaactaatactacttagttagcctggccatactattattaaagatgttttaatcttatgcaatagtttttttttttgtcaaacaatcttatgtaatagtttaagtttgtcaatttgtcttattaaaacaggaggaactgcacaactctaccaaaaaaaaaaaaagtctcaaagactgtgccaaatcttgcctttatgactccaaagtgcacgtttattcagataaagtattcaaaaaacaaccaaatggaaatgagattagagagcgaggttcagagatgatgggcgactagttgcaaatacaaagtgttgtttaaatgaaaagtgattaattatttatatagatctttattggacccaatgctatcacctcatctcaattatcaagcccatgggttggtctcatcaaagcccaatcaaagcttcccaaacaaaaaggaattaagatgaacaaacaaaaaaaaacacttcggagcaaaagatctggccaccacaacacaacgatcgacgaatacaataggaaaatttgaaatctcgtcgatgaag

SEQ ID NO: 5083 - DNA, 3000 bp, Unknown
  misc_feature (1)..( 3000): cDNA_ID_3075548_gDNA_ID_1620761_Annot_ID_167162 3000 nt of promoter + ATG
ctttggtgtggtttagctacttcgatggttcaaattggactcttttttagattaactttctgggaattctcatgggatgtgatggaaccaatcactttcttcgctacagcgactggaatcattgtgggttatgcttatttcttgatgacttcgagagatccgacatatcaggatttcatgaagaggctcttcttgtcgagacagaggaagttgttgaagagtcataagtttgactgcgagaggtttaaggaattggagaggttatttaaaatgacgtcgtcttgtcatgcagctgcgtctataaggaatcgtgttggattagaacttgatctcgaggatgctttgcagagtcgcagggactgattattatgaaaaactttcttcatgtcctccggtggttcatcaaactgaagaagaagatgatcagtccttgcaaaagagtgacaaagattgttttccgtcatcttcttctacttcttatacataagtaaccattgacattgtttattacagtgacgataacagattttaaatgttctttttaatacggaagttttggtgtaaagaaccattttctttattttcgtatatagattattggccttgtttcacacaaatacacacattaaaaaccgagaaaacacatggtaatgaacagttgttttgagagttcaatatcaaaagagtgaaaatgaaatagctctcaaagggcgccttaaagttccaaaccatcacatccctagtgattgaagcgttcttggccggccattaagaagtctcctaagctcatatttgttttgttcttcaaagtgttattcctgaaatgggattagtaccttttgccaattcagatatgtgcaacatgggccatgactatgtctaatggatgatactgtgttgctaggacaacatttgcattatggaggcacatttttggtccaacatagctgtgccacaatatctatgctgaattgcgctgtctagataagacgttgtcgattcgatcttctccggagatttactgcaaaaaacttagggggagatttaactttaagaggatagaagcaaaatacctaagaaaacatggtaacgtggatttgcgataagaacgaatcgaagtttgacaatgatgttaaaacgatatggattttgtttgacgaaaaaaaaataaaaccttaataacgatttttttaccctttttatataaaaaataaaacaaatttaaattcttcgaataaacttaaattagttttacaaattttattactttctttcaacgataaaaaaaaatacaaaaaaggaaagtcccaactttgaagtaaatcccagaaacagattacaaaacgcaaaaagccgagaaaacgtgaagcccataagactatcgttgtcgtcttcctcaaaacccaactttctacttctggttactgccttcattaaacaactaccaccatctttctttctctctctctttctcgtttttttattttattaataatctttttttttttttttacttttgatctcttatcctttggacgattctcttcaatcggatttataagaatcaaccccattttgttcttcttccactttacttcttttttcctcattacacagtcttagtcacatcggtgaaaatatcaattaatattccccagaaagttgccaagatttacaagtagtagtacttgatatatcttaagcccactgttctgttttagcgaggaaaatgttaccggcgaagccgaccctgttcttgatatgtgtgtgaagtttgtcttttatccaaattaagcttttttcttcttttattttattccattataaaatatacaaatcgcccatactccgagacatgggcatacgtattcggggtggtcccattcatcgtcgtcgtctgtgttagggagcacaaataatagagaggcgtagcacaagagagaaggtggtgatcgaggccaagatttagaatttaactataacaaaaagcctctgacgagtgtgactagtcacaagatctgatcatggcttcttgaaacttcttcttcttctttcttctctttaaaggtacctactttccttttcccaaagtttcctccttttttttctttttttaactatatatattgaagcttgcttcgattgatttctgctgggagcttaccagctagctactggtctcactcttcttactgaaattgattctaactttgaagttaatttcttaaagctatcctctgttgtcatcaataccctcttgttttctgcgatataaaggttttgtaggtctctttcgatctggcttgatgtgtgtttgttttactcaactttttatagtgtgtgatcatttatgagaagaagcatccaattaattaatctcatccttttatcgcttttaactcctacgattgctttccctgtggggactttattgttccttttgaaaggtatagctagctataaagactcttaagagtttattattgagtctactttatgtatgtagctgtgtttgaatcttgagaggctgatattagctcagatcctcgttttgttagtatttgtgtagtggatttaccctgttaactatcaactattatttgtgcgacttgttcatagtcaagatgttgttgattttggattgtaggatgacttagaaaggaagtgttcatggaatctgactggttcagttactttgaaaatgataaatcattgaaccttggaatatgacacgatgattcctgcatctgttgcgtcctgtttctgggtttagctatgtattctcgatggagttagtcaagttcataactctttttactgtgtgtttgaaattctgaattggttcttagtgtttcaagtttatgcttatgcattcgcttgtatgactggtgatgaatgtttttgtgttcatatgattatggcatgaatgttttattccctcttttatcagagttttgcacttattttttgttgtcttgtctctgtgtcaggaaaaaaatg

SEQ ID NO: 5084 - DNA, 3000 bp, Unknown
  misc_feature (1)..( 3000): cDNA_ID_1839846_gDNA_ID_1620761_Annot_ID_167161 3000 nt of promoter + ATG
gatacatcaacgcttcatttacaaaatagacaccaaccagtctcaacaatcttttagtttccatcatttattggttaaaaacaaaaaaatgtactcacgcgtcgaggaagaagccagcatcgctcatgcattttactgtggtggtaggaggaaacaagttattgaaatcatcgcatcgtaaaatggcagaaagacccccagaagaacatccgctgagcaaagccttaacgtaataatattattagttattacattaacaacttaaatttaacctgggaaccaagattcaaatgcaaagcaatattatatgaaatatatatatgtgtacctgttttgcctgacgcattcccttttccatcaaatcttccatgacagctaaaaatatacgctttcctctatactgaagttgtgccgcctaattgcataaacaacatatacatatgaatcccaagttaattactagtgaaatatataatgatcatcttcatggttttaattaactaaccttgttttcgctgtcaccatcaaaggatgcaccatcacaataccggacttttactttgttccaattgtaaaagtctgccaataatgatttgaaatcaaagaagaggagaatattccttaaccatttcaccaacacatcacatttctgttctcaataagggatcttgagaaaaacctggattttcagcggctttattgcttagtaatcctaaaaatgccaactctttctccattaaggtagatgatccataaccactccctttacggctctgacagttttgtatgctgtcacaccatgcacctccctttcaacaaaattaattacccttatttatatggttatggcgataattaagtatctctatagtttatatacaaagagcttgctatatcttaagtaagaacctgcaactgaatgatccagttgtttgctcctgaaccatacccgcgacacaaatgatatccaggcactgacccatccagacacactgccacaaaaatttaattatttctccatgcgtcatgaaaatgacaatcaaaaactttgtaataatgatgaaaaataatgacacggtacaaacgaaatttcgtaaaaaaaacttgaaaactaacgtttgaaacattggagatctaacatgcatatcagaaatctaaatctcaatcgaaatgaatggtaagaaaattgttacccgctcctttagcagcagcggcttggacgagcgtgagtcctaccatcaggacatttgcatttgttccattggactcgttgaaggttttcatttccccatgtgcaagaatgctgaagagaatgagtcctgcgagactactccaaccccaatacaaaagcgttttcatttctcctcttaatgaaatttgaatgaaatgattatggagacgtactagagttgtcagtatatacgcagccaagaaaataaagcatccgtcttggtcttttgtagtatgcatatgtttttcttatatagaaactcaattataattgaagaccagagagtgagagagagagaattgcattaaagaccagtcatagtcataagagagatttattaagatattttctttccttaattagaaaaagtacatacatcatggacatgattcatgatcttgccatttgtaaatcacaagatcgtactgaagaatgtgactgatagaccacaactttggggcctaaacctccattacgctccattgatcattaggttaagaaattaagattttcacgaaactgccaccttgtatctttcgttgtatattttcatgtatatatttaaggatgatttgacactcatgaagttgtcacttcatttcatcaataggttaggtttaaaactagttttagaacaagtcagttttgtgattgggcttttatttaagtggtgcaagattatattaatagggtttattaatttcaaattcacactattactcatataatagtcagaagtatagagttcattatataattccaattttcttttcaccaaaatctgcagaacagaaagtctcaggaatcttcaaacattttgaaaaaatggtcctgaaaagtggaaagaaatttcagattttgcttgcaagagttcaaaaagctactagacaaagatttcatacaaaaaagtgtggaaaggtcttcaataattgtgattaagctttcaattaccgtttaaagacttgtaaataaaatttaatcaatcttttcactaataaatttaaccaattctattttctctacatcatgcactagtaaaaaaaaatttgcctcgaaacaaaaaaaaacacacgatgccgtataggaaggaagcaataaagaattcaaaacgatttgttgttccgtcttcaatgcattacgcgtcgtattagatgaggcttttaacactaaaaagcccaaaccaacggtatcgggtattatcacctaaacccaacccattaaagacaacgcgtagcttcacgcgcttcacgattcgcgtgagaagaactaaccctgaaacgcggacgttgcagattaacggtgaggcatgaacgagcgtgttaatatataatgattcttctctcacgatgatcaaaatacagaagccaacaagtaaaattagtttatgcagataagacaacatttattacctgatacatactttattaggtgataataattgataattgttttttataagccactaataattaaataaaaataatatcagtaccgtgtaaaagcaaaactagtgtaaacataaattttcaattggcaaagctctgatccatccgttttagtaattcgttgacctttgacatttcacttagacagatgtgtgcaagaaagaaaaacagcatgttgcttgctttttccctcaacgagaaaagtcaccctctcttcaattcttcaattctcctccctttataaaccataattcattaattctcttctctctcaacaactacttgtttagagagagtcccaccaccaccactaccacaatccca

SEQ ID NO: 5085 - DNA, 3000 bp, Unknown
  misc_feature (1)..( 3000): cDNA_ID_1827342_gDNA_ID_1620761_Annot_ID_167157 3000 nt of promoter + ATG
tataaattttaaaataatatgtatgaaattgaatataaatattcaaattatgacacagtactcagtaattttttttcttaaatctacttttgacccgttatagtatttttttcatgtactgaacaatttatattcgtttttaaaaattcaaattgtggcatatgcgaaaaaactctaattatttttttataacgatgatattattttttcgcaaaaatagaatcatataaagatgagaggtgaattataataattaataaaaaattaatatgataatattgatatcaaatctaatttgttgattttaattggttacttttttggaaattaataatgtatttcgtttttgagttaaatttaattaattaaattagtatttgactttttaatttttaaagaaatgaattaatttactctttaaaattttatttctaatggcatacgtatgtaattacttacaaaaaataaggttacattttaaaaattaatatgataatttagatatcaaatctaatttgttgattttaattggttacttttctggaaattaataatgtatttcgtttttgagttaaatttaattaattaaattagtatttgactctttaatttttaaagaaatgaattaatttactctttaaaattttatttctaatggcatacctatataattacttacaaaaaagaagattatatttcaaatgtacttcccaaataatatagtaggatcacttccattccgagttttcttctttctttgatatatatatctacttatttatttactcggtttgattttataataaatttgtttataattattttctgaacaagagatggccataaaatacagtgatgaaatcaataatggtccatgcaaatgtactcaaattatccacttggaaagtttatagtatacaatgggttgttacgtattttagaatctaatttgcatggcgatttaattgacatttcatcatcaaccgagctataacgagagataaaccagaagatgcaacgttcgtgaacaaactcgactgatattctagatggttttatttattttttacttatagaaaggaacaaattagatttaaagataatatgctctaatctaagagtttggaaccactataccacatactatatcccatgattaaaaaaaatctcaattattatagcgcaaatgattggttttcatcagttaatagaacttgctgagtgagtccccaaatttgaggatgattagtaatttagtatcgtaaagactaaaaaagacttaagaaaaatagtaatgattagagaagtcaaacctttaataattaagatagataaagagagacaaggttgctcaaccccacttggagtgtgatgcttttttggcagtgttcctttatgataacacatctcttcacacacaactttagtgtatcacaggcccatgtcactttaagataagataacatattctagtatatgattattttcatatttgtaagtgtattaaattattcatagacacaccatgaattaattgtaataatgcgaaggacctgtatcatgtaacagagacagacgaagtgtgcagaggtcggtgagaagcaatttggtcaccatgctccaactctcttctctaggtcccttttgctttaattttctcgtttaataacaatatcttatgaaagcagttaccatatcaattgaaggattgtataataccgtaatttatttatatatagtacatctaattaaacattaattatttctactaatagcctaaaaccactactaatacaacaactagtacttgtttacgataattattaaacttgtctcgatacctacaacatgcccaaaaaagtaatcaatactttgtttaatcacaaagatctcagtgagatggttctatagatagtatttctgatttgttagtatattagagaattgaccatctattaaaataagagaatgaacactatttgataaaacaatacatacgcaattatcattgtctttaatttttatcaaagtaatcatacgatcgactatttgtatgcaaaaattcatcattttatttgcaaaaaaaaacaaacaaacatggtagaattgtatttggtgtgtgttttaacaaattgttgcaatgtttagtgcaacatatataatccactatatataatcattgacataattaatatttgattatatgaagcaatttctctttaattatgtgtttataaatatagggagaaaagaaaaatagagagaaaggtaaagagtagagctaatgattcgggcgacgctaaaaggttgaatgttcgagagaaacggagtctcagagactgtgaaaacaaaaaatcaaaatcctcagttacagacgatttggtcccctctcttctctctctgcgtccgtcttgtgcgtcgatttgtctccatctccttctctctccgcctactttctcaggactactccaattcgccgactttttctcctctgttctctgcatttggattgatgccactttaatactttgaggttctcactctctctttctctcttcgctgacttcgattgcttcagtaccctttttctcaggtcagctacgatgatagctttattcagacaagaagatcaaagttttgatctttttgttttggttttcttaagagatggttaattaggtcttgagtgcgctgttttgaatcgttcttcagtgtgattaaacaattggttttgatttgactaatcatgttgccattaaactaagtgaaaatctctgctttttttatattgcatattgatgattgagacattgatttcttttctatttctttatttcccagtttctaatttgggaactgaaaagttttctaatttaagcattacaaagtgtacaatttttgtttctggcaagtttttcttggcctaattcgtctattttatgaattcacctttttaggatcaagacttcgtaaaagattgtttctgtaaaacgcaacacc

SEQ ID NO: 5086 - DNA, 3000 bp, Unknown
  misc_feature (1)..( 3000): cDNA_ID_1827352_gDNA_ID_1620761_Annot_ID_167152 3000 nt of promoter + ATG
caatatattgaaatatttatacatttaaaataaaatctataaaactgaaagaaaataattaatattctgaacttcattttttgcattttgtgtataaattaaaaaaaaaaaaaattactgctacgtgatttgttgaaaaaattaacacgtggggtgttttatttttgattacatgaacttgtgaaccttgtttctgcttacaaaaactgaagagcccatttcaaacaaggcccatattctgattgagcggccctattttaccaaaccacctactaatgaacactctcaagtcacctcattcgagttggaagttccctttaaaacaattattttcagacacagagagactcagacaggagatatgaactgcggaggaaaggtggtctgcgttaccggagcttccggctacatagcgtcttggattgtcaagcttttgctcctccgtggctacaccgtcaatgccactgttcgagatccaagtttgttcccaactctctctctcttctttattttaaaaaacaaacgactgcaattattagggacgattatgagtagcacaaatagaatcaaaatcggaatctggctgaaaaatctgacggaatcaaaccaattatgtctttacttaaattacatacataacatccaaatcgttcttttttttttttttgagacaaccaaattgaaatttgggactttgattagctgttgtgttttgaatgatgacttattaattagacaatatttttccgacctttataattaaattaccaaatacggaaagttcagagaactcattcaggttcgtaccaagttttgacttttgagggtacaagtaaaatcattcttttgaactttgaactttgaagtgcatgttgacgttatactcttcttcagaggacaagaagaaaacagaacatcttcttgcactagacggtgcaaaagaaagactcaaattgttcaaagcagatcttttggaagaatcttcttttgatcaagctatcgatggttgtgatgctgtcttccacactgcttctccagttctattcactgtcacagatcctcaggtttgtcagggaattattttaactattaatttgcaaagtcatatgagttaaaatcaaaatttgtgtttcttttcctattagactgagctgattgatccagccttaaagggtactattaacgtccttaatacatgcaaacaagtttcttctgtcaagagggtcattctgacatcttccacggctgcggttctctctcgtcagcctcctattgggccaaacgacctggtggacgagactttcttctccgatccaagtctatgcagggagacaaaggtcctttgattttgttgtggacttatcagtttcaagagttcggattctttcttacacttttcttattttcttcttcagaattggtattcactctccaagattttggccgagaatgcagcgtggcaatttgccaaagacaatggaatcgacatggttgtgttgaatcctggatttatttgcggaccactcttgcaaccaactcttaacatgtcggtagagctaattgtggatttcataaatggtaagaaccctttcaataaaagatactacaggttctcggacgtaagagatgtcgccttggttcatatcaaagcgttggagactccttcagccaatggcagatacatcatcgatggtccaaatatgagtgtaaacgacattatagacattcttcggaagctgttcccagatttgtctattgctgatacgtgagatctctttccctagctctacctttgcttatcatcttatgaagtttataaatttaatgaaagattttgaaaaacttacttgttgatgattttgttaggaatgaagaaagtgagatgaatgagatgatatgccaagtgtgtgtggagaaagtgaaaaatttgggagtagagttcactcctatgaaatcaagccttagagacactattgttagcctcaaggagaaatgtcttttatgattctgttcgtatatttgtaactattatgtgtatttttattttgttagtattactaattcaagtggtttaagttgttgagactctttaaaatctaagcattttataaacaataatatataattattgtttaggctaaatttgtcactaattaaggtttggatacatagtgtctaaactaagctaataatatcacttaacgtttacttgtaacgctaggtgatgatgtcgtcaagtcaattggtacaaggaataaacgagtggtcatatgacattatgaccatatgaattcaaactccagtaatccaatggtaattggattcaatgatcaagacttgaaccacgtaatccacccttatccttagaagctcataaatatcactaaagggacaggcaacacttaaccagtagttgtccaataatttagttttccaaaatgaaaaattattgttgtcatctattttaggtgttttagttcaatgtggattcctcgtcctaacaaatacttgacgaatatatctagactataaaattggttatgagttctacttttttttgtttgtgaaattatcaaaatttgttatatttatttatttattctcattaatttgagtactaatttttaaattatttatactaaaaacaattactaagatacaaaaatggataagagcatggtgtatagatatttaatgggatagaatatttcccataattgtatgtgtgtgagaggttttgttttcgtaaggaaagaaacaaaaaccatttgaccaaagaaaagcaaaagaaggcaaggaatcaaacaacaaatgttgcaaggcagaaataatggacgttatgttaatgtagtgtcgtcacacgtgacttaaaagagacgagtctgcgtgtcaaactaaaaatgtatgcaactataaaaatgggatttgattatctttttagtaccgaagcctaccaaccacatgcacactaattctactcgccaaataaagtgaaaagag

SEQ ID NO: 5087 - DNA, 3000 bp, Unknown
  misc_feature (1)..( 3000): cDNA_ID_1839377_gDNA_ID_1620761_Annot_ID_167148 3000 nt of promoter + ATG
gccacatcgtttcgctctcccatctaccatcccgcagaaaagcagctcgattggtattggattcaagattattatcccaagtaaaagaaagtgagtgtaccttttgaagttttcgagtttggatgcgtgtttctcgtaggcaaaattctaacttcagcaccttcttcttcagctcctgatcaattctcctttgattctccacctgatccagaagaacaaaggctttactacataaaaccaaaaataaatcacagaactaagagatgctaaagcatgacgtgttgttacctgatcttctaattccttggtcttaaacctccagtgagccgatataatcttcagttcatctctcagtcttgcaatttcatcatctttagccgtcaaaagtttgttgattctttcagaattctttggagtatcttcatttagcatgttccgcacctcagagttctccttggtcttgaccactgatacagcccgcataatgtcaccttcaactttcaaaagctcatctcttagctgcttctgtgaagattctctaactcgcagctcctttcttagattctctagctgctcaccaagtctagttacttggtcctcatgctctttcaaagaaccggtcctctcatgcaattgtttcgaaagcactctacaatgagaatgtgctgattcagctgacaaagcacttgcctctgcagttgcatgtgttgctgctagctgtgatttgatatcagccaattccttcacaaactgcacaataggagaacagaaaagttgataagttacgtcggtaaaggacgtgagatctcctgagttttggcagatttaagaccaaagtcaggttcaaaagacaatggaggaccagcaaagtttgaagaggcagacataagaattaagaaggctgatgagaaacaatcaatgaagttgatgctctaacagatctatgtgttcaagcagaatcaagcaaaactagagaaactggacaatcaagaaatgtgaaagaaaacaatcctaaccttctcagtagcaacatccgaagcacgaatctgctcaactttctcgtttagttccttggcaagttcatgcatttcatcttccattctcttaactcttgtttctgcctcctgctcatattgaaaacagctcaacaaaagtctcaacatccaaaccaaaagactaaatcacaaaaaaaagtaatagctgataaattcagaactttgctaacctgcctggacatagcttcttttgaacacgaccgctcctgttccgcaagacgagtcctcgcttctttcaactcagtggccaaagacaccacatttctcctgaaactctgcttcttctcactcaaatccttcaacaaaggatcatcctctcttagactaacagaagttggcattttctgaaactggaatatcaccgctctgttctttaatctagacagataacttctccagaaaaccccaaaattcaaaaacgtaaaaggaagcagctattcatgttcttcacgtgaccctgtacataaacgaatgaaacacataaatgtccaatctcagtatagttaaagaatgtgaaatcattcaaatatgtccacaagaattaaatcctctaaatcttgtttgtaacaatcaatttcttataaataacagccattatcgaggtagggaatacgcaaaagagacaaagaaacttgtgtcgtccctttcacatcaataaataaactctgataaagacgaatactttacaagtatacagccaaaaaaacgtgacctttttaaaaattcaaaatctcttacaggatttttttaattttcaaaccctaaaaatccaaactttctcgcgacccaccagtctccatcgaacggttggaaatattaggtttctgggtttggtaggaagaagaatcaatttgcagatttgttcgagttcgtgatttctccagaggaggaaagtgacagtgaaaatgaaacctggaggatggggtccctatccgttaggttcggatgagagatcatttaaggaaagtgactaaaatatttagcttcggagttaccgagcctagggcttcgaattttgtgtcatttaaagtaacgaatccgtagctaacctacgcatctggcgcagttagctaacttgctaggtttgactgtagcgcggcaaaatctattcgttcaaagttcaaactatagaaagccacgtgtgcatagtgtaaacgtagtcggaccacttttgcagccatatcaaaccgttggagatccgatcgaatacaactacgaaagatattaaaaagcttttgcatgagtaatgtcccgatttgtgtcgtgttgataagtaagttatctttttcccttcatcctttcctcatactcatattgaatctataaacagaacaactttttttaattattgatggacttttattttaggaatgaagagagttagatgatgcatgaaatggcatacaaagtgtgtgtggagaaagtgaagagtttgggaattgagttcactactcctatagaagaaaccctcagagacactattgttagccttatggaggattgtcttcttatatgatcctcatcatatataggcatatagcttcattttctggttgtttctattttttaactataattttgtatggaggatgtctaggctttacaatatgtataattaaaaatatttataaattttaaataatatctataaactcagaaaaggagaaatattctgaacaatgaattacggcaacgtgatttgttgaaaaacttaacatgtggatgttttttttttctttttgcttatgcatataacatgtaggccttatttcttgtttacaaatatcttctaaaactgaagggccagttttaaacaaggcccatattctaattgagccgccctaatttaccaaaccatttactaattgaacactcccatgcgtttgaagagttgattcttcatttaagacaattattttcagataaagagaggtcaaaggagatt

SEQ ID NO: 5088 - DNA, 3000 bp, Unknown
  misc_feature (1)..( 3000): cDNA_ID_2137225_gDNA_ID_1620761_Annot_ID_167145 3000 nt of promoter + ATG
ggaagcaaatattggagagagccagcaagctcaagttaggttaaattctaattagagaaaaacacagtgtttatagtttagataagcttatcatctctaaaaacttgcattgcttagggaaaggcatgcattttctcacaccagatgctatctgaatgaattatggtcaatgttatggaatacttacagcttatcaaagaaaatatgataaatgacaacttagtgtatgttcatttttgcagagagctgacgaactacttgaggaagtgatactctcatggactcttaatcaactaagagaatgtgagactacagctcagaatttgtgcccgacgtacataaaaactcaagagtacgtcttctcaggaacgagaatatgctggaaatggctattggttctgtgttataaatcttcttccaaacttatgtgcatcatcgttcacaaaccttttctcataatgttgttgcagtataaaattatgtcaaggtccctatgaccctatactgataaaagcatgggaagaatgggatgcaaaacatgggtctgagaatgatcacccagattttccggagaaacaagtcagattcttttcactccattagattttaaggtctgtttatataggatgctaaatgatttgtagaagcaatattcattttctgtgtggtgtttgcttccagtgttatgtcatgtttgttctggaacatggtggcaaagaccttgaaagctttgttcttttgaactttgatgaagcaaggagcttactggttcaggtaagttgtagagtatagattctatttgctgttacagaaattatgtaaaaatgatattttttcttccggttaatggcatgtgtttcacatctaaggccaccgctggcctggctgttgctgaagctgcttttgagttcgagcacagggacctgcactggtaattttagtgtttgatttggtaagtttactacttattagttttctctcgcttgaacttcttattttcatttctcttttcaggggaaacattcttctcagtcgtaataactcggatactctgccttttattcttgagggaaaacaagtttgcatcaaaactttcggagtacagatatccataatcgactttactctttcaagaatcaatacaggtgggtttctgattctcaatactgcgacataatgtaaaccataaggtccaatctaacacttaaacagttaaactaccaataatcatggtgctaatgtgctcaggtgaaaagatactctttctggaccttacttctgatccataccttttcaaaggaccaaaaggagataaacaagtaaggaaaattaattaagttccttattatcccaagagttaagagaaatgtacatttattttaagttttaataacgttattatgcagtcggaaacttaccgaaaaatgaaggcggttactgaagattactgggaaggaaggtaagcgtaacttttccaagccttccttttagttttcatgccgctaatttggaaatttctgcagactagactagaatattaagccacaacattatctttctttctagaaagcatgagactgtgatatgagcattagtacgcaaccaaactgaagtgtgcctaaatgatttgatgattaatttaattgccatgttttgttttgttctttctaacaacagctttgctcgaacaaatgttctctggctaatttatctcgtggatatcttacttaccaagaagtcatttgtaagtttgcaagacacagataattattagttgcatcaactaagaacagcttattgatactcctttcgttcgtgtgtatatgttttaggaacggtcttcaaaacacgaaagagaactacgatcactaaagaagcgaatggagaagtatgaatcagctaaagaggctgtgtcagatcctttcttctcagatatgttgatggaccaaatatcatgaagaatataataaaccccgtaagtgattaaccagaagctctctctcttgtatatttgtttgcctagccacttaaatcaacagtactagctcttgcttcgtaatattatctaaggctccgttatctatataccaatcttgattttcatctcttcaaatgaatccaagaactgatatgttagtcttttcttgtatgtgacaatagtttaatggtagcttttatctatagaaatacttttgaaaccatgaattcttttaagaagaaagtatcaagatctaccaattccacatgggttgtccctacttgcatgaatagatcttcttatctcaagaacaaaagttgtcacatttttattcttgtaatgagggaagaacaatattcaaacgcgtagatgataaaaatgagagatttgctttaaaattaggccaataaactaatccatttaaacagctaacaaaagctttatgttgtctgcttttttgttttttcaaaatctttccgctttgttgatttctttaaatctttgtgggttttgctgagctaagcaaaagatcatccattgtattaattaatctcatgatcttaatctgcagcaccagtgtctcttctttccttttctcctttttggataagagaaataaaaataccaatttgcagcttctttcttgaaaactttggagagctttatgcatatgcttatgtctgaaacggatctgacaaaaatgggtttttctctttcttgttttttttctggctagcataaggtaaaagcttatatctttgcacacaaaaatataaagaacagatgagattagtcagaggccaaatccaaaagacttcatagcaaagtaaacatcttttgcctactttcttctttttttctcacttagtcacttgcatgtagagtacagtcagcatcttctctctttttctcccccaattctctcaagagaatctctaagcttttgttcttcttacaaatcatgtacttataataaacccaagaaagaagaagaagaaaaacaaaaccaatcccaagctgtg

SEQ ID NO: 5089 - DNA, 3000 bp, Unknown; identical to SEQ ID NO: 5079
  misc_feature (1)..( 3000): cDNA_ID_1827359_gDNA_ID_1620761_Annot_ID_167142 3000 nt of promoter + ATG

SEQ ID NO: 5090 - DNA, 3000 bp, Unknown; identical to SEQ ID NO: 5078
  misc_feature (1)..( 3000): cDNA_ID_1827363_gDNA_ID_1620761_Annot_ID_167141 3000 nt of promoter + ATG

SEQ ID NO: 5091 - DNA, 3000 bp, Unknown; identical to SEQ ID NO: 5077
  misc_feature (1)..( 3000): cDNA_ID_2137210_gDNA_ID_1620761_Annot_ID_167140 3000 nt of promoter + ATG

SEQ ID NO: 5092 - DNA, 3000 bp, Unknown; identical to SEQ ID NO: 5076
  misc_feature (1)..( 3000): cDNA_ID_1827379_gDNA_ID_1620761_Annot_ID_167137 3000 nt of promoter + ATG

SEQ ID NO: 5093 - DNA, 3000 bp, Unknown; identical to SEQ ID NO: 5087
  misc_feature (1)..( 3000): cDNA_ID_1839377_gDNA_ID_1620761_Annot_ID_50004 3000 nt of promoter + ATG

SEQ ID NO: 5094 - DNA, 3000 bp, Unknown; identical to SEQ ID NO: 5086
  misc_feature (1)..( 3000): cDNA_ID_1827352_gDNA_ID_1620761_Annot_ID_50006 3000 nt of promoter + ATG

SEQ ID NO: 5095 - DNA, 3000 bp, Unknown; identical to SEQ ID NO: 5085
  misc_feature (1)..( 3000): cDNA_ID_1827342_gDNA_ID_1620761_Annot_ID_50009 3000 nt of promoter + ATG

SEQ ID NO: 5096 - DNA, 3000 bp, Unknown
  misc_feature (1)..( 3000): cDNA_ID_1827338_gDNA_ID_1620761_Annot_ID_50011 3000 nt of promoter + ATG
ttaaggtattagaggtaatgcatgattcgtgactatgttgcaagaagtcttggtttcaaacaattagctttggctcaactccatgaagaagcaaacatagttcttcgaacttaacagagatctattagctggccatatgaagtacacttagttttctgttagaagaagcacatggtgtgtgaagtaaaaaataagttatcatgttaattaagtaatcagttttattagacccatacgttaagagtctctcaagttgattattttatctgaaaagtcagataaattagcttacctgttttgaaagcttttagattagatcaacctcgacttcttacctgtctttagtcaactttgaacaaaaaataatatggattatacaagaagacgaatacatgagactatggagctcaaatgcacactgaagatcatcagttattgttccttttttattacagaagacaaatcaaagaagataaaaagatcttccctttagaaaaaaacagaactgtagtaatgaatataaaggaagggtgatgatcatttcttgggttggaacttggatttgatgtgtttaacagttcctggagaagtctgaaaggcttgagccaagatgttgtcaggaacaggaggagtagaaccaaacaaagtagcaccaagagattgagttccaggaagctgactattgaaagctgcaataacagaagcagggacatcaccattgttcttctggaaatggacaagtcctttggggaaagcaaagacatctcctttcttgagagattgagagattagcttattggcagtagtgagaaacccaacgtcaagtgttccttcgaggacgaaaacgacctcagtggcacgtgggtgggtgtgaggtgggtttaagcctcctggtgcgtagtcgatacgagagagggagacaccaagtgtgttgagtcctgggattgtcataacgttagctcctgtgactaaggcaccgaatgtgttgttggtaagacctggtttagctaatccttgtgagaagaaatcggctgatgtgactgtagctgcgtctttgcaagggaagccattgattttgattcctgcaaaaaagaaaaacaagaaagagattagaaattgaatctttttctaggaaaagagatgaaagtaaaggtttttgcaagtaccagagggaagatcagcgacgcagagatcttgaagcatgtcaggatctgcggaggaggagatgaagaaggagacggtggtgaggaggaggaggagagtaagagttggtgaagccattgggattgtggtagtggtggtggtgggactctctctaaacaagtagttgttgagagagaagagaattaatgaattatggtttataaagggaggagaattgaagaattgaagagagggtgacttttctcgttgagggaaaaagcaagcaacatgctgtttttctttcttgcacacatctgtctaagtgaaatgtcaaaggtcaacgaattactaaaacggatggatcagagctttgccaattgaaaatttatgtttacactagttttgcttttacacggtactgatattatttttatttaattattagtggcttataaaaaacaattatcaattattatcacctaataaagtatgtatcaggtaataaatgttgtcttatctgcataaactaattttacttgttggcttctgtattttgatcatcgtgagagaagaatcattatatattaacacgctcgttcatgcctcaccgttaatctgcaacgtccgcgtttcagggttagttcttctcacgcgaatcgtgaagcgcgtgaagctacgcgttgtctttaatgggttgggtttaggtgataatacccgataccgttggtttgggctttttagtgttaaaagcctcatctaatacgacgcgtaatgcattgaagacggaacaacaaatcgttttgaattctttattgcttccttcctatacggcatcgtgtgtttttttttgtttcgaggcaaatttttttttactagtgcatgatgtagagaaaatagaattggttaaatttattagtgaaaagattgattaaattttatttacaagtctttaaacggtaattgaaagcttaatcacaattattgaagacctttccacacttttttgtatgaaatctttgtctagtagctttttgaactcttgcaagcaaaatctgaaatttctttccacttttcaggaccattttttcaaaatgtttgaagattcctgagactttctgttctgcagattttggtgaaaagaaaattggaattatataatgaactctatacttctgactattatatgagtaatagtgtgaatttgaaattaataaaccctattaatataatcttgcaccacttaaataaaagcccaatcacaaaactgacttgttctaaaactagttttaaacctaacctattgatgaaatgaagtgacaacttcatgagtgtcaaatcatccttaaatatatacatgaaaatatacaacgaaagatacaaggtggcagtttcgtgaaaatcttaatttcttaacctaatgatcaatggagcgtaatggaggtttaggccccaaagttgtggtctatcagtcacattcttcagtacgatcttgtgatttacaaatggcaagatcatgaatcatgtccatgatgtatgtactttttctaattaaggaaagaaaatatcttaataaatctctcttatgactatgactggtctttaatgcaattctctctctctcactctctggtcttcaattataattgagtttctatataagaaaaacatatgcatactacaaaagaccaagacggatgctttattttcttggctgcgtatatactgacaactctagtacgtctccataatcatttcattcaaatttcattaagaggagaaatgaaaacgcttttgtattggggttggagtagtctcgcaggactcattctcttcagcattcttgcacatggggaaatg

SEQ ID NO: 5097 - DNA, 3000 bp, Unknown; identical to SEQ ID NO: 5084
  misc_feature (1)..( 3000): cDNA_ID_1839846_gDNA_ID_1620761_Annot_ID_50012 3000 nt of promoter + ATG

SEQ ID NO: 5098 - DNA, 3000 bp, Unknown; identical to SEQ ID NO: 5083
  misc_feature (1)..( 3000): cDNA_ID_1827334_gDNA_ID_1620761_Annot_ID_50013 3000 nt of promoter + ATG

SEQ ID NO: 5099 - DNA, 3000 bp, Unknown
  misc_feature (1)..( 3000): cDNA_ID_1827330_gDNA_ID_1620761_Annot_ID_50014 3000 nt of promoter + ATG
cttaagcaattgtcatagagtaacaaattttagaaatattttgaagcaaaattataagcaataccactctctgaactgtaaaatctcttgaaagctaacctcgatcttctctttcttagcaatagaggcccaatccttagcagcgattccagttctccagtcaatgttgatgctaacatttttgtttccgtgactcttttcatctgcccaaaagcacgccaagtagttccctgattcttgggttgtaaatgcaaattggccatgcgttacgttttccatattgtgcagattgttgccatatggggatgtcacctgcaccataatgattctcaaaactcagagccaagaataaaaaggaacagaggttaccattcagaaacattgtattccttttttcaagtcgacttcaaagactgctctcaatccaaaggacactatcttaaacaatccatcaaactatctggaactagcacatagcaatgattactaaataccaaatgatacttgctcaataaaagaaactcccttgttcgtaataattatcattgttcccaaacatacacatcaaaaacacagacttcattaaaagaccacataaagtttcaatttttcttatctcaatctcacagctaattactgatattacggcaaaaaaaaaagggtattcacagggattaagctatacacaagcatctgagcatttatacaaatccgaaaatcatcataacaaacaatcaaagaaagacatgcatgatcataattttccaaataaggaaacttggatcgagaattaatacatgcctttctaattcctaaacgtgactcatgaatcagttgaaattatggatcgagtaacacaaaatgcagattcaaatcactgaacaagcaagatgataggaacagaaaatcgaagacacttaccttgacggatatagtgggcatgacctcgtgatcctcggagatgatgaggtaatcagccaaaacgacgacattgctctggatttcttcagatacacactttgttccggtgggaggcacatctagccatacagcctcaccgaccggaatcatcaccggaaccagaaacaagagaaggaacgccgtcgggaattcacggcgcatcttagcagtcatcttcatcgacgagatttcaaattttcctattgtattcgtcgatcgttgtgttgtggtggccagatcttttgctccgaagtgtttttttttgtttgttcatcttaattcctttttgtttgggaagctttgattgggctttgatgagaccaacccatgggcttgataattgagatgaggtgatagcattgggtccaataaagatctatataaataattaatcacttttcatttaaacaacactttgtatttgcaactagtcgcccatcatctctgaacctcgctctctaatctcatttccatttggttgttttttgaatactttatctgaataaacgtgcactttggagtcataaaggcaagatttggcacagtctttgagactttttttttttttggtagagttgtgcagttcctcctgttttaataagacaaattgacaaacttaaactattacataagattgtttgacaaaaaaaaaaactattgcataagattaaaacatctttaataatagtatggccaggctaactaagtagtattagtttagattaagtgtttttttaattgcatctcttcttagatacaactcgtcatgtcattgtttggttatgttttaataatttcataaacttatcctttaacggaagtggtaagcctattgcaaagtcagctcaaaagtcgagcattaaaaacatatgaattcccaagtcgtatttttacattaattatcatcatatttagctggggtcctaaaatgtactagtttttatttcctatgaaattgggttttaattaccaaaaaaaaaagtttaaataaagaatttggcccttatggtcgtataacgatcaaatctactattctcaaggagagaaaaagggcaaaacaagagagaacataattagttgttattgctttcgtttcaaaagaatgcaaaaactctcaagccgtggatagaaaggctaaaacttattttccttcgtcttcttcattcacattatcatataagcaaactgttgaaagcaggtacttccaggtatgtcaatatattagtcgaaaatgttttagatcgtttctaatatgcaatcaaaatgagacttgttttttgtttttcatagtagtgcaaaaagatggtgatgtctatatatgctcatatgagtttttcacaacgaatattagtgaatgcaagctagtagcctagaatatggatttgtaattaggaattccacctaaacaatttgacaagaaaaactaaacaagagtttacgtaaactaatcgtgtttttctctttttaaactcagttacgtgttgtttgtttgtcatgtgggtaataaagtaacctaaatccgtatatattccgcgtcaatttcaactccgatgaaaaggataggtctcaacaacggcattttcactgtttcttttgtcgggatggttgttggatagaataaatacaactttatcaagaaaatcaaatttagaatgtggatttttgagttaacaaaaagttgtaacttattgattgagattttcgtaaaagccattcttcatgccaagtcaacaatggccattggctagtaccaatctttttacttttcgatagataaaaagcaaatggcttcgtgcttgtcctcttttttcttttcttcgattttcctaatcgtgtaatcttatgatattaataacagaagaatcataattaagcgcgttatattattccatctctttctccgattctcatatcttttaatcgtttgatctgtgaacctaacttttattcaatttcgctttcaccaaatccagagctaagatcttcagattcgtgggtcaaataatgtggtcaatgggtttgataaggcgtacggcaatg

SEQ ID NO: 5100 - DNA, 3000 bp, Unknown; identical to SEQ ID NO: 5081
  misc_feature (1)..( 3000): cDNA_ID_2994800_gDNA_ID_1620761_Annot_ID_50015 3000 nt of promoter + ATG

SEQ ID NO: 5101 - DNA, 3000 bp, Unknown; identical to SEQ ID NO: 5075
  misc_feature (1)..( 3000): cDNA_ID_3075567_gDNA_ID_1620761_Annot_ID_167136 3000 nt of promoter + ATG

SEQ ID NO: 5102 - DNA, 3000 bp, Unknown
  misc_feature (1)..( 3000): cDNA_ID_1827326_gDNA_ID_1620761_Annot_ID_50016 3000 nt of promoter + ATG
aatgttagcatcaacattgactggagaactggaatcgctgctaaggattgggcctctattgctaagaaagagaagatcgaggttagctttcaagagattttacagttcagagagtggtattgcttataattttgcttcaaaatatttctaaaatttgttactctatgacaattgcttaagggtgtggagctggagatcaggaaactcgaaggcgcagtcgaagccatccatgaaaatatactctacctaagaaacaggtaaagtcatcttcagctgcatgaactgctcttgccttctttgctgactctcattatcaaaatggtaattgcagagaagcagacatgaggacaatgagtgagaaaacgaactcgcgggtggcttggtacagtataatgtcactaggtgtttgcattgctgtctctggtttccaggtactctacttgaagcagtactttgagaagaagaagcttatatagagattccctgatattcaggtcctttaatgagagtttcttcttaaagaataatattcaattcatctcctttctttcctctttacacgcctcctttttactgacgctgtaaaatttttgttcatggattgtttatgtagcttctctctgataagaagtcattatttctgattctgaaataataatattaacttcttgtcatctccaaagtccaaacgaaagagattctagaaccattgatattgggttgtaactgatactttatgttagtttggggctataacacgtaagtttgacagtacaagggttaagattacaagaaaaaactaatcaaatgggtattacatacaaatcagcccaaatttctgacccaacaggcccgttaagagcaaaccctaatttcaaagagaatatatataaaccctaatcacatttcgcaaccaccaaagcggaggaaaaatgccggctggacatggagttcgagcgagaacgagggatctgttcgcgaggcctttcaggaagaagggttacattcctctatcgacttacctgaggaccttcaaggtcggcgattacgtcgatgtgaaggtgaatggtgcgatccacaagggtatgcctcacaagttctaccatggtcgtactggtcgtatctggaacgtcaccaagcgcgccgtcggtgttgaagtcaacaaacaggtctgatgatctctcacttcccttaaacttttgtgtccttgaattaggatttgagcttgttgtgctatttggattgttgatctgttgatttgatgttgaaatatgtgattgagtattaggtttgtagaatgtaaaccttctactgtgctccaatttagctcagattgttagttttggctcaaagatcttatcttctattatgcagtagtgtggttcttgatcctgtttcagatttgaagtttgattgcttaggtctcgtttagtctttagccttagcatgcattgcgttgtatcaatttggccctttttgcatcacagttctagctaagcatctagttttacttctccattgaactgctagtatgtttggtttcatgactatcgcattgctctagttttgctttaaatgaccaccaacattcgtatattaatcttgtttctataagtgtcttagagatgttattgtgtaatgctgattagcctatgaccagaacacaaacatttttgctagtactacttatattgggtattatgactgacatatgatggtggggttgtttcagattgggaacaggatcataaggaagaggattcatgttcgtgtggagcatgtgcagcagtcaagatgtgccgaggagttcaagctgaggaagaagaaaaacgatgagctcaaggctgcagccaaagccaatggtgagaccatcagcaccaagagacagcctaaaggacccaaaccaggattcatggtcgaaggaatgaccttggagactgtcactccaatcccctacgatgtcgtcaacgatctcaaaggaggctattagttctatcttcttgtgctttagaactctttttcatttgttttgtagcagacttaaaactaagaattatgatttactatataacaggagtttgcaatccagattttgtaaggatggtttatttttattattggtatttttgatcttccaactattgttcacttttgtcaacggtgtcttacgaattttaaatatgtctgaaattgatttaattatgagcctcattttaagatacgtttgacttggagcccatggaactccagcacgatgccacgtagcgtctgagcaacagaacctaattttgaacactgaactcaaaagagaagaagaaaagagtcaagtcttgggtgtccattaatgggagatctctgttatgttcaacacttgctcgagagacagatagaaaccaggctgcttcgtcattgtttctcctctgaagcattttcgttatttctgtttgctgtattaaaatttcctaaaatagaaagactatgaaacctcatttccctaaaatctctcatattcttgataggctcttcgtaatttcaggaatcactcacaattccaaatctctctctctctctctctctctctctccattaatctcagcatatctctttctctctaacccacaagtcttcctttgattctttgatttcaattcgttttcttcatacaaaaacattgagacacatatttaatccatatttcgagatcagtcttgctgacctcaaattttccagtttcgttacatctacagaaaaagctcctctcttttttttttgtctcccatttgattttaagattagcgtctaatccaacaagttccaacaaggtctaaagatcaaaagctcaaatctttgttctttgttggtggtgtgggtgggaagatttcattttcagtggagaagaagaaaaaaggaaagattaggaagctaatcaaaacatacagtttcctgattccggtcaggaaactgtggagcattgacggaatcacgaagccgtggagaatt

SEQ ID NO: 5103 - DNA, 3000 bp, Unknown
  misc_feature (1)..( 3000): cDNA_ID_1012102_gDNA_ID_1620763_Annot_ID_50053 3000 nt of promoter + ATG
tgatgcctacttccactcatcacataaccaagatcctcaaacttctgaatctcttcagcgttaagacccacttctcctctacgtgggatacgtttaccttgctgaacatactgtgcaatggcgtctccttcaccgggtcttaaagcaccaccataactgatgtgaccttcagctttaggtaatggcattggaccaacatcaccttcttcttcctcttcatcaacagctgaagatttcttctttaattcaatcatctctttgaacttcttcaactcttcttcatcaagttctagctcagtgttcttcaccgtttcgtctacttgcatcttcgaatcttcctcagtaccatcgctgtcactccctgacttcgtcttctctcccttgcttcgttttgaactagaatccgaagatttcttccgcctcttgctctttgacttggtatcttcttcctccccagacgaagaagcactaatctcagctttactatcttcatcgctgctctcatcagagtcactgtatttcgtctttctcctatgacttcgctttttcctaaaactacggctgcttctactcttcttcctcttagaagaactcttcctccttcgtctcctatcttcctcttccgaatcactctcactcccttcggattcactatcgctgtcataagatctctttctcctgcgcttagacctcgagctcttactcttcctcttcctagatctcaaaccatcagattcagattccgagtcagatttacctttcctttctttccctttcgaattatcatctctttcgccgccgttcttgtcctgaatctcgtcggcgttctcatcggaatcctcgttctgatctctaggtggactcggtgtgttctcccaaaagcagaacttggctgatttcctcatcttaagccgtttctgcctcctatactcttcgtgactcaatcccttcaattcttcatcggaatctgaaccagatcgtcttccgtttcgataatctcgatccaaatagccatgattcttcccaaatctcctcggaagcgagttcatcgtcattctcgaatccctaattcactccgacgacgacaatgaagaaaacaaaatctaagcagctgtctgataaattagggctttgattcatatacagtatctgcgcctttttacttattgggcccttaacgaataggcccaatatttatcattattcaccactgaaaatcatgttttgattttacacaaagcaccccacattttaattagagtcaatcgagtcctctatccttatcgtcgtcttcagatggcaagtctctccatgtccgccgtgtctctgtcgccgtttcggcctcaaacagagaatcttctttcaaaactcagtttccgaacgaacttacactcgttcaatctcaaaccaataaggattagtacgaaagttagaagttttggtgggaatcggagagagccgaaggattcaagatttgtcgatgaaaaaggcgtagttgatgacatggaaggtttcttagacaatctctctctcgaatacgactctgtttgggacactaaaccctcttggtaaatctcatttaagttcccaacaattttatttcaagtagtttggatttggtcctaagacttatgaggaatcgtatttgttggttgtgaatatgggattatagcttagatagagtcttaagttcacttttaagtggaccaatccttaatctttattagcattttcagtgatttatgcctgcccaagaacttttttgaatcatatatgaagctatatatttattgatgctacttaaaacaagacttaccccattacagtttcatgattgtgtgttgtggtttagaagatagaaagaaaaagtttgaatcttttggttaggaagatagtgaagaaccaaaatacagattatgtaatggtaattgggttaagaagggtttaacatttcgacctcagcatctacagctttgaatatctattgatctggtgtgtatttgcaatcaagaactttacggttcttcttagacgttttcagggcctagtgttcttccgtatggttttgaataagcaactggctatgtttctcaggtgtcagccatggacgataatgttaacgggtctatcaatagtggcatgtagctgggtaatactacactcggtcatagtttcatcgcttgcggttggtgtaattggtgcttggtggtacatattcctttatagctacccaaaggtatgattttcccttccatcatctaacaacctctccttttcattcccttactaaagaaatgttcgtagctctaatttactaagtctaagttaaagtaaaaatcctgtttaaacatcttcagacaatgctagtttctataatcttagtgaacaagactttactttggtcttgtctttgagattctggtggttttttcgtgtactttggttcagtcgtattcagaaatgattgctgaaagaaggaaacgagtagctgatggttttgaagatatttacggcaaaaacaagccttcataggatcttctcaatgttcaaaattacattcgtttcttgcataaatcttcccttctgttgtgtgtataatataaccatcatctatggatttatctcaatttcattcacagatgtttggatacataaatcttgatttcagagtcctctaatgtagtgggcattaaaatcgaattgaaccgattatacaaaccgaaattaacccaaatataccgaaacctcattactgaaaccaaccgaataaagtgccttcgaactaaataaaccaaacgaaccggaccaattttagttcaacaaaatcgacaaattcaaatcgaaccgaaccgagccgaagaaccaccaatacgagaaatgaggaatgaagggtaaaaatgtaattcccaagaggtcatggtcaacggaatgtatatatatgtaacggtgagagattcattgagatcatctccactctgctaaatccgacgagagacgacg

SEQ ID NO: 5104 - DNA, 3000 bp, Unknown
  misc_feature (1)..( 3000): cDNA_ID_1827542_gDNA_ID_1620763_Annot_ID_50054 3000 nt of promoter + ATG
catctttaattctttatcgtcactgtcaaatgagcgaccgtgacaaatattttttaattatatttattgtttattaaaattacaatgaataattttaaagacgtcgagatatttaactctaagtaattacaattagatatttaactctaagtacaacatatatatagtgtttacagtaggttttaactcttaagtaattacaattagatccttcatctttattatgccttacagtcgagatattgactgaatgatcattgagaaattgatacgaccttgagaaaatctcagattatgcattgtttgtttgtgataaaactttctgtgaaatccacggagacgatcctttgacaatgttttcatttcagtaatggaaataaacaagtttcgtgctctttcgcggcgagctcagcagctacattacacatccttgaatggacttaaacgaagatgcaacaacgcacacggtgcagctaattttcactcgttgaagagagctacacaaacccaaatccagaaatcgcagaccaaacctctccttaaatgtggagactcggatataaaagagtggaacgttgctataagcagctacatgcgtactggaagatgcaacgaagcgcttcgtgtcttcaaacgcatgcctaggtggagttccgtttcttataacggtatgatttctggttatttgagaaacggtgagtttgaactcgcccggaagttgttcgatgaaatgcctgaacgagatttagtttcctggaatgtgatgattaaagggtatgtacggaacaggaatcttgggaaagcgagggaattgtttgagataatgcctgagagagatgtttgttcgtggaataccatgttgtcgggttacgctcagaatggttgtgttgatgatgcaaggagtgtttttgatcgaatgcctgagaagaacgatgtatcgtggaatgcattgctctctgcttatgttcagaatagtaagatggaggaggcttgtatgttgtttaagtcaagagagaattgggcgttggtttcgtggaactgcttgcttggtgggtttgttaagaagaaaaagattgttgaggcaaggcagttttttgatagtatgaatgtgagggatgtggtctcatggaatacgatcatcactggttatgcacagagcgggaaaatcgatgaggcgcggcagctatttgatgagtctcctgttcaagatgtctttacatggacagcaatggtgtcaggatatatacaaaaccggatggtggaagaagcgagagaattattcgacaaaatgccagagagaaacgaagtgtcatggaatgccatgcttgcaggatatgtgcagggcgagagaatggagatggcaaaggaattgtttgatgttatgccttgtagaaatgttagtacatggaacacgatgataactggatatgctcagtgtgggaaaatttctgaagctaagaacctttttgataaaatgccaaagagagatccggtctcttgggcagctatgattgcagggtattcgcaaagcggacacagctttgaagctcttcgtttgtttgtacaaatggagagggagggaggtagattgaatcggtcttcgttttcatctgctctaagcacatgtgcagacgttgttgctctcgagctcgggaagcaattgcatggacgattagttaaaggtgggtatgagactgggtgctttgttgggaatgcgcttttgttgatgtattgcaaatgtggaagcatagaagaagctaatgacttgtttaaggagatggctgggaaggacattgtctcttggaacacaatgattgcaggttactcaaggcacgggttcggagaagtggctttaaggttcttcgagtcgatgaagagagaaggactgaagccagatgatgctaccatggttgcggtattatctgcatgcagtcacacaggacttgttgacaaaggcaggcaatatttctatacgatgactcaagactatggcgtaatgcctaactcacagcactatgcttgcatggttgatcttcttggtcgagctgggcttctagaagatgctcacaatctaatgaagaacatgccctttgagccagacgctgcaatttggggaactttacttggtgcaagcagagttcatggaaacacagagctagccgaaacagctgcagataagatatttgcaatggagcctgaaaattccggtatgtatgttcttctctctaatctatacgcttcttcgggtcgatggggagatgttggtaaactacgagtgagaatgcgggataaaggggtgaagaaagttccagggtacagttggattgaaattcagaacaagactcatactttctcggttggggatgagtttcatcctgagaaagacgagatctttgcatttttggaggagctggatttgagaatgaagaaagcagggtatgtttcaaagacgagtgtggttcttcatgatgtggaggaagaagagaaggagcgtatggttcggtaccatagcgagagactggctgtagcttatgggataatgcgtgtgtcttcagggagaccgatccgtgtgataaagaatctgcgtgtatgtgaggattgtcacaacgccatcaagtatatggccagaatcacagggagactgattatcttgagggataataacaggtttcaccattttaaggatggttcatgttcttgtggagactactggtgaatgatgattccatttcatctttgattcaatctaaccattgaccaattatacgtaatcaacacacattggaagaattaatttgttaacttaaacatgccaaattgaaaaactataatgttgtttttagtacataaatatccctacagaaaatccacataatttgaaaagaaatgaaaaaaataaaaaacgaacccggaagtttggaccttggaggcggagccatttataaacaacactcgagaaaacgcttgagaagacgtattcaacgttgggttggttccatg

SEQ ID NO: 5105 - DNA, 3000 bp, Unknown
  misc_feature (1)..( 3000): cDNA_ID_1827534_gDNA_ID_1620763_Annot_ID_50056 3000 nt of promoter + ATG
tgaaagtacatgttgcaattttaagaattatcgaagtttatggtggaaatttcaggagcaaaaagtgtggggggaaaagcagagaatgcaattagtttatggctataaaatcagccaacccttttcttaacggatataagtgattaatcgggtaaatcgcaatcgcggtacagtaaacgcgaatttgtggttaattccggtttaatgaccggttcaattggaaatgtatgtttaaggatgaatccgaaagtacatgttgtaatttaaagaattatcaaagtttatggtggaaatttaagaaacaaaaagtgttgaggaaaagctgaaaatgcaattagtttatggctataaaatcagccaacccaacattcaaacaactcaatcttaatcgttcatcaccattaatttcttctaaagtcaataaggttgtctaaggggatgagcgtgtaaaaccgaaaaaacataactagaataagtaaataatccaggtcatacagtagatttgggatgataagtagtaacctcggacgattagctagaattctgggaaaccatctatgagcggtacccaattgaacaaggcctatgtagtaagattctagaaaaagctaattttgattcaggcccaagtttcaatcttctaagctcaaagcccaacacatatagatgatcaatccaaatgatttggtcctctaatggtcaatgatgttctagattatcaggccttaatttgaattgatattgaaaaagaaaaagaaaaaaagaaaagaaagaatcagaacaaaggaggcaaaacgacgtcagataatatcagaataagatgggtaagagaaaaatctaatggttgaatcctattggttaccttatccacttaatccaacaaactctagcttctcatttcgcaatattatctcttttctcttctcatcaaaacataccaataagcaatttgctcattagagaacagagaaaaaaaaaacaatggcaactcaagccgccgggatcttcaactccgccataacaaccgccgcaacctccggcgtcaagaaactccactttttctcaacaacccaccgtcccaaatccctctccttcaccaaaaccgcaatccgcgccgagaaaacagattcctccgccgccgctgctgcagcccccgccacgaaagaagctcccgtgggattcacgccaccgcagctagacccaaacacaccgtctccgatcttcgctggaagcaccggtggtcttctacgtaaagcgcaagtggaagagttctacgttatcacgtggaactcaccgaaagaacagatctttgagatgccgacaggaggagcagcgatcatgagagaaggtccgaatcttctgaagctagcgaggaaagagcagtgtttagctttggggacaaggcttagatccaagtacaagatcacttaccagttttacagagtgtttcctaacggtgaggttcaatatcttcatcctaaagatggtgtttatccagagaaggcgaatccaggaagagaaggtgttggtctcaacatgagatctattgggaaaaatgttagtcccattgaagttaagtttactggcaaacaaagttatgatttgtaagatctgtaaactaaaaaaaccaaaaactatgtgcatgtggtgatgattatgactatgtttcatgttaatttttaatggattttgttttgataatttgttgttccatttggtttaatggatcttttatgggcctaaactataacgtaattttggaaggcatatgttgggctttaatgggccggttgagtagaaaaaggaaagttaaaatcattatcgtagcccaacggttcaatttcaaacggtcgggtttaaaggattcggatcttatattcgccgatcgtctctgcctctttcgcagaagcacacttgatcgaacgatggccacgaaagaggactgacagtttcgtttcccagtctccgatccaaaaccatagtgaggttccgattgttcttgtaattaacgtttattacatcgccctgattatctgagtgttccttcacgcgacggagataattcaactcaggatcgtcttattggttgatcgtatccactaattcggctcacgtcttctcgattttggcaacggtgctgtggaatcgcgttaccgttcaaaatttccatttcggctgatctcattatgaatgtaagctacttatacactctcacaattggatttggtaaagcatgatcgaagcgtaaaatagagattttccaaaacaaaaaacgaaccaaaggcattgtttgtggaatttggcaccatttctctaccgttttctgtgcgttttttcaatctatagtgactatgtttaagagccttgtttcttattttggacgaaaattctgaactctatcttgatgatatcacatattttcgagtgtttatgtcatagactgtttatgctactcccacatggaatagacaaagtttgttggatacaaggtttatagcgagcttgtgcgttctaggatttgtagctaggaatgcacttggtttagctagagtttcgtgtagttgagacttgtaacttgtaagtatccttattttgaatgcatcccttatatatgacagttaaagaacaaccatttatcagatccaggctttgcaaagtttgtgaccaatacctgactgactctgagataatagttaagttttttttctttctattcagtagatatcttttgcctgtctgccgatatcaatcacttctcaatttttatccttttgtgcaaacactagtcttccggtgcgaatggtgacactgaaatgttttttttatcattctggtgtttgtagatttagcttccgggatgaataatttgttgcagatttatagtgaaagcgagacatgttctacatgaaagctcggacataattttgagcctttggataaatttgttttttcttgcattctctcctttcaaagaaactcctttttgacattcgtgtcatg

SEQ ID NO: 5106 - DNA, 3000 bp, Unknown
  misc_feature (1)..( 3000): cDNA_ID_4254642_gDNA_ID_1620763_Annot_ID_50060 3000 nt of promoter + ATG
atatatatactagattttaactcgcagtacaccatatgacgatttattttctataagtagtgtatttgaaaatttaatgattatatattatatataaaattttacaaattgcactaatttttgaagatccaattgtaccaattctataattttacaaattagtgaattttctaagcctttaagataactgggcctaagagtctttaaaaaagcccagaaaatgtcatcgtccaggtaatggggataaggggttttagattcttttaattttgtttccgagtttttcagccatgtttgctcagttagcaccatcgccgtctccttctccggcgaacgttagccacttcgttcaccgtcgcaccttccgtcaatgtacatacgccgtctccgcttctcttcccactgcaaattcctctcgtccaccaccaattcaggcaaacattgtcattctaattctactacttcgtggtcttcttcgttatctgaaatgaaattgagaaactcggaaacttgttttgcagattgttggaggaaaggatttgaatttggatgttacacggaaagatgattcaattgggttcaaattagaggcaaatgaagatgaaattgattggatgaatctagaatctgatattcgtctatggactagagcattacgtcctgttcaggtaaaacaattacgagattatgttgtaaagttttggtttttctgaatatgaatttgttggattgttgtttactgtgtgtgtgtacgtgggttcttggtttcatagtggtatccagggcacataatgaaaactgaaaaggaacttagggaacagcttaagttgatggatgttgtgattgaagtccgtgatgctaggattcctttatcgaccactcatccaaaggttagtactttgcatctaaaggtctttgatccggttttttagactatgctaattatattactcagtctctctaatctttgttcaataggagcaagtgaagtctatgacaaaacttttgtgttgttcaataatgtttgcacctacttttgggggttatgtatgtggtattttgtagatggatgcgtggcttgggaataggaaacggatattggtattaaatagagaagatatgatctcgaacgatgatcgaaatgattgggcgagatactttgcaaagcaaggaataaaggtcattttcactaatggcaaacttgggatggtatggtttcttcaagtttaaactttgctttgggattggtttttttctttctatatgtttaatctgagagatggttacagggagctatgaagctaggtcggttagccaaaagtttagcaggtgacgtaaatgggaaacggcgagaaaaaggacttctccctagatcagtaagtaaagtgtctcatgatccattattctctgatgcaacatatatgatttaaattttaagttcatttcaaatgatgcaggttagagctggaataattggataccctaatgttgggaaatcatctctgatcaatcgtctattgaaacgaaaaatttgcgcagcagctccaagaccaggtgtaactagagaaatgaagtaagaatgccttttgaaagcttggttttttttgcctcttaaaactcagtttccaaacttcatatctggcactggtcatttttcttatcttactgtaaacagatgggtcaagcttgggaaagatcttgatctcttagattcacctggaatgcttcctatgcgtatcgatgatcaagcagctgctataaagctggcaatttgtgatgacattggagagaaagcttatgacttcactgatgttgctggaatccttgtgcagatgttagcacggattccagaagtaggtaagtttctgaacattaccattttttgcgatttactcttttctctcattttcctgcgctaaaaatgaaacttgatattctctcctttataacaaaaaggcgcaaaggctctttacaaccgatacaagatccagctagaaggcaactgcgggaaaaagtaatgaaacttcctcaaagagagctcatttcttttggcaaaccattgttcatggattcttattgaatctctgctctctcttttgcagatttgtgaagacgcttggtcttaatttgtttggtggagatagtcatcaagctgcatttagaatactaacggattttcgcaaaggcaaattcgggtatgtctcgttggagagacctccactgtgatccaagttagtaagagatatgctcaaacttatgtgttaatttatgtatgcaatatatgtcttgatgtatgcatacttgtgtattccgtttgtcttagaggacatgataaatactagatatagaccaaatccatgacgacatcagtcagatgctgctaaatgctaaccatttttctcttaagcccaaatgtatgaataatttgttcatgtaaaatatggttaattttttttttgttgtcaatattttcaaaagctacgtaatggataattctataatgttcataatacaattcatgctggtgaaaattttgtttatgatttaatattcagattagtaaacttgtagtatttcagttagataacaaattaaatctttgacattaaaggtggttaaaccacgtaacaaataatgtttttttacaagattctattcgaatagttaagcttttacaagttcatacatctcaagagttctaaaaatcttatagagttgagaaacgaccgttggattatgaaagtgggacctactaatccatctgtagatttcttttgggatgcaatgaaaaagtcgtcgaccaaagtccccacttctagatctacttttgtctctttccattattaattgatcaaaaataaaacaaatttcgaaaggagttacgaaatcagaacgttgggccgatttttcgcagatcctatttaaattttatcttctttccacaatctctcatcttcaataaactagccgttacatctctctctttctctatctccatca

SEQ ID NO: 5107 - DNA, 3000 bp, Unknown
  misc_feature (1)..( 3000): cDNA_ID_1827518_gDNA_ID_1620763_Annot_ID_50062 3000 nt of promoter + ATG
ttccggctactaaaagtataataatcactaatatttaaatttctaatgatacctttccttgttgtccttaaactagtattaaaacttataattcgttgacataatgaaagctttttgttcgtttaatatagttttctcataaagtcataataacaaactttttgttcgtttaatcctgtctaagtaacttatgaatcacaataacaaaatacactaaacaaaaagttaatttagtttataaacgaatgaagtgatataatattaatatttttatcattaaacgtaaatcatagattaaaaaaaagatttggccaaaaaaaaaagattaaagaaaatattaaaattaaaaataaataatgatgattctaccatatttggtagtagtaatttgtaaaaaactttcttttaatgtaattgagttttcagaattcttattttttaccaatccacgtatccaactaatattacattaaataaataaatgttcaagaaactaattggaaatcataaaataaatctccaatctaaagtagaaccgcattataaatacaaactcatcccttctacttcccatcatcttcatcacacacccatactcttcctcgaactctcttcttctttctctcttactttgtgtttgctctgttttgctctcttaacacaacacaaaaaatgtccatcgttgttggccaagcttaccaacatcttcccaagcaagtaagccaaaatcctgacgtgggtggatggagtttcttgcaatatttctctgagccaaaaggcattgtccagaacagagaagacgacacaaagaaaacagcttatgtctacccgatcgagaagcgttccgtagctaaactgagccttgagatgtgcacagagagcctcgggaccgagaatgggagtgatagtggagacgagatgtcgttacttgcgcttgaagcaaccaatatttcaaagagtcctcgtcttactacgaaacctcaaaaagaaactagcttcatgacccgtgagaacagttttcctccgccgctaaactccgtcaacggattcaacaatagccgtatggtgaaatcgtataaagaagacggtcgtcttgttgttcaagcaattagggtttgttctccacctcgttgctttgtatctgaacgtcgtgaaggaaggcttcgtctctgtttatcacagaattcattgaatagccaagacgcagaagaagagtttgaagaagaagatgaagatgatcaatacgatgcagaggaagaagaagaagaagaagaagaagaagaagaagaagaagaagaagaagaagaagaagaagaagaagaagaagaagaggacgaggagggcattgtggggaataatgagaactttgagggtaaaagtggaaataaaaaggttagcaacaggccaaaaaggagatgcaatgaaaatggatgtgagcctaaaactatgcttaattggaagcagcagcaattttgggtgaccacttaatgggaattactcaactcagcaaataattattttttacggcttctaattctacatatataaatgctaaaatgtgagttaattgttacttaaactgtttaacaacatagagaactaatcttcattatctgcttttactttttagtatgttataggtaacctttgattattaacgagagttttagttatgttttcatagactaacgagagtgaaactatagttttaaaaagggtaataaagtaccagtaatagtgagactgacgaaaactatatgatatctttcaaaaaacttcattgaaattttggtaacatcatctacactagtttgcaacacatctttgtgcttctaagcgcagtcaatgtcaatgttattgtcatcactagtcttagtagcaccaagggataccacacttttatcatcaaccatcagtccatcaaatggtcattaattcatatttaagtcttttataagaactaaaggtttctacaattttcaacaaaattaagtaatgtaaatgtcgtttatgagtatgcgaataactttaacattattattgtagaccaaactctttgactgtcacgtgtgcatatttatagacacttgctcgtacggacgtaattgaataagaacatataatttgtaggtccattgtacacgatctctctactttcttgatattcttccctctgtctcgaccaaattcgtactatataaatctcggagtgatatcaaaatagattgcaagtatatgattgagccaatgagaaatagacaacattacgatgtaatgtccaatcttacgtacaaatgtgaagagcaatctttgttctctgcaaacgaataagagaacattacgattctttatatataacatgccacttgactccgcttataattgaccgaaatctaaagcaaatctcatcatgtacccatcttatttggtatattgatgattcgattttattttattttcaatatagaaaatgtattttccatatacttaatgttataaaaaaaaaatcatgtttatattttaattcaagttgaatcactttttgacgagattatgcgaaatcaagttttgatggaaaaaaatatggaattgtgtttttgacgggaaactacggaatcactttttgacgagattatgtgaaatcaagttttgactggaaaatttggaatcacgtttttggcgggaaaattatggaattacgtatttagcgaaaaatgtgaaatcacgttttgacgaggaaaattagttcttatttgttgtgaacagtgaactagtgaagttaaccaaagtgttgcagttttgataaggctaatgactactaattttagaatgatttttattgactgagagaaaattttgaaagttcttttatgtactgcttttattttggttttagattgggccgagacaaggcccaacaaagaaatagctcaaacacactcacttagcaaattactcaaacagcagagagagagagagagctcagtaaactaaacaaaa

SEQ ID NO: 5108 - DNA, 3000 bp, Unknown
  misc_feature (1)..( 3000): cDNA_ID_1827511_gDNA_ID_1620763_Annot_ID_50065 3000 nt of promoter + ATG
gtgtacgggcttctgctaaggtttgctcgtggcaactaggatgggactccaactctttggtatcttcgagttgtggaaatcacgcaaatttccgagtttagcttctcggaatcggtgtttcttctcttatttccgcttttggttaacgttaaccactattgctgtttgtttttgtctgtgtcttctgtagatttatttttccgctacatgtattccgtgtaacttctgttacaacttcgaaaatggtataaatacttaacattgataccaaaaaaataaaataaataaataatctgtttttatgtattaatcactaattaaaatggtgggccatcaaataaaaaattcaaataatattatttgtccgtgttgttgttggcttgttggtgtttgctatgtgaagtcaaaagatgtgtgatggaaagaaagaaaaaaacataactttgctcaaaaagatcgatcgagatatggggaagaagaaaggtgtcaagtactttgtggtaatctatttatttctctcttcaattctccaagttgtatttcagaatactcactgaatatttggtgtgttgaaaggtggatgctttcactgattcggctttcaaagggaatccagctgctgtttgttttctcaacgacgataacgagagagatgacacgtggcttcagtctctcgccgccgaattcaacatctccgaaacttgttttcttattcccatcactggtttccaagctcgcttcagtctacgctggtttacccctttagccgaggtttcaccaactattttgacttctgtttctctttaaagacttcgactttatattgttcattgattgatagaaactgaactcgactacacaatctctctactgttttagattgatcaaagtaacttgcaatttcttgcatttgaagaaaattctttttaaagacttcgactttagattgttcattttgactgataggaactgatctcgaattcactagctttttgatttgggtttgttgattgatttgtaggtggatctctgtggtcatgcaactttggcatctgctcattgtctcttctcaaatggtttggttgattcagacatggttgagtttgtcacaagatcagggattcttacagccaagcgtgtttcagatacttcagagctcagtgatggtgaagtgaaaggaggaacctttttgatcgaattgaatttccctgtggttacaacttgtgatgttaatctcagtgatgtatcctcttctatgatcaccaaggccttgaacggagctaccattgttgatataaaagctactgcaacaaacaacatcctcgtaagtttgatactttgttcacgcagtgtattcatgtgtgctcataggttaacctaatctttgtatgacttttgatttactcttttatgcacttgcttgtaggttgtgcttccatctaaggaatctgtcactgaattgcaaccaagaatggatgatatattgaaatgcccctgtgatggcataattgtgacagctgctggttctacaggatcgtcctatgatttttacagtcggtactttgctcctaagttcggagttgatgaggtaaaagagtagctgcaacttacattatagtctttgctcttaggattgaacaaaacaccaaagaatatgatttcttctgcctgaaatgtgtcgcctttttcaggaccctgtttgtggaagtgcacattgtgcattggcacattactggagcatcaagatgaataagtttgatttcttagcctaccaagtaatctctcttatctctttaaatttaaagtagcgtttagtgcttcctagtgaatgattttgagtttttggaaatgttgcttaggcttcgagtaggagtggaacgataaggattcatctagacaaggagaagcagagggttctcctgagaggcaaagccgttactgtgatggaaggccatgtcttggtctgatctgaaattatatactgtgttgaattctgctacaaaacaagctcctataatgaataacaatgaatttactcttttcaaaacaaaatagtgtcagctgactgatccaccttacatgaggtgtggtcgctcgtaggagccactgataggatatgtccatgttttctgaccatgtgtgttcattttgaatgactctccaacagttctctttcactcacagacaatacatttattgttgatggatttccaaagttccctaccaaatcttcccagattttactatcaataaatgtttgtttttggtctggagactctatcattattaaatagaacgtggagcacattgtttccagataagtagatttcaataggaagaagaggagctatggccatgctcgtgaagaaacctgtgaagtacttcatggtaattgtatattcttcttcgtcttctttggtttttgtttctcgcaatgtactagtataacttccttcctttctactttgctctgagtacttcttttagaaatgttattatccttgtaagcttcccaaagtgttacctgtccttttttggagattttaagaatacctaccaaatcttcccatgtactatcaatcagttattattgtttgagtgttcctttttgactaaccaatttttgtttgatttttaacgactagtaagctatgcaacacaattcatcacatgcttagcataagaataatggaataaacataccatatttgttttgtcaataagtgcgtttttgctttatgagtgcttgcttccacttgattagatctgtcctttgctgaatataaaattttgcaaagctgcagatttcataatgatttgagtacaattcaactgttagcatataaacaaaacaaaaaagattaaaagccgagatttgtttcaataagattttgccctacaaagattgtctgtttctcttaaaagatgaagtggcattgtaaattaaaagcctccaaaatggtataaaagtttagctttggtctaacgaaaacatcaatg

SEQ ID NO: 5109 - DNA, 3000 bp, Unknown
  misc_feature (1)..( 3000): cDNA_ID_4257535_gDNA_ID_1620763_Annot_ID_167258 3000 nt of promoter + ATG
tcgtaaatggcaaagaataatttatctcgagaatgaggaatataaacaatgactttataatataagtattatactatattatgtataatttaatattgtgtaaactatatataaagtccttttacagcatttaaatatagatatttattgacacactagtgcaacaatggaaatatcttgaattgattaaaaaaagttgttatctatacaatatgaaactctttgtatatcttaggtgcaaaactatttgataatataccgatacatagtataacgatattattggataatcctccaaaactcagctttttgtctcgaaacttaagttataacaaagttaattgaaaataatgagacagtactagagatgtatgataaaccaattaaagttgaaaaagttatattcttatttagctttgccgtcaaaaggtacgataaatggaaaatatgctcttgtcttctgagcctcaaaaccttaagaagattcttacatatcttacatgtcaaagtaaagagatagttggtaacacattcccatgtggtccggaaaacaaaagcttcctttattgttttggaatattaatcagcaactgtgtagtagtattctatgttgcatacgtaaaacatataaataacattataatcatattagtttgaataatagattctaataaaagatgatgtatctttagcctagtgatacgtctaatgatcttaattaaacttgtttaatgtaatgagttaacactcaatattaacaaacaaaaacttcatattctggactacgtatgttatacatatttcaaatatacatcaattgtctattctcaacttattatttatagtctctttgttttcttgacaaattattggtcatatttttctttcacatggttccgaaggttacgttttcatgtatatatacatttgtaaaaaaagtatatatataacatttgtacaaaaagcataaaaaaattaaaatgtttatcccgattgctttttgtttgtcacatcaatatttagtgctctaaatattttggttgagtcacgaaactgtaaattaaaatcgttgaagttgctcaattatatatacgtcaccgaagttgttgtatattaacattgcatgctaaaatatatttcagatgtttaggacacataatgcattttccgtaaaataaagcttaaaaataaattaaaatatggttttataagacactattttatcttcttttttttttttttttttttttttttttttttttgccaaacccctattttatctttttatcttttgaaattttttatgatgtatctatgaaaatgatttgtgactaatgcaccgaggcttcatatgatttcattaatcacatcccatataaaatcacgggttatgttcataatttgtttattcaatattagactactatgtgaacttttagtgaattcacttttttttttatccaatcaaacctctggtttcagaatttagtttccagttttaaacttttttcttgagacgtaaaagctctcatgctttgttgatgatgtagtggtggagaatcgtgatcttcaacactttcatgtaaaaaggcttcatcatcgttaatggcatcttgggtttactcttggctgaatataaaaaagaaataataggattgatatagactctatatattaagaaataaagtaagacagtccacggcaacgcatgtgattataggaaccactatcatgcaacgacgtggatcagtgggaaccgttgctttcgaaagcataagagagacatcaattaattacaaagaaattgtgtaaacacatttatatatatcagtgacatttgagattggttttgacaaagatatacaacttctctcccgacataaatgtctacaagaatacgcaagttaatcatatttggagctctttcatctatagttgtagacaatttgtacactctattagggagttctagacttttgatgaatagaaacattttcagaatttgctttatttttttaatataggaatgtgaatattattttaaatgattcgtttcaaactttggatatatagtcatgtattcttataactagaaacttcgggtatttgggtaaaattttcgattatttggatacaaattcgggtattgggtaaaatttcgggtatttggatataaaccgatctgaaaccgattggatccgaaccgaatccgaaccgagattttctatttaccctattgggtcctagaatagcatatccgacatatccgtattcgaccgattattacccaaacccgaccagcatacctgaataccaagccgtaatttagatatgcaatttataaaggctaaaaaatcgtgaaaaaccattgtgatatattataaattattttttgggagccctaaaaacattacatattttggaagctcgagacaaaagcctttcttttttttaaccctttaggcacggttatatgaatcatatgacatgtaatatagcagtttgtaatagtaccgtcatattgtttaaccttcaaattcaaatatgcatgatttatgttcttgacaaaaatatgtatatttatgcaaaattaaatattcatctataacgatcatattatctatactgttaattttaaaaggatcatatcatctatactgttaatttttaagtgatttttttttataatttggatcccattttatttgctcttaaaaactttggatatacttgatagctttttaacaaacaaaaataaaataaaaagtacttcgagcccacgtaaaatcgaataaacaaaaatttaatttgttgaacaagttggtgttttgaactaaggcccaataatagtaagaatactaaaatgggcttaagccgggtcgtcggatcgggtttaagaaaaaacagggtcgaggtttcaagagaaacccttgttactcaggcgactaaaaccccaaatctcatttgtgtgttcgcctttctctcgtacaagtcaaaatg

SEQ ID NO: 5110 - DNA, 3000 bp, Unknown
  misc_feature (1)..( 3000): cDNA_ID_3075696_gDNA_ID_1620763_Annot_ID_167251 3000 nt of promoter + ATG
attggcgattgactgtgagaaactgaaattccgggaaaagaggagaagacgagagaaaatggcgccattgacgttgttcttcttctccaacgacatttcatcttcttcctccgattctccgattttttctgcttctcgttcgaattttgtttttgattttctgtaattaaaattttggagaacatatctcacgtgccttactcgtgtgagtgaatgttgcgaaaatgcaaatgaatcctgaattaaaaagttagtacatatacactaatatctaagttggtaacattgtaacattgaaaagaatatatgtatatacaatttagattgatttaattagtaaataaatttgaggctttttaacttggttgaaatgaatacatctattaaatttaaccgcttttgatttaccatttataaattaaagtccgtagtagtactgaccaaaaaaaataaaagaaaattactacgaaccaataattgaccacttttacattaaaaatttgatttgttctcaaaaatagaacggagtaaaccgttgacggattgtccacccgccgactcgtaattattcgaatcttcgaaatcgaaaataaaataattatatagcaaatacaactattaaaaaagtgtaggtatagaaaataattactggaaatattatattgatgatatcagtttcaggactttatttatgttggatttgaattgcaatttaggaggtgttattggtttgtgatgccttttaaaactttagaattatatactatcaatttgtgttaagatttattttgaaaaatactttatagattttcaaaaaacaattctcatggatttaaagaaaaaatgcattagaaatatatatttactagatattaacccacagtataccgcgggccaatatttttattaaataaaaaataattgaatattttttaggatgatttaataaatttatgctattgtttgatttaaatgtataattcaccgcgtgacgaaattttataactcaaattttaaagtttaaagttgtatttgtttattttgttaaatgtttaatattgtataattgtattttgattgttgtttatcagatttcacccgtagtacaccatcccatattaatatcgaatcaaacccgtcaattctaagatttcacccgtgatagtatttaattgtataattgtattttaattgtcattctaggatttcactcctaattctatcgcaaattattatcaacccaaaccagtcaattctaaaatatcactcgtagtacaccatcccatattaatatcgaatcaagcccgtcaattctaggatttcacccgtggtagtatttaattgtataattatattttaattgtcattttaggatttcactcctaattctatcgcaaattattatcaacccaaaccaatcaattctaaaatatcacccgcagtacaccatcccatattaatatcgattcaaactcgtcaattctaggatttcactcgtggtaatatttaattgtataactatattttgattgtcattctaggatttaactcctagttctatcgcaaattcttatcaacccaaacagtcaattctaaaatttcacccgtagtataaagtttaaatatttataatgtttaaatttcttataaaagaatcaaaatgtgttttaaaaaaattaaagttttaagttttttttttataatattgttaattttttttagtgtttaagattatataattatattatgattgttattatatgttttttctatagcatactatcccatgttattatccactcaaacccgtcacaccatataaccccgtcccgtgaaattaaacacaaatttgtcattttattataaatttcaaatatttataaaattagaaacttcaaaaaaagattaatattgacccaaacttcatcatttaattttgagtgttatatctaagatttctctcgcagtatatcgtcccgtattaatatcttttatattgtttaaatttcttgtaaaatttaatttataattttttaaactttttaaagtttcaattttttaaaataaataaccctagtaaacaaaccatttaaattttggacacctcataaatcaagtttcatgctcattcgtaatcgaaatcattttggtcctttttatagtatggctcttgaccattgtccaatttttttaagcgatgttggacattgtaaaatcgtaattattatccacccaaacccgtcctaccatataacctagtcccgtgaaattaaacataattttgtcattttcttataaatttcaatattataaaatttgaaacttcaaaaaatacaatatcgacccaaaattcatcattgaattttgactgttatatttaagatttttcctataatatatcgtctcgtattaatatattttttatatatttataatatttaaatttcttgtaaaatttaatttataatttttaaaacgttataagttttaaaattataaatatttaaagcattttttaaagataaactttataaaaaaaatttaaattataatatttaacttttgataaaagttataatatttataatttcttgaaacattttaaagtttcaattctttaaaataaaaaatccgagtaaaatcggataactattttaattttggacgcctgataaatcaagcttcctgctcattcgtaattagaatcattttggtccttttataatatgggtctgaaccattgtgcaatttttttaagcgatgtgggacattgtacacatattatttctttataggttgaataatatatgtccattttaaaaaatttgaattacatcatattcagaagaaattataatattttattaactatatatattttatataaagtcaaaataaataaagtataagatcaaataaaaatgaaagaagaattatatatttatgtttaaattaggtaaaaatattttaggaaattagttaaggtaaataagaaatatg

SEQ ID NO: 5111 - DNA, 3000 bp, Unknown
  misc_feature (1)..( 3000): cDNA_ID_2131704_gDNA_ID_1620763_Annot_ID_167250 3000 nt of promoter + ATG
ttcgaaagggccacgagtgtttgtgccatatccttcacctaaaccgataaacaaacatataataaactcacaaggaagtcaaaatctgacaagggaagacttttacttaccctgcatttctaaaccctcatagataacataaggaagcttcgaatcttcagtagaatcagcgaacaatgtagctaaatctatgccatcttgttccatgtcaacaccaattagacttccggagttgtgtaacagcctttgcatcacgagcacattaggatctttttgtgcaccaaagttccttgtagaatcaagagaacctgcaacacccaagaagtaaaggtattaatatagttttttttattcctgcgcaatgtcttatacataatttgtgatgaaagaacgtaccttcgaacatgtcatcataaagattgaacgtgtctgtgtatataaggatattatcattgtcgtagttacttgggttttccctgtacgattcatatcccttcaagacttcttcatctgtttcttggctcggactattcttctccgcttccttggatcgcacgtaagaagaatttgatgattcttgagtcgatggagatatagggtcgtcggagagagtcatctctgtttcgttggatcacgatagttaaaacgacttagtactctttttcgatttcttcttcgtcggagagacttatcgttaaaacgatttgagattgagagagactgttagacggattagtgagaccgcgagtgacgagactcgtttctgtctttcttttctttttttttttttttaacatcttcattttattgatattatgaagaattgtaatcaaatcgtaatgctgtgtaaattacaggtggtatagtagagtaaaatttaaaatgttcttctcgaaacaagtgagctttggctagcagatctgcaggtttgtttgtcatccgagtgacccatgtgaatttacactctcgaaatcgatttctccatgcctgaacttctctaacccaattatacagatcaaatcgtgcctttccatcattgagaattttcagcagctccatgttatctccttcgaagcagactcttgtatatccatgactccagcagttctgcattgcaaatataagggcttgaaattcgttctcgattgcactgttgttggttcgtcctctagcttgtcctgcactaacaaaaaggcctgcttcatctcttgttacccaacccgctttacctgtctttcttttcttatataataataccggccttattttgttgttttgaataagaaaatgtatatgttttaaagaaaaaatcaaattacgaacacttcaaaacataatctagatcattaatttattacacgtgaaaagaaaacaaaaataataatttcatttaaatatttatcaaattaaaatatatttattatataataaaaatataaaaatatttattatataaatatatatttaatataaattatattattatataaaatatacttattatacaattaaaacataaacaaatttattatatatttctgatgaattcttctacactcatgatatatactctctccaccttttcttttgcagtgaaagctcacaaaaatatacaaaactacattctcatcaaaaaatcaccaacttaaaaaataccaaaaattgtatttaattctatagttaaaatcaatttgagttttattgagtttttatataattttagtcttttaggtgaatttggggaattgttatttgttgttaaatcctacttcaaatcatgaaatttgaatctttgtattttgaagtatgtaaattatctaaatccaagtcttctttagtccaatcccaagcattctgcatcatcagctgtcttttctcctagggtgcgtgtgaagtcattcctgagattgaaggtctcctggatctgcctctcatcatagccgcaagagttcgacaagtacgtttctgcccctagattgtcaaacataaccaattagataacactagatagagatgaaacagaaggcaatgccaatgctctgtgtcgtatggcttctgcaacaaggtatatagagtagctggacagtggacgtagaaatactatgggccagaattattatgggctcaaattagaagtatttctattgggccagcattatttattctctaccctaaaccctactatttcaacacttgaccaaaatggcctttaagacacgctgggcctacgccaataattatccacgtcggtctaaaactcaatgacttgacgaaaatgcctttgaggattctatgaaattaccgaaattacccttttgtttcttagccgcgtaagtttcgtctgatattatttttcttcttctccgagaaacaaaccctttaatttactgttgtttctcacaattctcaaaaatctctcatccgaattgcgccttttccgcttccttttgctctgtcaaatctctcaaccggaaaaatctcgggaaggttcgtctgatccaattctgaagattttgaaaaacccaccgagaacttcgaggtgaatttgatcatcttcttcaaaaacctgtttttttgtttgtttgttcttgtgtgtctctattgttaattttgacgaggagatttatatatcctatgatcaggtcgtgtttcacttctctaattaagttgctttcttttgattccaccgtattgtatctctggatcgaaattagggttttagtgtgtgttgtgaactttaaacgcataaagtttctgcctttcgcgtatttgaaagtttgatgcagccatattctgtagtgtctccaagcaattttctagggttttacataaatatgatgtaacttcttatttgttgattttactaattagatgatacttttcagtgaagttattgtcttttgggattacttgaatcaacccaatagctcttgcaccattttaacccagtaataatcgtttgtttttgctttcttgcagatttaattgaatttttcactg

SEQ ID NO: 5112 - DNA, 3000 bp, Unknown
  misc_feature (1)..( 3000): cDNA_ID_1827508_gDNA_ID_1620763_Annot_ID_167247 3000 nt of promoter + ATG
taatttgattttttctttaaaacatatacattttcttattcaaaacaacaaaataaggccggtattattatataagaaaagaaagacaggtaaagcgggttgggtaacaagagatgaagcaggcctttttgttagtgcaggacaagctagaggacgaaccaacaacagtgcaatcgagaacgaatttcaagcccttatatttgcaatgcagaactgctggagtcatggatatacaagagtctgcttcgaaggagataacatggagctgctgaaaattctcaatgatggaaaggcacgatttgatctgtataattgggttagagaagttcaggcatggagaaatcgatttcgagagtgtaaattcacatgggtcactcggatgacaaacaaacctgcagatctgctagccaaagctcacttgtttcgagaagaacattttaaattttactctactataccacctgtaatttacacagcattacgatttgattacaattcttcataatatcaataaaatgaagatgttaaaaaaaaaaaaaaagaaaagaaagacagaaacgagtctcgtcactcgcggtctcactaatccgtctaacagtctctctcaatctcaaatcgttttaacgataagtctctccgacgaagaagaaatcgaaaaagagtactaagtcgttttaactatcgtgatccaacgaaacagagatgactctctccgacgaccctatatctccatcgactcaagaatcatcaaattcttcttacgtgcgatccaaggaagcggagaagaatagtccgagccaagaaacagatgaagaagtcttgaagggatatgaatcgtacagggaaaacccaagtaactacgacaatgataatatccttatatacacagacacgttcaatctttatgatgacatgttcgaaggtacgttctttcatcacaaattatgtataagacattgcgcaggaataaaaaaaactatattaatacctttacttcttgggtgttgcaggttctcttgattctacaaggaactttggtgcacaaaaagatcctaatgtgctcgtgatgcaaaggctgttacacaactccggaagtctaattggtgttgacatggaacaagatggcatagatttagctacattgttcgctgattctactgaagattcgaagcttccttatgttatctatgagggtttagaaatgcagggtaagtaaaagtcttcccttgtcagattttgacttccttgtgagtttattatatgtttgtttatcggtttaggtgaaggatatggcacaaacactcgtggccctttcgaaaacaagattgatattggttcttttggaaagagtgggtcggtgatgaacgtagaaagagagaaagaaaagattgtgatgatccctaccccaagatttggcaacgcaacaccacaatggaccataaagaagaaactgagctcgtacgatattaggcctcgttgtggcagacttattctgcaaagtagctcctttaatgagcacattggaagacatttacctaaagaccaaatgataaaaattaatgtcggagtcaatgttaacgtatatgactacgacacgggcacattgcatgagctgcgtctggaatatcagaggcaatatggtctagcgcatggctggcaagaagattttgtccgcaggagacacttgaagcaaaaagacgagattggactcttatgggatttttcttcttctaggcttcaatttggcgtcatttctaggaacacgggacccggactctgggagaccaaagactaagagttccaattagaaacgcatatgtacttttttcttcttttctcaaacaattattggcatttttgcttatgaaaggtttttgtgtagccaaattgagattttgatggttttgacacaatcaatgtatgatatcaaatcattaaaaccactttattatctctcttatgtgtttcttacagccacttttatcattctctcttttatcaaaagataaaatgttctcaaaccctaaaccctatgcattttaagagttacaagacaaaatcttaagagtaattacacagaagactgagccaaaattttgacaaaagttttttatttaacaaaatttttacaaaaatgagattcattagaccatgtacatgggtgatatttctagagtatcacaagtccaaaaattattttaacaaaataattagaatgaggttgattagtattagtccaatgatatttgtgataccagtatcatctgacgtggctttttctaattggtcacatttaccaaaataaaaaaataatatatataattattaaacaaatattataaataatactaaaaaattttttaatgatactttgtgagtacatctatgaacatgctcttaaagtcacaaagatatatgcattacccgtagatgctcctgtaaccgtcggatttgtgttttagtcctctgttgtctttgcgtttttgcgttagtttgcggagaagctgtaggcgctttatcgagaggttttgtgtacgggcttctgctaaggtttgctcgtggcaactaggatgggactccaactctttggtatcttcgagttgtggaaatcacgcaaatttccgagtttagcttctcggaatcggtgtttcttctcttatttccgcttttggttaacgttaaccactattgctgtttgtttttgtctgtgtcttctgtagatttatttttccgctacatgtattccgtgtaacttctgttacaacttcgaaaatggtataaatacttaacattgataccaaaaaaataaaataaataaataatctgtttttatgtattaatcactaattaaaatggtgggccatcaaataaaaaattcaaataatattatttgtccgtgttgttgttggcttgttggtgtttgctatgtgaagtcaaaagatgtgtgatggaaagaaagaaaaaaacataactttgctcaaaaagatcgatcgagatatg

SEQ ID NO: 5113 - DNA, 3000 bp, Unknown; identical to SEQ ID NO: 5107
  misc_feature (1)..( 3000): cDNA_ID_1827518_gDNA_ID_1620763_Annot_ID_167242 3000 nt of promoter + ATG

SEQ ID NO: 5114 - DNA, 3000 bp, Unknown; identical to SEQ ID NO: 5106
  misc_feature (1)..( 3000): cDNA_ID_4254642_gDNA_ID_1620763_Annot_ID_167240 3000 nt of promoter + ATG

SEQ ID NO: 5115 - DNA, 3000 bp, Unknown
  misc_feature (1)..( 3000): cDNA_ID_2131647_gDNA_ID_1620763_Annot_ID_167229 3000 nt of promoter + ATG
attttatgtaatttattacatggccctacttttattatgggttagtatatctgattattgcaaaaataaaagcatttgcaatgttgcccaccaaaaaccctaaccctagtcccttatctgattctccagatttcaatcaaagccacttggattcgataatctcctccttggttacatttctggattctccatctctctccataagctcctccttcgagtacttgatcatcttctctcctctaatgatgaatttgttcaagatcaactcaaacgacaaacgcttttgggcgagtttatggataagttttaatcagttatattatttgaaaaaaccagaataattttttattgatatgaagcactatagaatatcatcttttgaatctctacctagctagagcctggtctcttatctcggaacaatcttcagattcaaaccactctatgagtttggctccatctagctaagtcatgtgctttaataatgcttctcaaagcaaaagatggtgtgcatggtttccatataaagatgtattaaattcttcttaaacataatcctttgagagattctccctccgtcctgattcaagccggtaatcttgaaagatatgattgacaactttaattaacctcttcttagatggtttgatagaaaaatataatgtcacgctgatgaaggtgataggacaaatatcaccaaaaagttggccactaatgagcaatccataagagacataggttatatgaaacataatccattggatccatctttctgcatgccccaacttcttcatattttctcaacaaaggtcccccattataacctgtcataaccgtttatcattccgatttgatttgaggcaatgtgacctttgtatgcagtagagcatggagagctaccaaaatattatcagaaaaagaactctcggtcataacatctggtctagtgcatgagccatctcaaacactgccttcatctctgatatggagactggtttgatcagttgatcattcttctcggtcgcctcttcaggctctagacctctcaaaatcccaaacatcactctcatctgggcactcacaatcttagtggataaaaagttagagaagtacttgcagtccattacacccgtctcctctttcttatatctcttcagattgatatctttatcaatgaggtagtgaattatgttgttttatcttctctatttttttacaacatgaaagagttttatagtttgtctccatctttcagtaaagtggcaatactattttgtgtccatggaagagttgagatgcatgtgactagtctgtaaaatggacggcgataatagttttttcttgaaagatatcagagagtttctttctttttttcattggttttacacttttagaaactcctatcgcattatcgcatagttcgacaacttctgttaaattcttgatccaaatacaaagatgaatcaatccattagtcaagagctacaagagtatccattagtcacatattatatatttgttctgattcaaatgttctcaagatcaacaaataacacaaatgcatgaactcatcaaacacatttctttttcatgtcccagtttctatatttgttatgcatcaaaatgttctcaagatacacaaaatgcaagaatccatcaaagactagaagaaaggttgattcttaatttcttgttcatatcccaaaatcaaacaagatgcaaattcaaaacctaaatgattatttacaacaatatttctaaattcttcaattcatatccagataggtatacttttaatgaagctgaaagaagaaagatcagttgttacaattgtagccaaatctgttttttttagctaaatctagatgaatattgaataataatcactatcaaatttagtggttttggttgtaaattcaactaaaaaatttcgtggacatatttattttgctgtttttacgtaaagatttgttaagtccttttaaatcctaaaacaatgttctgccttagttaaagtgatcttgtcctcaaattccattgttttcctttcccaatgtcttgaggtctccaccaaaactatgccatcagagcagtgatcttctgaaaattggtagtggagatcttaaaagaagacatagagtgtaagttgggcgagggcttaaggccacttagtagaactgttctcttatcctcagaaattgaatgtccaaatgtgatgcttgactttgacagattcaccttctgtcctaattcaagctggtaatatttgaggatttgattgacgactttaacctcctctgggatggcttaacagaaaaaataagttcacacttatgaaaatgtaagtattagggatattgtcccacattgaaacttgagtaggatctaagtgatatatataagatataagcatctccactcaaaatcaattggcaatgagtggagaggctcatattctatataccacttaagatcctactcaatgttcaataataccatataactgcaaatctgatatttcgtaagagaactaaacatatggaatcagattgtcatcaagtgaatgacgttgttcaagacaaactcaatactactaaacacatttctaccaataacaaaatcaaatgagagatctaacttttaagagtgatcataaagaggttatttcttaatcttaatcatcatattgtttgagtttgattataaattcagatcaaaagatttcgtggacatgtttaatttgggtaaatatcttgtaacgatagatatggattgacagtaattaattaggatataaaaaattactatccaaatttgaaaaaatttatgcataattttgagaaactttgtataatacatagaaagaaatctttttttttggtgaacatacatagaaagtaatcttatgtagtttattacaggaccccacttttttaatgggtaagtataaataaaatagttggaaaatctgattattgcaaaacaaaagcctttgaaatg

SEQ ID NO: 5116 - DNA, 3000 bp, Unknown; identical to SEQ ID NO: 5103
  misc_feature (1)..( 3000): cDNA_ID_1012102_gDNA_ID_1620763_Annot_ID_167228 3000 nt of promoter + ATG

SEQ ID NO: 5117 - DNA, 3000 bp, Unknown; identical to SEQ ID NO: 5112
  misc_feature (1)..( 3000): cDNA_ID_1827508_gDNA_ID_1620763_Annot_ID_50066 3000 nt of promoter + ATG

SEQ ID NO: 5118 - DNA, 3000 bp, Unknown; identical to SEQ ID NO: 5111
  misc_feature (1)..( 3000): cDNA_ID_1827500_gDNA_ID_1620763_Annot_ID_50068 3000 nt of promoter + ATG

SEQ ID NO: 5119 - DNA, 3000 bp, Unknown
  misc_feature (1)..( 3000): cDNA_ID_1827496_gDNA_ID_1620763_Annot_ID_50070 3000 nt of promoter + ATG
atatattattcaacctataaagaaataatatgtgtacaatgtcccacatcgcttaaaaaaattgcacaatggttcagacccatattataaaaggaccaaaatgattctaattacgaatgagcaggaagcttgatttatcaggcgtccaaaattaaaatagttatccgattttactcggattttttattttaaagaattgaaactttaaaatgtttcaagaaattataaatattataacttttatcaaaagttaaatattataatttaaattttttttataaagtttatctttaaaaaatgctttaaatatttataattttaaaacttataacgttttaaaaattataaattaaattttacaagaaatttaaatattataaatatataaaaaatatattaatacgagacgatatattataggaaaaatcttaaatataacagtcaaaattcaatgatgaattttgggtcgatattgtattttttgaagtttcaaattttataatattgaaatttataagaaaatgacaaaattatgtttaatttcacgggactaggttatatggtaggacgggtttgggtggataataattacgattttacaatgtccaacatcgcttaaaaaaattggacaatggtcaagagccatactataaaaaggaccaaaatgatttcgattacgaatgagcatgaaacttgatttatgaggtgtccaaaatttaaatggtttgtttactagggttatttattttaaaaaattgaaactttaaaaagtttaaaaaattataaattaaattttacaagaaatttaaacaatataaaagatattaatacgggacgatatactgcgagagaaatcttagatataacactcaaaattaaatgatgaagtttgggtcaatattaatctttttttgaagtttctaattttataaatatttgaaatttataataaaatgacaaatttgtgtttaatttcacgggacggggttatatggtgtgacgggtttgagtggataataacatgggatagtatgctatagaaaaaacatataataacaatcataatataattatataatcttaaacactaaaaaaaattaacaatattataaaaaaaaaacttaaaactttaatttttttaaaacacattttgattcttttataagaaatttaaacattataaatatttaaactttatactacgggtgaaattttagaattgactgtttgggttgataagaatttgcgatagaactaggagttaaatcctagaatgacaatcaaaatatagttatacaattaaatattaccacgagtgaaatcctagaattgacgagtttgaatcgatattaatatgggatggtgtactgcgggtgatattttagaattgattggtttgggttgataataatttgcgatagaattaggagtgaaatcctaaaatgacaattaaaatataattatacaattaaatactaccacgggtgaaatcctagaattgacgggcttgattcgatattaatatgggatggtgtactacgagtgatattttagaattgactggtttgggttgataataatttgcgatagaattaggagtgaaatcctagaatgacaattaaaatacaattatacaattaaatactatcacgggtgaaatcttagaattgacgggtttgattcgatattaatatgggatggtgtactacgggtgaaatctgataaacaacaatcaaaatacaattatacaatattaaacatttaacaaaataaacaaatacaactttaaactttaaaatttgagttataaaatttcgtcacgcggtgaattatacatttaaatcaaacaatagcataaatttattaaatcatcctaaaaaatattcaattattttttatttaataaaaatattggcccgcggtatactgtgggttaatatctagtaaatatatatttctaatgcattttttctttaaatccatgagaattgttttttgaaaatctataaagtatttttcaaaataaatcttaacacaaattgatagtatataattctaaagttttaaaaggcatcacaaaccaataacacctcctaaattgcaattcaaatccaacataaataaagtcctgaaactgatatcatcaatataatatttccagtaattattttctatacctacacttttttaatagttgtatttgctatataattattttattttcgatttcgaagattcgaataattacgagtcggcgggtggacaatccgtcaacggtttactccgttctatttttgagaacaaatcaaatttttaatgtaaaagtggtcaattattggttcgtagtaattttcttttattttttttggtcagtactactacggactttaatttataaatggtaaatcaaaagcggttaaatttaatagatgtattcatttcaaccaagttaaaaagcctcaaatttatttactaattaaatcaatctaaattgtatatacatatattcttttcaatgttacaatgttaccaacttagatattagtgtatatgtactaactttttaattcaggattcatttgcattttcgcaacattcactcacacgagtaaggcacgtgagatatgttctccaaaattttaattacagaaaatcaaaaacaaaattcgaacgagaagcagaaaaaatcggagaatcggaggaagaagatgaaatgtcgttggagaagaagaacaacgtcaatggcgccattttctctcgtcttctcctcttttcccggaatttcagtttctcacagtcaatcgccaattcgattttctcgggaaactgtcagagaaaaaacaaaaaaacaaatcgcctcctccaatctctggtaactcagacactgaaaaaacctgagatttcatcttcttttgaataaaattttgtactttttggtgatctctttaacaggatttgttgaacatttttggttgaaattgcgttgttaaagagaagaag

SEQ ID NO: 5120 - DNA, 3000 bp, Unknown; identical to SEQ ID NO: 5109
  misc_feature (1)..( 3000): cDNA_ID_4257535_gDNA_ID_1620763_Annot_ID_50073 3000 nt of promoter + ATG

SEQ ID NO: 5121 - DNA, 3000 bp, Unknown
  misc_feature (1)..( 3000): cDNA_ID_1827594_gDNA_ID_1620764_Annot_ID_50074 3000 nt of promoter + ATG
gtattgggtttgactaaaaaaaaaaaaaaaaaaaaaaagtacggtacgttgacaatccgttggtgaaaacttagagcaagtcaagtaagggtttttagtagatttcttagatgggtttttatgtaaaaatgggcccagataatagaaaaacagctgaatccatttaggatcgttcctaaaattagtttttcgcgacccaatagaaactcatacgtgacctcattttattgggtaaactgaatgacaaaaccaaaaaaaaaaaaccacacgcgtttatttatttcttcttcttcttcttcgcctacggagacaccaaagacgattggaatcgacgctgaagatctagtgatttgttcatgaaatcatgaaaaatcatccacctaaacgagtgtttcaaccaacgggatgatgatcgagctagattttgttccccaaatcgattcttctaaccaaatcgacgagaggtgcttggacttgcaaaagaagaagatatctcaagtctctaaaaagaaggtacatgttatcaacttgtattatgagaagatttatctatctatgaaagtgtgttccgtcttgcattgctggtagcctctgaatacaaagcttccaaattaaatgaatatctgcttgtttcgtcattgttaatggtcatttagctaagtagaataaaagaaagatttttgctaactaatggaaacatttcagaatttaggtgcaaatgtaagaatagtacgaaccaagcttgaaaaatagtgttgttatcatagacgaggctcacaatttggctgacacttttctcagtatgcacgatgcaaaactaacagtggcacatatataaatttcagtttcatcagctttctgagcacatgttgtttggatggacttttgcattgctattgggtcctctgtttcaggccatatgtggagtcatgtttttaaatgatttgtattgcagttggaggatatacactgcagcatagagagttatctgggaagattccagaatctcttgagagctggaaacatgagatatatccaaattatgttgattctcacccgagctttcctcaaacctcttgctagtgataggaatctgaaggaaagcaatatctgaattggttcttaatattttcccctttcgtgatcatgttgaagctgttctcttcctgcagtttcttaaagatgagcttgatgcaagctcagaagtcatagagccttgtaatagcaaggtatgtgtcttcttgtacaacacaactcgtgtgatttatacacacaagcttggcgtgctctttggaatgtattatatcattggcaaccaatttgtttgtttgtgaccattttcaataattttggaccacatttaattagcccctaaaacttcctttcattttctggttttatgttgaagcagaagagcctttctttatctttttataatcgacatgaagctgtttcaagctttgcttgagttcaagtctcaagtttctggaaacaacaagagagaggtcatggcttcatggaatcactcctccacattttgtaattggattggagtcacatttaaaattttataattcctaataataatcatgtttaatcaaataaaaatatcaacaatttttttttttttcaatttttttttgttttagaaaccaacttaaaagattccaccaatggaccataaaattttcaaaaactctaaaaaatctctaaactacaaaactatccaaatttattaataaaaaatacatagaaactttgtttagaaactaatcactggacttgctcttagttgtcatgtgtaatgccgaaaggaaagcgctacaaggagtttcagccctatccatatacgtaaataccaatgtttttacaagattctgttggcaacaaagaaaaaaaacaaagggaagaagatgtataaaccaaagctgttttattttgtctcttgtccaaatgtaactaaatttttgttgggccatatctcaaaagaagtagaatgatataatattgggctttccatgggccttatataaacaaacaaccttgtaaatcgggtttggaactcatctcgcaagggctagccaagcagtacacgtagcgggtcggatccaccattttacgacagtagtacaaacatcgatttggcgcaaaagaaaccaaaaaaaaaaagacacatagtaattggtgtcgtcgcatgaacattcatcctttacccgacaaacacaataaaaaatctgacttttttgtttaaactcttttataaaaaagaataaaaaagtttcgttgaatccctcaaaactttttggttccttacaatcgtcatttgtaactttcccagatcctctcccttttattgcatctctgttcttttagctcagggtttgtctgtcgtgcaaaaagcaaaccctaaatcaaatctgggtttcgtctatctgattcgtcagatctaaagtctcaaggcccaccatcgtcttctttttttgaactctctgctctgctttgctctgcctttggttttctttttttccatttcgaggtaatgtatgttgttatggtaaagttttgttattttcgctaatctttgacatttcatttatgtaatttttatttggctcagattgggattttagcttttgacctaattttgttgtcggagacgactttatgtagctctagtttaaattcgttatcaagattcttgctttaatgtccgaacagagatatctacattttattttctcttactttggttactgtgttgattattctatatgagatgaacactctagtgttaatcgaaattgaaaagtttgcatcttttcatctgcagctgcttggttggctttgaggtttcacttcaaagagtttgcatctgctaatgtagacaagttttcgtggagatatgagatttccaacaaatagtcccctactggttcaggatatcattgtcctgaaaacaaacatccaaagttttagaaggtgatgtgagttctccatatg

SEQ ID NO: 5122 - DNA, 3000 bp, Unknown
  misc_feature (1)..( 3000): cDNA_ID_1807073_gDNA_ID_1620764_Annot_ID_50077 3000 nt of promoter + ATG
gaactgtacaacatacaagatttgcctatatctttcttggatacgttgcttcagtttgctatacttatggtgtactaattcatgagtgttgctttcaatcccaactacctcaacttgacaattaaaagaacacataagagcaagtagaaagagcatcatgaatatgttcaacgaatcctaatccggctttccttcttaaaacctcaaagttgactacaagattcataaaccattgactttccatatgcaatgtactactactactagcaagaatcaagatcaaatccaggaaaacaaaacaatattctaattcctcactatctttctagatctcaaagcttagggatcccaaattcgatccttattggaagactcaaatcacagacacaaattgttaaatttccacaagaatggttcctctgaacctgacattatcatttctcattgaaacaaccaattcacgtgccctccatagatactaactcacagatactagctcagagaccaaggaagtcaattgatagaagaaaatctgaagttatctatagtttctatgtgaacatcacccatttaaatcgttggagctaacacactatcaaatcaagaacaatttaaaatagagattaaaaagggagaactgaactggtggtctgagagaagacagcgagacgaagagcccaaatgttgaagaaaccaaaccaaacagaagctagtctcagtgaaccaaccaccattaaccaataccccaacgccttcatctccctcttcttccttcgtttactccttcctcgttatccaacaataccctaacgcatatattttccgttttaaaaccagaaaactatgagactgacaccaaaaaaaaacgtaaactcagattcggcggaaagattccccgatcagaacacgtaagccacggaggttaatttcgtacatttcagttagttctcaaaccaccggagaaactgtttgatgggccgacaatagttggagtctccgccgaattcgattattatttaattcagtgggtttcaaatgggcttttcaattgggcttctgtaatattctgatggacttctctacagttactactgtaaaaacaaaaatatggtttacgtaattttgtgttgctgaggcaagaagaagacatttccttcatcctctataaatgaatgtcattaaaaaacaaaaaaagcagaaaaaatacagctatcatccacgatcctcgttcagctacttatctaaacaaatactactactatataaaaaagaaattgaatctaagttgtcgtaaacgtgcacgcatatctctcgcccaatccccaaagaattctactttatttttattttattgactcgcacgcattatttaatttcttaatttagaaattttgtattctatataatacagaagctgcattctcagagcgaatagagtggtgagtttacctttgcagtagaagaaaaggtgactatttgatgtcatttttaaatgacggttcctcgaaactttaaaacaccttactaatttcatactgtacacaaatgtagaaaagttttgtggctctaaaaagtgtttgtttccttatttgatcaaacttttgtttctaggtgaatgtagaaaagttagaccgatggctattaataaccaaagacaattcaagaatactttgtggaaaataaccaagaacacttcactatggtgtaaataatgttaggaagtttatcattccaaaactcatgcacatgaagaaaatttaaatgtttcgtagtgttcatctttcatcactgttagcaaatacattggaaactagctacgccaattatgaaacggaactaaaaataaaataaatttaacagaagaaaaaagaaatctcttaatctgaataaaatgtgtgttaaggaaaaaccagaaaactatgagactgacacgaaaacgtgagttccgcatagaggcggaaagattctccccgatcaaggcactaatcagagcctcgaatgtacacgtaagcatcaagggtaatttcgtaaacttcaaagaagtggagccctatgtttttgtgtggttggtcacttatcaggtagagagagaaaccaaacaaaagaaaattacgtcaacctctctccgacctggcacttcttcgccagcctgttcccagctgtgctccaatgtcttttaattttctctaccagccctcaactaactctaaatttcggatttaccctttatccgtacgtattttaaatactcaaaacaaattgtttaaaaactttcaaatgtttaccaaagaaacattatttgccaaaataagcgtcacattcgagcagagagttacccaatctacatcattgttacgattaccggatgtttagccacaatttagggggctacttgaaataaaaaagaattagggacaaattttctcatttaattctttttttatgagagaataatggaatattcatgctctaataacaaactctttacaacatgacttatagttatagaatgtaattaaaaattattcaaatgattttttcatcggtggatgtagcttaaccgtctatattaatgaaaaaggggattaaagaacaaaattaaaaaggtttggtaccaatattaaagttgtggtataataaaggcgaattggacaatttaggaaaatacagcaaacgaaaggagggaatgcaaaaatgggaaaaatgtaaattgtgcttgcttgtttgtctccacttaaaaaccagagacatacacagaaagaccaagaagacgactgcttcctccaatggttaggtcgtgaatacggcgccattaaaacgctgcgttttatcgtcgtcacctccttttcctttgcctaattcccctaagtcatcgtctcttgaacggttcctgccattaatgtcgaactcttcctaaaccctttttgttcacatttccttctctttctcttcctccgtctctctctgaaaaaccctaattgactcgttgcgattgaaatg

SEQ ID NO: 5123 - DNA, 3000 bp, Unknown
  misc_feature (1)..( 3000): cDNA_ID_1827575_gDNA_ID_1620764_Annot_ID_50080 3000 nt of promoter + ATG
tattgtgagcgagaaatctttgcagcgttcctctgaaactaacatcaactcgttcccagctcagttttgttaattctcttatcatctcctctgcataagtttgttgtattatgatgactagaaatcaagaataagaaacacgagaatgagttttccactgaaccaaccttccatatctaagttcttgaacctgtctgctttggtccttgaatgatcttcctcatagttacttgcagtatccggtgcttcaacattcacaatgtgaggatacttctcattgactggaccacgttgaagctgcgaaggttatatcattatatgtgagacttgattcagcataacatacacagcattatcttattaaacactgaaagtgaaaggtttaaccttaggaagctcattgtgacgccggatagacgatgtactccacccaacaaggtctaagaacaaaggaggtcaaggtttcaaatgaattgtaatagccacaacagttctgagtcttttttttaagctcaattcacattgtccgatcagtgaagaagtagagaattagtttaaagacgtccaacaaagaaaggatacggtcgaaacttgtattcgcgtaagcaatacgccgtttgaagcattgcaaagcagaactgttcacaaaagcagaggagacattagaaatcatttgaactacgcaaaagcctcaatcagctatatatagaaaaatcattgaaggaactcacatgaatttaagatctctagaatctttaaccatccggaggagtaatggaggctttccaccatcactatcagccagaaaaagatgttttcccgttttaccaagacaacccgacatacgcgtagctaatctctccaaagtgtaagatccagaaaacaatgggacctaatgcagtcaaaatgccacaccattaaccaaattgtaacttttcatgttgcaaaattccacaaactgtatcaactatcaagcttacaggagaatgaggcataaaaggatctcaactttgctgtaaacatattgacagcttcaatgtaagaaaaccgttttcaaatcacctgtttatgtcctcttgaaccaaggtgtggtgttgcagaagttataaaatacacaggctctaatccagcgattcttgctttcggttcctctatcgagcatttatcaccaatgtcgtcactattatgtggaagctcttctcgggattcttgctcataaagacgcccaatagcatacctagcaatcaggccacctaaagaatgtcctacaaaggaaatcttctgaagacttgggtgacgtttgatcaccgacctaacctaaacaaaagagattaagaatatcacttgagctggaaaactcaagcagagacaaagatagaaacttctacataaaaggttctagcattgcgaaaacatctagccaagcggaagacaatataacattagatagaaacaacgctgaaatataagcagcctaaagataagaaacacaaacctcttcagctaatctttctcccataacatcaacaccatcaaatgtctgtgtggaatggttgcgtttactgcctgcaaaatgattataaagtatcacaagccattatttaaaaactattataaaaatccagtaaagtgagatcaaaatatctaaagtgtgattctttcttccttccaataatcaatctgtttcacttgagacttccaatcacaaatttactatagaccattaggaggaaactctgttttaattgaaaaaatatagagaaagaagaactcacagtgaacgaggagatcctgaggatacttcttaagcatctgcttagcggcgaatctccaattctgagcactgtacccacacacaaaatttaaaatcagcttaaaatagaacaaaatcaagcacataacataggaaacactaagaacctgccgatgagaccgttgaccatgacgactaggtgagtcggctcagtgcgttcgccagggaaatcaacagtcaaatcgacgtttccactttcgtctgattcagctctgagacaacccatccaatactttttcttcttcttcttcgtctctttatcatcactcttcctgcttctcatcttcttcatcttctttggcttacggattccttcaagatcacttccaacacgcccatctccttctgtattcttaggaatcacgctatcttcttcctccatgatcacgaaacgaagaatgaaaaatggaaactttatgcaggtgttaattcaaggtcgccactttgggaagattcgaaggtctcgcgtaggtttttatagacttcaaacatcaaaagttcaaatggtcagagagaaacagagaatagtttcagtcgttagggaaagtccccacagaagtatttgttgtcgtcgttgaaacgccattgacattttctttcttacacatctgagatttggacactgttgctttttctagaacacaacacatgttatataaagtcattaacttgattaaatgagccaaaaatgtgatttggcataagttaaaaagcatattcagacatgatgatgataattaagattatttttatataataactttaaaagacaggcccggcccatttaatgtcaaagattggatccaagttttgcccagagaaaaggaagcttcatgaatcatgagtttgtttcttcttctggaagagtcaaacaacaattttgacttttttatcagcaaccacaacgtcgaaagcacgacatgaatcattaaaaaaaaaaaaaaaaaccgacgagatttttgtacctttcttctccgaagtgttgctgattgatgtctgttggatttctctttcttcaactaatcacctttctgtgtcctctcgcttctctcttctcttctttcccattcaaaggtgagatttttaatttgactttttttttttgggttgacccatttcgaatttttatcatctactggttaatgttgttgatttgattatatccgaatttagtacaggctaagctc

SEQ ID NO: 5124 - DNA, 3000 bp, Unknown
  misc_feature (1)..( 3000): cDNA_ID_1827571_gDNA_ID_1620764_Annot_ID_50082 3000 nt of promoter + ATG
ttttttttttattaggttcctcctccgggcaaaggctcgttgtatctcagaccgttgttgttcggaagtggagcaagcttgggtgtggctgcagcatcagagtacacgtttcttgtgtttggctctcctgttcaaaactacttcaaggtcttaatcgccttgaagaggtattcttgttttctttgtagcaaagagtcttggtcttaaatttgattgcttgtataggaaggcacagcggcgttgaacctgtatgtggaggaggtgattccacgcgcttatcttggaggaactggtggtgtaaaggcaatatccaattacggtccagtaagtttaaacactcatcctatatagtttcaagtactaagcaaggtgtttcgttccaaagtaagtgttaattgttttggtgattaactgtgaaaggtgcttgaagtgatgagaagagcaaaatcaagagggttttcggatgttttgtatcttgatgcagatactgggaagaacatagaagaagtctctgctgctaatatattccttgtgaaggttaacaaacactctatttaagacaaaagtggaagggattttttttgttctaatgatgctgttgtatactaattgaagtttattgagtctttcagggcaatacaatagtgacaccagctacgagcggaacgattctcggagggatcacacgtaagagcataatcgaaatcgcccttgatcttggttacaaagttagtagttattccacgtcttttttcttctaacaccgtttccaatcttgagtcaaaaaacagagcaatactctgtttcaaaataggaatacttttgatgcatggaagttttgataagtgtgtaatggactcaggtggaagaacgaagtgttccggtagaagaactgaaggaagctgaagaagttttctgcactggaactgccgctggagttgcttctgttggaagcatcacttttaagaacacaaggtctcttcttcctctctggatacatgtatacatatgcttagaattttacatttatctgttgataaataatctgcaggactgagtacaaagttggagatgggattgttacacagcaacttcgatctattcttgtcggaatacaaactggttctatccaagacactaaagattgggttttgcagattgcctaagttactttcatatcctataaataatgttgcactctcttgatcacccatcaaaagcttttgaaatagtttttggtaaatttgtgacataaatttgtgatatatcaccacatcgtattagtattaaacatttgtttcactcttccaaagagacaaaagcaaaactaaagaccttcaacttcaaggtcaggatatgtaatctaatggtttgtctttgtggcattttgccaccattggttcaaaataccattgctgtatgatcagcctcctcagattctatttgccagactctacggcggtatattcgcttttagaaaaaaaacaattttgtcgaaacttttttttttttgtaaatattgtagattccacacacaagactgtctaagattctttgataagacacgacaaatgcgatttaagatttttcaaagaaatgaggttcgttgattgttccactaggtttggtatatttataatttgaatttttttttttaaagatatttataagaaaacgaaggagtgtgctcgcgtcaagtgtgtactaatagtcgatgacactagtgatacgacgatactggaaagggacatcaatattcattagtaagccatcttagcaaaaacgttgttatcagataagaaaagttctcagactgacgtggctgtcaatctccacaacgtgtttatctcccatttgggtagttacggacaaagacgttgaaaagacaacaatatggtctaaaagattgacatggaaagaaaattgtttatccgacaaagacctcttggtccaacgtggctttcacatcactagtttactatttcacatctcatggaaaattactgaaattagtacttgtctgtattttgttttttcgtcaagtatttgtttgtatactttaggtaattgcgtgccgaagaaacattgctaaattgatatttataccaacttacaatagtttacagttcaaaaatagaaatctccattttgaagatacaccactaattttcttcatttatttaccccataagagaacgagaaaagaacaatagtccgttgatttcgttaaaatctagtttcagaaagacacgtctagatctgtctgatcagggcagatagacacaagtgacgaagcaaaagaaacacaaaaataagataagaactcttaccactaaaagataaaaataagaaaaaaaataaaacaaattcaacgatttgccaagataaaagcagacactgtacataagctccgcattcacttacgtgttggatacttaatttgacactcttctttgtgttttctcttccaccttctttttcggtatatcattcaacaaaattctctcttcatttctttattttgttgttttttttattattattgaaatcaagagaattaaaacagaggctctgcaaaagaagatgatcaaaacaatcacatctctacgcaaaactctggttctacctcttcatttacatattcgtacggtataaactggattcttacaatctaatgatgattacttacttagagacataactcggatctcagatacaaacatgttttatgttctgttttttttgtcctgatgaaatagctacaaactttcgccaagtacaacgcacaagctgcatcggctttgcgagaagagcgtaagaaacctctttatcagtaagttctctttttcatgatccagccaggtcatatagatattttgttaccattggaaaaagctctgtttcaaatttgttgtaattgtatcatatagaaatggagatgatgtatatgcggatttggattgggataatctcgggtttggtctaaatccagctgattac

SEQ ID NO: 5125 - DNA, 3000 bp, Unknown
  misc_feature (1)..( 3000): cDNA_ID_3075744_gDNA_ID_1620764_Annot_ID_167292 3000 nt of promoter + ATG
gacaagctgatgtggtaacctacgaaacatattactcattacatgtttggaacgaaaattaaacttcacatcaaatgctctttctctgttatgcaggttcgtaaacgcaatgtttgcctcaagttctcaggtttagatcctagcgaattgtctggtgcaacggtgaagatcagacagacacgtaacagtttcccactcgggtcatgcatcagtcggagcaatatagataatgaagactttgtcgatttctttcttaacaatttcgattgggcagtgtttggttatgagctgaaatggtactggacagagccagagcaaggaaacttcaattaccgggacgcaaacgagatgatcgaattctgtgagagatacaacataaaaacccgaggccattgcatattctgggaggtagagtccgctattcaaccgtgggtccaacagctgacaggttccaagctggaagcagcagttgagaaccgcgtaacagatcttcttacccgttacaatgggaaatttagacactatgatgtgaacaatgagatgctccacggatcgttctatcgagatcgactagactctgatgcaagagcaaacatgttcaagactgcacacgagttagacccattagcaactctgtttctgaatgaataccacatagaagacggatttgactcgaggtcatcacccgagaagtacataaaactcgtacacaagctgcaaaaaaagggtgcacccgtgggaggaatcgggattcaaggacatataaccagccccgtcggtcacatcgttcgttctgctttagacaagctaagcacactcggattaccgatctggttcacagaacttgatgtgtcctcgactaacgaacatataagaggggatgatctagaggtgatgctatgggaagcctttgctcatccggcagttgaaggagtgatgctttggggattctgggagctgtttatgagcagagaacactcacatttggtgaatgcagatggtgaggttaacgaagctgggaagaggtttctggagatcaaacgcgagtggttgagttttgtggacggagagattgaggatggaggaggattggagtttagaggttatcatgggagttacacagtggaagttgtcacatcagagagtaagtatgtgacgaactttgttgttgacaaaggcaattctccagttgatgtgattatagatctttaacgtttcataatactaaagatctaaacattacaagtctttatctttattttcttctgaagatgggtttttgctgaaatgatagttcttctttatttccgatacttgcatcacaagaaaacattactaccttatttaaacagaaaaattatatgtattaaatttgaatttcatcaaaatatttcaaaagaaaaaaaattaccttatgaaaatgcgtacaaggtttactataagttatcagatgcagtggacgaaagaatatgatccgttagttgagtcgatcattctaataagagcaatcacgaatgatccacaccacctacaatctcatacgtacttgtccagcttcactgcacctaccatatccttaatttagttggcagatattatgtagatatatgtatatttcaacttggtgttctccacaaccacccatacatacaactttcgacaattgatgagacaagtatacaaataggttgggttttaaagcatttagtactatcctaaatagaaacgagaagggatcatttaatgatgaccttgaggaaataaagttggtttgcatttagtttcccattgatatttatgtgaatagtgaccatacgtaactgtaccatacttttatgtttccaccatcagggcaacacaataaaattgaatgccatctaaaacaaagcaaaaagatttactataattattttcttactcatgcatgtactcccaatctcccatagatattttcgaaggtatttttgtggtaacgtacaagtcttggcttcgtaatctaaataccgaaaaagaaaatgcctctaacttcccttcctctctctatatatttcaaccactctctgtctctcttcctctttgtagtttctcaaatattttcttcagagttggcacgacctcattaataataatcttctctacacctatcaataagagatatattttagagtttcactttggtgcacaaacaaagctcgtacaacattcttcgtatatggctcttcgtcgctgcttacctcaatattcaacaacttcatcttatctctccaaggctcgtactttctccaatataccatcatactgttcttttttctttttcttttttctatacagtaaggaaactgtacaacttacataattttattttatttttatgtaatagtaaaaataaaagacatttgctttgtttgtaataacacagatctggggatttcgtatgcatgggaccaaggcagcagcttctgttgtagaagaacatgtctcgggggcagaacggtaacagtaacctccaatcaaattcaacatttgtccgttcttattcattgttaccatttacaagaaatatgcaagaaacaaaatggggaaaaaattaaaggaaataaaaaaaataaaaaatagatgctaaaattgtatacttttagaaaaaatattgcgtgacggaaagcgcttattggtggtggttgcacaatgcagctcaagcccgtgatcgtttcgatggagtaaacaaattttgtaaaaaaaagtgtagtatgttttttttttaaaatcagtaaaaatagtgctttacatttccaaccattaaaagttttaaaccaaaaaaacaaaagtttaaaagttagtgttttgttaggaatatgaatagtccttgtcttggattctagttatcatataagaaaataggcttcaataggcaaaatattcttcctgtgatgcagtgaggatgaagaatatgctgatgtagattgggacaaccttggattcagtcttgtacggacagatttc

SEQ ID NO: 5126 - DNA, 3000 bp, Unknown; identical to SEQ ID NO: 5123
  misc_feature (1)..( 3000): cDNA_ID_3075752_gDNA_ID_1620764_Annot_ID_167290 3000 nt of promoter + ATG

SEQ ID NO: 5127 - DNA, 3000 bp, Unknown
  misc_feature (1)..( 3000): cDNA_ID_1032288_gDNA_ID_1620764_Annot_ID_167282 3000 nt of promoter + ATG
acacatgtcctaaattgagactagttaggcaaaatctaaatgatatcaaatgaacaaaatccttgttcatctgagaaaaaatgtctagaaaactgaaaaatctgtgaaaaacaatgctgataaagacacaaaatgaatttgtttatatgaatccataccaaggtaagatcggacgacgcccatgtaattatagttgcgtgttccggtgatggagtccggcgaacggtaacagtcggcgagcaaggtggacgtgtagtaagtaatgatggcgaaagcgaccaaaactgtggttcctgccacccaaccaagctgtgctatagcccaagccaacgacagcacccctgagcctatgaccgccgtgattatgtgcgcactcgccgtccaaaatgttcccgttctcttctctcgaccatcgtcgtcgacgcttttcacggcggcgtcacccgactccaccgccgagggattgttgtatgcgtccatcattgtgagagaaccactgaaccagaggagagaagagaggggaagagagttattgacagaggtcgtcttattagagtactccctcacaatcacgtacttacatgtattatatacacaaatatcgatgtttatatggaaagagcatctttgtacgttgaatcttatttattaagagaatcttctattacgaggatttatttcttttgactttgattttgaatgtgtaaccactattgcttattccggaaacaaaaattggtccgcatgttgaaaagaggatttacctacattaacgacactacgaataatcgaaattaggtaactgattaaaattagatgagtaaaacagagagatatttccttcagatcttggcctcttgcatagctatatcctctcttctatcttgctcatttatcttctcaaatcctcacatgcacatgattcattaatcgggaaattaaatcattaacattgagttataatgatgtattgatgtgaatctatatatatatattgttgtatcaactaaatattatgatatatctacaacattttgttattagtatcgcatcaaatacaaaattatgtggatttacatgtttgtattatattttactactattttaacggtttacaaaaacatgtaaaccaaaccataaatttcactaatttcaattatgtacgattttgagtcttcattacttcttatcgtttctttcactcttatagtcttatctcacaatccgtaatttgtgcacaattaatgaattcaatgttgtattttgtcgtattaaatatggattttgaccaacataaacctgattttttagtggattattttaaaatatatccacaaaatattccttcgaataaaatcccattctaactatatccataaaatgcccatcccaattgtcgagacagaatcagatatctaaaatgacacataataaatgtcgcatattacaccattaaagtacggtacgttgacctcctacctgactatgaacagctcatcagacagctccctgtgccctcaagtaggggtgtggataaattggtctggttaccggtaaaatctggagagtatacctcaagatcaggttacggggtaacatccttgacagtgctaccaacagctcaggtccgctttaactggcaagcaaacctttggaaactccacactatgccgaagatcaaacttttcctatggaaggcggctgcaggagctctccctgtgggtgcacaactcgtaagaaggcatatatcatcaacttgggattgtgcacgctgtggggctccggagacttccacccacatgctgtttcactgtgattttgcggcacaagtttggaacctagcgcccctccaattgggtcacatccctatcggtacccctattttggaagctcttaacttacttaagaaaaccatcgttctccccccggttgggattcatacagcaaccctcttcccctggatctgttggcacatctggaaagccagaaatcagcttatcttccaaaattctcatttctctgtgatagagactgttacaaaggcggttcaggatgccttagcgtggcaatccgcccaattggcgctcccaaaagttcgtgtagcgaccccccgcccaaactccacaacaactctgactcatgattttctctgctacgtggatgcggcttggcaacaacagagctccctcgctggctctggctgggtgttccaagcaacctcacactcggagaaagaaattaccaccttctcagccggatgccgtcggttcccctcgcccttagcggcggaggcttgggctatcaaatcggcgatgctacatgctttacaactggaaagatccgatctccttgtgttatcggactcaaaatccatagttgatgctttgaactccaatgtctccctcaatgagatatttggccttctagtggaaattcgatctattcgaaacagattccgctctatctcctttcaatttatccctcgcttagttaattcgattgctgatgctgcggctaagctctccctttgtatttctggtaatatcgggcttgacccgggtactcttgtttttgtttgatttggaatggaaagtattgggtttgactaaaaaaaaaaaaaaaaaaaaaaagtacggtacgttgacaatccgttggtgaaaacttagagcaagtcaagtaagggtttttagtagatttcttagatgggtttttatgtaaaaatgggcccagataatagaaaaacagctgaatccatttaggatcgttcctaaaattagtttttcgcgacccaatagaaactcatacgtgacctcattttattgggtaaactgaatgacaaaaccaaaaaaaaaaaaccacacgcgtttatttatttcttcttcttcttcttcgcctacggagacaccaaagacgattggaatcgacgctgaagatctagtgatttgttcatgaaatcatgaaaaatcatccacctaaacgagtgtttcaaccaacgggatg

SEQ ID NO: 5128 - DNA, 3000 bp, Unknown; identical to SEQ ID NO: 5121
  misc_feature (1)..( 3000): cDNA_ID_3075762_gDNA_ID_1620764_Annot_ID_167281 3000 nt of promoter + ATG

SEQ ID NO: 5129 - DNA, 3000 bp, Unknown
  misc_feature (1)..( 3000): cDNA_ID_1827567_gDNA_ID_1620764_Annot_ID_50083 3000 nt of promoter + ATG
ttattgttttgtcttttcttttgtgggtaaattttttgttcgaattatctacgatctcgttgtttgttgattctcctcaatctcctcttcgattttgatcgaatttcataatctgggctttggtttcgctcgctttcttgtttccattgtcgtagtgagttctcttcgcgaatcaaatcctttgattcctctgtttttggtgttctggttttcttaggttctatggaatcgtgggtcgttttagttcaatcataaatgacgattgagttacattatcttatcatcagccacaacttttaagagttgattatattttgatcccgtatctttggttgttccgaacatggaaagttttaggtttttagttttttcatcccttgtctaagtaatcgctgttttacaactgatcaagtggcaagtacgttacttatgcaacttttgagatcagtccttacttgttagagtaaccacaattcatgtttcaatgttaccacatgcttcatggccatatctcttatcctagattatttcttgcttttccttacagatcttttgacgacctaagtttctgctgtgaattgttaaacagccatcagcctgggcttgattagccaaccctgttaaggcagggtttgaactaaaagtgagatagtgagatggatgtctcagcacttttaacgtctgctgggattaatatagcgatatgcgtagtgcttgtatcgctttattccattctacgaaagcagccagccaattattgtgtttactttggtcgattgctttctgacggaagagttaaacgtcatgatcctcgttggtatgagaggttcgcgccctctcctagttggctcgtgaaagcttgggaaaccactgaggaagagatgttggctgctgctggtctggatgctgtggttttcatcaggatggtcatttgcaggttaatgatacttcacctataacatgcttactgtaattgaatagacaagcatggtattttctactgtttctatgttccagcacttgttttatttctatgtggtatttgtgtgtttcgttcttaacaactctcacagttgggttatcgtgttttttttaaactctgcagcattcgtattttctcaatcgtcgcagtcgtttgccttgcctttgtgttacctgttaactattatggacaaaagatggagcacaaggaagtccatttggagtcattgggagtattcacaattgagaaccttaatccacgctcacgatggtaaagtggcggcatataatattaatattatcagataatatgcatagcctgtttttctatctgattatgtttctctgtgcaggagaagatagattgccagtattttgtacaatgaagtgctgatccttgttttactatttttatttccaggctctgggttcattgtctctcattgtacatcatatcctctgcagcatgtgctcttctttactttgtgaggatcttataccttggttcatttcacgcttactgtttctctttattccatcacttcctcatcgttttggtctctcgtctctctctctcaccctgtttatacgtgtttcaccactgtaggagtataagaacatagccaaaaagaggcttgcccatattagtggatctgcctcaaagccaagtcattttactgttcttattcgtgctattcctcagtctcctgaccagtcctacagcgagacagtgagcaaatactttacaaattactatgcaccaagctatgtgtcgcacctaatggtctaccgtgatggcttcattcacagactgatggtatgtgtttttatttatttttgcaacatgctgacttgattatcagtcacttgtctttttgttatgattttgtcggattaggaataaatttttcagctaacaccactgccgctctgcttggttgaccttagcagaataggaatctcctagaatagaaaaaggaagctgtgatagctctatgttccggaatgtgatttaacacttttcacactttacatgtttcttctttctttataaaatgttcaccataacacttcccctgtgttctgtcataaatgcttcttcatttgccaagggcatcaaagattgatgaaataacagaacagtaactttgttgtaaagatttgattgatagtcatgtatcagttaaagatataggaagttctaaggggattatatgattgatccacattcttggagtactgattttgtttttggctcatttgtaacgcttttatttgtagttcatgttatctgatattgaggttcttttgatattacatcagttttttgctttggttatctgatcagcattttgaatggcaatatctttggtaaacaactagtggatggtgtgtgctcatgataacatatagttgaagtgcagtggtctattttggagaacaattgagttaattagattctaatattaattgtgtcactttctattttagaatgagacggagaggatgtgtcaggctataaaacatgtttctcctgatttaagttgtaatccgagtttgaagtcatgcgtcctttgtggacctgcagccacaaattcttttcaaatcatctcgaacgagacagacagtgtcaaaggattggagcttggtgagttgactttgactacgacagaggaagtaaggaattattttcactttgataggtgaactttgtgctgtacatgatataggcatagtgtggggttttacctgttgcatgtcttcacagttttacagctgaaactggagaattgactcttttgttctttactgagatacaaattgagctttagaggtaacactgagacttaggggaacccaaaaaatactacaatgagacgttaatggaccttgaattagtgatacaaagagctttttgtttaaaacctttaaaagctagatctaaaaggaatatatctccattcatgactgcatttgtaaacattgcttaatgaagtatcagcgcctgaaatatgtatg

SEQ ID NO: 5130 - DNA, 3000 bp, Unknown
  misc_feature (1)..( 3000): cDNA_ID_1827563_gDNA_ID_1620764_Annot_ID_50084 3000 nt of promoter + ATG
agctgtgttgtattgttgtaaaaggtactaaaagtctaaaatattctacaatgcgcatgaccggtagaagagtttgaccaagttgaattttgtaaactgccctattaaagaaacaaccaagttggattttgcaaaaagtacataatttctctcttggtaagctatcatggcgacagtggtttggacaacaaagatagttaaacagtttgttgtcatgctaatacagagatgattgaattagtgacttatttgagttgttatacttttttcttccaggcactatggcttcaccggcggttcctctctcttaattggataatgtatttcgcttgcaatcattcagatgcttcacctgaaaccggagagagtattattatgaatgaagaaattgccatcttcattgataatgagatccgtcttctagattcttctatgaccgttccggataccaaatttgaagattttcaagctcaagcattgcatgctgctgtctacacgctatggctgacaaaggtaacagtggtctcttcttgtccaaataaagtcatcaaaaaaattgccactattgtcaatctcacaagtgcagaaaaatagattgggagttttccgtatagcagaacgatagaaatatggttgactttgatttctgatatgcattcgtttataagcagagcattccagtactgtggagaatgctcgaggagaagcttggaacagagaaagtgaagtgtgtactgaacacaattgctcaagagagaccctcgcttctgcatcatttggtgaatgtctgaagaccctccataaattggtgtcaaaccatgtctcaggatctgtttgaattgtttttttttttttttttttttttttttttttctattttcgccgatatagcttaatgagttgattaatgaagaagttggccgagaaatctctgtcatcaagtgttacacgagtcttcgagtggtgtaaccaaacctattaaaaaaatgaatgaaggttatataagcttccaaaaccagatatgtcgtattccgtagagacaaacgagaccgtcacagctatcaaagggaactaagtatattgtgtcctccttcgccttctcccaaggagtagggatcttgaccgatgatgaggaacccaacaccagtgtagttagatgttttatatccggtttacaataatcgtcacgccatatggagaccatgagacaaacgagaccgtcacagctatcaaagggaacgccatatggagaccatgagaacatctggatcacctgattgctgacgctctgtcaactgtctttgttggaagaatggagattcgataattgatttccattgtttagacacggcctttgaatctcagcagagaatccacagcaagtctctctaggatgcactctaccacatcgtggggcagcgattccgtcctcgagcagcgttgtttttacttgtgattgcagactagtccttgttgatgaatatacagagaggcttatttgctttataagcaagtaatctcacaaataaactggaaagaggaaacctatcactcttttacctatttcttatgagctttgaataaagatactgaccgttgggaatatcaaaccgataattatgtaaagatgctaaaccagttatatgcataccgcatcataaagcatgtatcataattcatagtcacacctaataaagagaatcgagttattatatagtcatacataataaagagaatgaatagtcaaatgggcataatttaatatgaccggtccttgttatggggtaggtctcacactctcaccacgcggataatagatatgcgaccttttttaattttcccgggcaaaaactgttgttaactgtcaatgttaattccacgtgtcacaatcgtatcgctttacaaaaatctaacggtcataatttcgccgacaaggtagtcactatcacaggctaaaaagacctttgccgacgagatattagtttgggccattcacgttatgccacgtcacatgatctggcgattccacatttacaccaacgtggagaattttgcccaatgatttttttcagttatctttccgtctagagaaatatcctcaccaaaataataacatgtaatgtgtatacagtatacctaatcaatcattatctttctttaattttgttggattttttgcatattgcaaagtttagaacgcgagcgaattctccgcggaattggggttaaaaggaagaacttttagggtttttgattcttcgggttttctcgtgctttgattcctttcaagtcaaagcaaagcattaccttttctcgtccatgtaagtcagaattgttcaaattattgttttgtcttttcttttgtgggtaaattttttgttcgaattatctacgatctcgttgtttgttgattctcctcaatctcctcttcgattttgatcgaatttcataatctgggctttggtttcgctcgctttcttgtttccattgtcgtagtgagttctcttcgcgaatcaaatcctttgattcctctgtttttggtgttctggttttcttaggttctatggaatcgtgggtcgttttagttcaatcataaatgacgattgagttacattatcttatcatcagccacaacttttaagagttgattatattttgatcccgtatctttggttgttccgaacatggaaagttttaggtttttagttttttcatcccttgtctaagtaatcgctgttttacaactgatcaagtggcaagtacgttacttatgcaacttttgagatcagtccttacttgttagagtaaccacaattcatgtttcaatgttaccacatgcttcatggccatatctcttatcctagattatttcttgcttttccttacagatcttttgacgacctaagtttctgctgtgaattgttaaacagccatcagcctgggcttgattagccaaccctgttaaggcagggtttgaactaaaagtgagatagtgagatg

SEQ ID NO: 5131 - DNA, 3000 bp, Unknown
  misc_feature (1)..( 3000): cDNA_ID_1827546_gDNA_ID_1620764_Annot_ID_50089 3000 nt of promoter + ATG
acttgtcttcttttattttattattttccaaaaataatacttcgctttttagaattactcatactcaatgaaataaaaaacaccacttgaaatcacaaaattgatagttgaaccaaaaaaaaaaaccaaaattgatagttgccttaaaccctcattaactaataaatttttatgcatataacttatagaacacacgtctttaaagttgggatttgggaatatgtgaaaattcaatgtttgaatgatcaaataaaatttcatcatgtaccgtggttgttataagttataactcagatatattatacagctttgtcaaataatactgatgtggaaccccattaatgaaacaagaaactttttttcactttgactttctttcttatttaggcatgaccatgttcgatctgacttcttcttacaaaagcaaggttaaacaaaattttattttatgtttaaacgaacaatatctcagtcatatatattagttgttggtggtaaatcaacttacataaaactttttaatctttttgtactcagaaaaatcgaagatggggtagaaacaagtaaaacaatacgtagttagggtttattgtacgaataactctctctttttttattgtcaacaaaataatcctagattagtacaaaaaacaatatacataataggaggaaacataaggaataaaagggaatcttatataggtcattttagaaaattaataaaacaaaatatgattatatataactcctagtcaagttacagctgttaataaagacttgcagaaagtagagtttcgtagttcataagcatgggataaataccctctaacctaacaacgaacaaatcatttggtcaaaccttttaattatttggtcaaaccccacaatcttgggttgttaactagctgtaacacccaccagatatgaggcctctcgtgtatgtagacatacatgtgttttatgctactataaactcaaaaactgatattatggtcagtattatacgatttttgttctgatctcaaaataaataagtcgggagtagaatactattttctgattaaaaatcctttatctgaaacttcgttgcagatcatttctgttttttccacagtgatataaaaaaagtacacttatgaattatgtatacaaccttgtaataagggatgttcttacaaatgtagttaggttaggaaatatgacttgtttattcaacttggaaatgcttctcatcattgcagacaagcagaagatttaagatccaaccaaattatgataagtgaaacttgcacacaactcctctttctacattactccaataactatgtctatatgggaccagactatattactgtttcactaattaaacgcatataaccactacacattcattagaggcggaaacgtaaaagtaaattatgtagtagtaaattttgtaaacaaaaagaagtaatatcactagtccttaaagttacaagcatcagatcttaaatgtgtacagttgtatagtttaccaactaaccaatgtataaacagaatagtacaatctaatttccgtttcatgtgctgtaaaagaacaatgacacacgtaaaaagtgagcaaaggaatgattaagaaaccttaatggagtaggttaaattaaagacacaggttccttattatactccattttcacttaaattatgttaactttgattagagtgaaaccaattaaagtgagaagatcctgcgaccacgctcgcggactacttatgtggaccctcttttttaactaaaacttacaatggcccacaagaagtggaagtggtccatactcttttatttgcaatgatgtcaagattcctagtatcttaattatgatcgcaaatcatatctttctctctaatctcatcgtttatttctcaaagccataacaatttgctttatctaaaaaagttaagaaaaccgtatagtctagaaaccaaattaatgtcgctggtccaatgatgcatgaagaagtatgataactttggttctcattgatgtcgatgatagactaaatgcatatatatttacgtgaaaagaagtccgaattccacattagaaagtaataaatcttgattgtccataaaaaaaaaagattgattagaaattatatttcttcattaccaagtttatttggttaccagatatatcaacgatcaacaacttttcattagaaaatggggtactactaaaccacagtattaaaaaaaacattcattacataaaaatgatttctcgtgaccaaaaattgttttgtattttaacgaagctgtgtccttttagagaacatatatgatttggaagctccaagtcacacatacacacacgtagtttagagaaaaattgtttgttgacattattaacgataacaaaaatatttgaggatcatgagtggtgacaacgacgttgatttcagattggttagtattcattttcggttacatgcgaaaaaagtggtgaccacggatactacaagcttcacatagaaatatttacgcattgataatgatataatatgtaataacgtgaaatctcttagtggtattagtagaaaaatcatggtccataagccatatctatgacttgtagttacctccttttttctccaacttttttttctttctctagttatttttgagatctgacattataattttaatttcaattttgatgatagtttgaagattttttttttttttttgaatctcacattttaatttaatttgagttttgatgatatatactaaatgggcctcacgtgagggaagaagcctacccgctaattcatgtaaagtgtatctcagcacttgactttcagtctcagcgatcggagacggagaagctcatggaagctgctggcgttacaagttctcatcttctctagtcttttacatttcacctccctttcgtcggcgacccaaatccacgttttgggaattcctccctaaaaatcagaaacccttggcttttccaac

SEQ ID NO: 5132 - DNA, 3000 bp, Unknown
  misc_feature (1)..( 3000): cDNA_ID_1827643_gDNA_ID_1620765_Annot_ID_50092 3000 nt of promoter + ATG
cttgaaagctaaatctgcaaaaatggttgatctcgagcttaacctgtcacctgcgcctagatccatgaagcctagctgctccgctaccctcatcgaccaacgttctcattgggttttagaatcgttggtcccagtgacgaagttgtcgacgaatggatcaaccctaatccatcaaaccaattggtaccgctgtctctcgcctttatctcctccagtgccacatccctcggcggtaactctttcaactccgatcttctgctcgccgtcgtctagccgccacactcaaagtctcatcgcccatgccaaaagaaaactagggttttcggttttgggcctattccagttcggcccatcaagttccttgtcttggcaaattcatttatttgggcctttaaggtgtttgaagcccaactccaataggtgtgatcctaatcaatttctgcaaaaatctaggtttaatcgaaaatcttatttgtccattattagccaacgttggtgtcgatatttgaaaccagtttttcatggacaacaattggaacatattcggtcaatgttgctttgttggtacaattatatctcgagaaccctgcctttcgaagcacctagagagatttttcataaaaccaaaagagtgaagaagaacggcactatgatcccgtctccacagagcggtgattaccgtagctttttcaactcttcatccccgcttcctttgattatcgagctcgttcatgtgcaaatcatcaagttcaaggatagttctcaaatttttaaaagcttgaagaagaacggcattataaccgcatttccatggaaaagtggttaccgtagtattctcaatcttttttatccagcagcctcctctttggaatttgtttctaaaagctcgtatgcattgtttgctcgagccgtctatgaccacccgttggtcgaggatttcgcgaagctcgtcttcttggtcgaatccgctatagtttcaacaaatttttcaaccattgcaaactttttaaaagtgaacatccctttggaaaactcatggaacttgtatctttctttctgttgtattatcgtagcttgtatcaactttcctctcttgaggccttaatgaatgaaagttgtgttttgacaaaaaaaaaatctagtggcagtcatcgtaaataagtcccaactacatgatttatttcacaaaatggctgcaaaaatgtatatgtagatataacgaaagaaatcttatattttcatagaaaattaaaaaagttataaaattagagaaaactctctctaaattaataatttaataaattaatacatctataaattaatagaatgtggcccaacattattaatttatagaggttttatacttgaaaaaaaaaaagaaaaaactcgctaatgcatgcaatcccataatattacacattgatcttgacattctacagattaatgcttcagtttctttaattgttgtgtgaagaccatatatgcactagaaattatgtacaaacagaattttgaaaaaacaaattagtttaagagaatcttgaaagactaaaacatgagtttcaggtaccaaaaaaagaagagatatactctaaaacagattgaagatctgccggaatgtataacagtcagagataacaagcatgtgagaaatttgtaaagctcgggagaatctataaaggaaaactgaggccaagatggaaaccaacaagatcacggtgcatctatctccatgtcgtttgttgacaataggtgttggaagtcattcataattgcttctaaagtatttctacatcttcatctggattcacctttacttccggttcattcatagctgcatcaatgcccataagtggctggagcttcaccaaaggtacgcataagtggttgagttcatcgaaagcttgagttagcgtgacatcatcttcagccttatagatcatgtgactaacagccagcagaaactggggagaaggaaggcgatgttcgtattggtgccatccacaatgcctattttgcttgtctctgaatataaatttttgtttttccccgatgatatgaccttcctctttaatctcaatcttcttgtcatgcattcacctccccttttcttgttccttatgcccatagttcgcttcatcatgttggatggtcctttgtgttttctggttacaaagtgtaccaatattctcctttgtgaaagtagtctctcgattggtggatgagcaaatcaggatgatcatacacgtataggtgtttcatgagacagtcacctcccgcagttccggactttgtctcccgccatgctcccacggcccgcttccaaagaggaataagagctaaacggaactgagaggagaaccgaatgaatgcaagtggtccgggtgctcaactttacttttagtagatcgtgagaactagaagattccacctttggaaagcgcctacacctaatggcttaaccttatgacctcttcgtcagtgggagaaactcgaaaccattttggtataacttggccgttcatacctgaaaagcaaattatagtacataaaaatcaatgtaaaaacatgacattgtagagtcaaaataaaagtcgaggaaacagaagcaagtattcaagacacataagagccctaaccatattttcacttgtgatcaatccgtaaagactatttaaaaataaataagcactcaaaacaagtacatgttctgagtatcattcaacaactccttatcagttttgattcatttcaatatgaaaaataattcactggattccatcaactagaatataacaaaaaaagtacgaataaaacaacatttaggtactaaaacttttttttcaaatttatattaaatataaaaattgatccttaaaatatgaaataggattcaatcaaatttaattgaatgaacggaaaaaatcatctatatacacaaagttttttttcgtctttaataattttttttattgacgagccacataaattgcacctatg

SEQ ID NO: 5133 - DNA, 3000 bp, Unknown
  misc_feature (1)..( 3000): cDNA_ID_1827622_gDNA_ID_1620765_Annot_ID_50099 3000 nt of promoter + ATG
caacttaatgtattttaaaaccctttaaaacaaaaaaatgttaaatgtatttaaaagtaaatcttataaatgaagagatgaaaaaaaacgtaccttcgtaactgttcgtggctacttaaaagaccaacaaagactctttatctcttttcatatcacaactctcttctcatcttcttcctcagcaaggtaaaaaatcctttgatcttctcttcaatgtttcaagattattattatatctatctttaaatcttttttgtttgcgtgttctctcagagctatgaaagaccatgaaagagctatactggaagaaagaattaactattacctagcgaaacgtaccgaaagaattgtttttgctgagcttgatactggaggaaaaataatcgaatgtccaaattgtcacgttcaatttactcctactctcggtaaaatatataaagaacaaatctcttttgttatagatttttttttattttctcgaactattttttaacattttgatttggttattactataggaaactggatcgcggataagtttgcatgtaaaagctgcaaagctaacttatcttttagaaacagcacagcaaaaacagcgagatgtccttgttgtactatctcacgtcctgtgccaagtatgtgttcttgaaaaaaatcaagaaacttaaatttttttttgtttagttcaaaaattggatctatggttctgatttgtctaatctcatcttttgtttcataaaaatgttctttagacaattttacaatgcttgtgtgtggcggatgtccagtgagcgtcgttcatcaaaaacgtgataaaactgtgaaatgttctgagtgcaaacatatcaatattccaactgtaatgtctttgattttctcttatgatttaaatactgtttgtaaatttcttcaaataactataatgtttgtttttggtttagtttggaagaacttatggggttcgtccagagaaccaagctcgtcctccgcaagtttaccggattgttcctcctcaaggtaacggggtagctcctcctcaagataaccaagatggtccgcgaagttaccaagttgttcctattcctcaagttaacaaggatcttcctcaaacttaccaccttgttccttgtcgtaacggagttcctcaagttaaccaagatccttcgacattttaccaagttgttcctcgtcaagttaacgaggttcctccgcaagttaaccgagttgttcctcgtccagctaacgaggttcctccgcaagttaaccggattgttcctcctcgagtttaccagcggaggaaccgtgcagcaactgctgaaactgaatcaactgcgagttcttctttcaatgtgagtaaatgttaaatcttatctctctctttctcttaaaatgtactagctactttctttataataataaagtgcttttacccctttttgcagcaaaagcctgagatcattgtagttgaataccctgatgattctgtagctgaaactgtaagattatatacaattcttttgccttttgaggtgcttgtaattgattcttgaaacgttttttgaaacattgtgctttttggttgtgttttgttaggtgagaatggttgcaacaaagagagtagtagaagtagaacaagacaagacagaagaagcaggaaacaagaagattcgtctctaatcgattgaaagtacaacacaagacttgattaaaagtaccacaaatttgcatctttcttttgttttacacattttgtttcttttagttttcctcagttgatcaaactctcatgtggagatgtttttgtcgtgatttattttatttctaataagattcaagaaccttatttttattctacaatttgacttctctgtactttctgatctatctcaaaagtatagctacaaaaaataataaatactaaattacggggacgaaataatgaaactttcatctccatttcctttaaaacgacgcgttttggataaaaaaacgaaacggtcaaactctttacttttccgacgcggagagaaacctaaaaccaaagacgacgttcgacgaacgatcacggaagaacaacaaatggcatagaaccgtaaaataaacagaaagctgagggtaattcagtattttccgcataaatattagatcatcgtacggtacggtgtggtgatcaaacgctgatccgttaaaaactcttgagagtgcgttttctttggcgggtgttctctaacttcctcgtttctccagattctttacttcaaatcactctcttgtcttttctctgtctcaatctcttatttttaaatattcacatacttcaattttcatggtttttattttttttatctaaaattatataatatttgatagaaaaaaaaagaagattcgtataacatcatcagagataatctcaaatacacttcttcttcttctcgaaatctcagccgttcgtttgtggtaatctccttctcgacttttcctttttttttttaaacctcttttgtaattttgtagtaaataatatttttaagttccttatcgtggttaagttcggtttgttttgttttataatgtgttccttcttattcgtcgttactactaggtcaattaaatctctttcttaaattttcccagatttgggtatttctaactttaactgcgaattcaattcttatagcattaattgggccaaaacaaaagaaccaaaaaactttcaagctttttctcctttgataggtaaaaaaagattgattttcatgaatttaaatatctgtgatttttgatgttcttgttattgttcctctgtttgtgaattcaattagggttaggaactttttttttttttaacttctctttattttgatatatcgatatttgtttttgttgataacatcgttttcttatcttttttttttttctcagtttcattggctctcaatcgaagaaaacttttagcttacaaaatctgctttgagtagtattgatttttcaattcatatg

SEQ ID NO: 5134 - DNA, 3000 bp, Unknown
  misc_feature (1)..( 3000): cDNA_ID_1827619_gDNA_ID_1620765_Annot_ID_50100 3000 nt of promoter + ATG
gcatatgatactatgtttacattatcttggtttgtttttgtgtgttctttcagaaaactaagccgacacagcatagtgtcaaggggctacgaggattgggcttgacgccggatatcttagcttgtaggagcacaaaggttcctttgtttgcttgcatctccatcttgactttaaatctgtttcattcagaaacgtttgtattagattcttgttctgatataaaagtctcaaccttttgcttcatgtagccacttgaagataatgtgaaagaaaaactagctcagttttgccatgtcccggtaagattctgccttttgtctcatgttgttatgttctttacttgaaatctctttaattaccagcttacggttcttgtttcagcttgagtatatcttcactctctatgatgttcccaacatttggcgtattcctttgttgctaaaggtatcttttctcaactaaaactatttgtagttattacattggtttttataaatcattaagacaacatatttacttgtacaggatcagaaagctcatctggcaatctcaaaagtgctcaatcttgctaggtatgtattgtgtcttgttttgtcttttgttttcttgcttgatttgcgactgaaatggattggaactgatcttgaattgtttatgaaacagtattcttaatgagccttctctaggggaatggacttccagagctgaattatgtgacaatttacatgtgccggtgggtctcagctctcagttactctttagaaaccgtaacctgtacatatatttcttaacgcatcaaattattttacaggtgagaatcgctgttgtggggaaatatacaggcctctctgatgcttatctctctgtcttaaaggtagatattactcattacctctcagtggatagtgtctggataacaaaatgatttccttgcctcggttctcacatttggataacttgtttaggctctcttacatgcttctgtggcttgtcgcaaaaagctcgtagttgattgggttccagcttgtgatctcgaaaaagaaactgagaaagaggtactgtgactgtcttttgattacacaactatgtttttacttattcacagatcttaatgcagagtcattttttgttttgtttcgtataagcagaatccagatgcgtataaagctgcttggaagttgctaaaggtttgaaacgtttgccattttacaactttaatcatgagaagccttgtgttttagctcatctctattggtatcttcttcagggtgtagatggaattcttgtacctggaggttttggtgatagaggagtggaagggaagattcttgctgcaaagtatgcacgtgaaaacaaaatcccgttcctcggtatttgtcttggaatgcagattgctgtcatcgagtttgcacgatcagttctaagcttgcaagacgcaaacagcacagaatttaaccctgaaaccaaacatccttgcatcattttcatgcccgaggttcttagattctctgtttctatacttaaaatgtactttcgttactgtctttcttgattttaatatattttcatgcttggtgggtttagggttctaaaactcatatgggaggcactatgcgcttaggatcaagaaaatccatcttcaatgtcaaagacagcaaatctgcaaaactgtaagaaccattcatcttatatttaacttcgttggtcctacagatgaatgctatagattacttagcatgattctgtctacctggttcttatagatacgagaacaaaagctttgtagatgagaggcatcgtcacagatacgaggtatggatttgtatacacattcatactaaccagtgaatatgacaaaagtggagttcttatacgcatacacaattctcgtaggtgaatccggacatggttgaacgccttgagaaggccggtctttctttcgctgcgaaagatgaaactggcaaacgcatggaggtctgttttaatctttaaaccatgctctagtttaaatccatttgcttccaatttaaatccttgactaatcttgtactgatatggcagatcattgaacttccaaaccatcctttctttatcggtgctcaattccaccccgagttcaaatccagacccgggaaagcttctcctctgtttttaggtgtgaagccttttcttaagttcagttatctgaactcaactcaagtcttttaaacaatcttttacacactcttcttattgcagggctcattgcagcatcgtgtggcgagttagacacagtcctgaatccagcttctgctcatcaacattcgattagtaacggtccaacaaacattttcatcaatggaacttccaagaaatctcccaatggcttggctgatgtaagatataataacggctactgcaatggcctctacactagatagctgcatttgctgaattctccctctccattagaattattgctttgtgttcgatttagtttggattttggtttgctttcttcttaataatcttaggatttttcctctgtacatatgatccaagcttttgctcagttttttttagactcttttaacagacttatgatctggaaagactctagaaacgtttgaaaatggcggtttgattcccctggttcgttttttttttccaccaaaagggatttcatatgatcttatgtaccgttggaacattttacatctctcgatttggtctgaatgtgtaagaagcatttgataaataaaactttaaacaagtctttataaatgacttctatgataaaaccgaatgagtaaatcaagagttacaataaaatgatgtaacgtataagacatttattcataatttcatatcaaaccaaacaatcagcgagaatgtctattaatcctaaccatgagtggtaaagaaatgaatatacacaatgcttttgcaatgaaagccttattcgctaatgaatcaaagtacattgtcttccttctttagaattaattctaatcttatatg

SEQ ID NO: 5135 - DNA, 3000 bp, Unknown
  misc_feature (1)..( 3000): cDNA_ID_1827616_gDNA_ID_1620765_Annot_ID_50101 3000 nt of promoter + ATG
aacaaagtcgttgtaaatttccacgtttatgcggacataaatcaaaccggtgggtccggtccgaccaatgctagatctcttacgcatgtggtcacaagatcttgatccagtaaaaaaataaaaaataaataaatctaaagagtaaataacttcgttgtaataaataaattctgctttcaattaaaggaaagtccaaatacggaactaattcacccacatcaaaagtggccagagcctatgtaatccggtttaaacaaatttacatccaatcgaaatcgttttaaccaaaagtaaatcaaaatataaaccataagaaaatttaatcaggtttttttttttgggtgcaataattaggtgttgtttacttatgtatagacaaattttattcgaaatcaaaccaagttagagtaaaataaactgatcacaaccgagagctttacaaaaatctttttataaaagtaattttgtttaaaattggatccaaggagaattattcgaaattagacgaatctttggttttctatacttaaaaattattttcgaaaatcatcacattcaatccaaaattgaaccaaaaaccggttgaacttctttgctttgaaagaaaattatatttaacaaattaattgtacaaatttctatttcctaaattatgtacaattaagatacttgaacatcatcaacaaaaaagaaagataagattagtgattagttaataccgttatagtggtccatctgagtggtcagagtgctaaagacaggccaataactcatatccccaaaaccattcaaacttcacatccaataggcgaaacagagctcatacatattttaactataaagtttactacatgtaattaaatctgcgtaatatacatgacttcttgaattaattgaataccacgatattattttaaaaagaaaacaattatcttttagacatactgtatctatactttcctgtaattcaatctcacctttaaatcaatcaacattattctcatttatctaattatattatgtatatattagctaacattttgttgtgtacaaagtatactaatcgtaaggatctttgtttaaaggtaagtgatacaaaagtatacgaaatcacaaaaccttaatcaaccaacataaaatcatgagaagcgaggagaattcatttttttgtgactctttgtcatggggaggttgcatgaattaaattattatcccatgcatattgttagatcatgccttgattaacgaagattgtcacgccttttttatatacgcacatatgcatgtggagtatttaaaatagttggcaaacaatctccaaggtcaccaaatcaccgaatttagtgataattcttctccaacgtaacactataatagacggtatactttttctttgggtgtttgtgaacattgttatgtcataaaaaaaaatattattttttttatatctttgattaagttttatattcaaattgttggttttcaaataaatgacaagtatactatcaatattttttgaatgttttcgtttctgtaatatcaaatttttaatcaaattaatataaaatgataatgtgcacaaatgttttcaaataaatatcacattagttaaaattaaaaatacattataaaacttaattaaacattaaaaacatttaattacaacatttaaaccaaacaaacataaaaaccaaatgcaataaggtaaatttaaaattcagcagttctaaattaattagtatttatcaaactattaaaaataactattattaagtattagtatttaataataaaaattttgtttttggtgtgagatttggtgtttatggttggagataaaaaaaatctgaacaccaaaacaccaaatttgatgttaaaatttggtgttttggtgtcaatggttggagttgctcttaaaccgattttgtttactattggttcaaatgtcttttggtttgaaaaaaagatcaagcaccaataaattattacatcaaatataattaattttttaagatgtatctttaaacattaagttaaatttagcacatttttttttgttataacatctcaaaagaattaggttatgatacgaaataaatcaatattttaaaacaaattagaaattggtatacaataaatttgctaagtacaattactatcatatgatatcacaaataaaactaataaattatttagtaatgattacattagtgattaaaataactttgtttacatcttcataatggttttatagaaggtaaattaactataaaaaatttggtcgtatccgcaaatatacagaaacaatccaaatatagaaaacacaatattataaaaataaaaaataggtggagggtttacattggggttttgagagaggcgcttctctgctgcaaattgcctttactgtgtttctctcttcccctttataaaaccgcttccgtcgtcaatggcgtgagcctaaacaagaaagaaaaaccattcttctctcttttcgtttttttcattctctctctctctactccatcgttttcacacttttctcgccgccctttatccttatccgataaacccacaaataaagacagactcttttgttctttaaacagagattgtaaatccagagccgccggaaaatacaaccgccggtttactctcaggtctctctttcactctctgtttctatctctggttcatactcttgtgtcttctgggtttgatacaaatgataatgcaacagcttttgctctatttgaatactgatttgaaccaataagtttttattttttaatctttttggtcatcccctgtttctgattctgcgataaagagatgttaaatctagaaaaatccaaattctctctctgttaagcatttctcaaaagcttcacgctttctcagtttctggtttctagattgttgttgactgattttggttggtgatatctctgcaggattagttgatattattcgattttaaaaatcagtaggaagaagatg

SEQ ID NO: 5136 - DNA, 3000 bp, Unknown; identical to SEQ ID NO: 5135
  misc_feature (1)..( 3000): cDNA_ID_3075789_gDNA_ID_1620765_Annot_ID_167313 3000 nt of promoter + ATG

SEQ ID NO: 5137 - DNA, 3000 bp, Unknown
  misc_feature (1)..( 3000): cDNA_ID_1827598_gDNA_ID_1620765_Annot_ID_50107 3000 nt of promoter + ATG
gcatgatttctccatctcggacttgatatcgtcaattagctcgaagcctcttagtgttttgctagccggagatcttctctctgtcccttcgtagtctagaagaacagacgcatcacatccctgaaagttgtgttaattcatgtacaaaaatgtcaagttgttatcttttaaaatgcataactatattagatatgcgcaaaacactcagatgcgtttatacacagaataaagtgcgcaagtccgtcttcaatattaagaaacttatatctatatactatcaatgttccaagtatggtctagatagacggaagaacaattctaatctctaatagagtaatagtgaaacccatttttagaacaatgtaaatcatatatgaatcaaaacattggctatatataattgaacgattaattgcaataccgtgacgccacaatcgtggaagataaggcggaggagggcgggaccaagggaagagtcactcttagtccattccctcactttcgtaacaacgattttctcaaaatctggacaaatcctatcataataattcaacgataataggttgtccaaagggaacaatgactttgtatcatcatcgtcatcgcctccgtatcctcccgctccaggtaagtcttttcggccagccgataccggccaagccacgagaactccgagtatgacaacgactgagaccacggccaacttcattattttgctttcttgatatctctctcaatttgattggctttgatgaatttgtttgatgagaggtgtgttgtgtagtaatttatatatacaattgggtttggaaactaatgtgatgcttttacgtgggaggcacaactttaagatttgaatattcgagtgacttgcctgcatgtcgtatataatgtttatgatatataatttttttttgatcaaatgatatatattaatagtataattttaaaaaacctttttacaagagaaaaaatgatataatgatctttacattactgaaatcagggttttgacttatttggattagattaattgtaaaatttatttgtcaacaacttccattgatttaattttgtttgttttttggtcggttatgtgagactattattattttattttgttgtctacaattaacatacgtatatatacactggatgatgacatcaaagtatgttttcgagtaatccgtaaagcaaaatgtgatatatcgaaattaacaaattttttgcacaatcattaataatgaatttgctcagatcctctaacaaaaatagcgatattacctctgcacattttttagcacggaaaaataggtccattagagacatgttgacaaaaaaaaaaaaacaattcaccataggctacgtttattgaaaattgatgcatctcaacaagttttcaaacgttcaaattttgagtttttttgaactatacaacaaattctcactagtcaaaaccttaaactttttcatatatttttctagtttttataatttatatttcttacaaataattgtagaaaactcaatttttgggtcatgaaaatcgccaacagtgtgaaaagaggccaaccaaaagcagttgattctctagaactcattgttaataactgaaatatatgtatgtaaactaatatttgctagaattataaaggagaaaagagtacaatcgaagtcggaaccaacgccggccggtcggaaaaatcacagaagaaaaatcgtatcaatcgctttttcaatcgtccatcttctttatctaccggataatacttcctaatacttaaactttaagaaaaaagattgtcagctagctatacgaagtgtggaagaatacattatcacatatgccgcaactaatataaacgatacccagttacctgaaatatatatacgaaatatatgtcgtatgtgccaatatcatagacactaagtctcgattaatcggtcgttttactctatcgttgactaatcgttaactcatcgggatccgaaaatgatcggttgtgaaccttattattggtttcaattatcgttattttgtatagagactattttttcttaaatcgttttataagagtcacaaatcacaactcgtcctaagttctctctctattcgactaacccaagcacgacattgaccactatgcctgggcctattgaccacactacaataaaatcgcacactacatgaaacttgggttgaacatctaattttctctaattaaattatttttactttgcttaaaagtttttgttcctgtcagttatacaatttaaaattgtttgttatctttagttcttcaatttgatttatgatgtggcataaaatccagaaagtgcatggttcccactcgacaacggctaaattcctcaacggctcctttttgactctagcatatttaggagccttaattattaaataatttaatcaccctttaattagtataacaatccaatgttaattttttcatgcattacacaattaaatgcttttaccagtataatgacatgtgttatacaatatctttcaaattcaattttgtccaaaattataagtagcttttttatttttctataacaatttatcacttttggccacataaggcttttctttctctgtattcttacacctcattctttattgccttgttttacagacacgttccccagtttaagggacaaaacagagccattttaggactcttaacatttataagtcctcttactaaatagataagcacaaatactgtttggttctgttttgcttcttcatcatcatcgtatctccaccgtttgtttgttgttgttctgtttctttaacaggaaaaaaaaacagagagaaaaatctgtctcttcactaacacaaatccattttctcttcttcttgtagagagacagagaaaacagagttgtcctctaacttctttcgatcgattcaaaaactctaatgattatttgattttatgttcgtttgttcgattcttagatcgtaaaaaaatg

SEQ ID NO: 5138 - DNA, 3000 bp, Unknown
  misc_feature (1)..( 3000): cDNA_ID_4359960_gDNA_ID_1620766_Annot_ID_50110 3000 nt of promoter + ATG
actctatagagtcaatttttctgaaagaccagttacagacgaatgtgaaagctatatatgctatatgatatatactagtatgaaataaatttgttgtcgtttcaggtaatttagaagacctgtataaagttgtacaataattttctatatcaaataacttaacatattgtaagataaacaataagtcaataacctaattcctatatgtatatatattatgtttttgaaaaattcaaatggtatatatacatgtttagatagacgtatggataaatacagtttcaaccaaattatcatattgctatagaagtgattgacaaacagatatgataattcattaaaataaaaatgcataggtaagaggtagaaaaatagatgcatacaaaatataagcatacgaataaaattttttgtcgtctttcttattgtcgtcttataataaacaaataaatacaaattctcttaattgacaaatacgaaaatggatatgtgctagctggaataatacaatgatataatcctttatagagatttatctgatacagaatcgaacgttaactcttccttttggtttaacaatttctatttcccccgaattctatcaaaagtgaagctagaaaaatccaaatctagaactagaaacaagccatgaatgtgtaaaaaataaaagtttgtgaactcttgttgatgatacactgaactgaaaaaagaaagacaaatggaggagagataggtgaagatgccatgcaaaaatgtccaaaaatatttttatttttaaaaatgtggaaagagccaaaaactttaaaaagaaatataggggtttgcatgcatatggccgcgcgtgtgtatcgcgtcatcctacgtttttagtcgtcgagtttaaattgtttggacaaaacctcttgtatcttccaatcacttccataattttaggagaaaagaaaaacaaatatagaaaatataatgcaaacccagggactcgcgttttccatggttttcggaattttgtgggctctttaccttacgaggagcttgagcttcaatgttttgattaaaataatagaaggcttcttgtaatataggattattggtcaacaaattcttattgtccaagatattaactgtttgactgagtctcaaagtggaattagaaacatcttattatgatatgtgggtactttctagtttcgacaaacatgtttatggctttcatctatcaagattcttcactctataattagaattcaaaagtagagttcactgtcagaattcaaatttattatgtgttttttttccgtggtcgagattgtgtattattctttagttattacaagacttttagctaaaatttgaaagaatttactttaagaaaatcttaacatctgagataatttcagcaatagattatatttttcattactctagcagtatttttgcagatcaatcgcaacatatatggttgttagaaaaaatgcactatatatatatatattattttttcaattaaaagtgcatgatatataatatatatatatatatatatatgtgtgtgtgtatatggtcaaagaaattcttatacaaatatacacgaacacatatatttgacaaaatcaaagtattacactaaacaatgagttggtgcatggccaaaacaaatatgtagattaaaaattccagcctccaaaaaaaaatccaagtgttgtaaagcattatatatatatagtagatcccaaatttttgtacaattccacactgatcgaatttttaaagttgaatatctgacgtaggatttttttaatgtcttacctgaccatttactaataacattcatacgttttcatttgaaatatcctctataattatattgaatttggcacataataagaaacctaattggtgatttattttactagtaaatttctggtgatgggctttctactagaaagctctcggaaaatcttggaccaaatccatattccatgacttcgattgttaaccctattagttttcacaaacatactatcaatatcattgcaacggaaaaggtacaagtaaaacattcaatccgatagggaagtgatgtaggaggttgggaagacaggcccagaaagagatttatctgacttgttttgtgtatagttttcaatgttcataaaggaagatggagacttgagaagttttttttggactttgtttagctttgttgggcgttttttttttttgatcaataactttgttgggcttatgatttgtaatattttcgtggactctttagtttatttagacgtgctaactttgttgggcttatgacttgttgtaacatattgtaacagatgacttgatgtgcgactaatctttacacattaaacatagttctgttttttgaaagttcttattttcatttttatttgaatgttatatatttttctatatttataattctagtaaaaggcaaattttgcttttaaatgaaaaaaatatatattccacagtttcacctaatcttatgcatttagcagtacaaattcaaaaatttcccatttttattcatgaatcataccattatatattaactaaatccaaggtaaaaaaaaggtatgaaagctctatagtaagtaaaatataaattccccataaggaaagggccaagtccaccaggcaagtaaaatgagcaagcaccactccaccatcacacaatttcactcatagataacgataagattcatggaattatcttccacgtggcattattccagcggttcaagccgataagggtctcaacacctctccttaggcctttgtggccgttaccaagtaaaattaacctcacacatatccacactcaaaatccaacggtgtagatcctagtccacttgaatctcatgtatcctagaccctccgatcactccaaagcttgttctcattgttgttatcattatatatagatgaccaaagcactagaccaaacctcagtcacacaaagagtaaagaagaacaatg

SEQ ID NO: 5139 - DNA, 3000 bp, Unknown
  misc_feature (1)..( 3000): cDNA_ID_1827675_gDNA_ID_1620766_Annot_ID_50112 3000 nt of promoter + ATG
tatgtccatttgataaactattaaatgagttactctagtgacatattcgcatagtagtatcttgaaatatcttttggttgtattaagaagttttcagacagaattctcacacactaacttgttcacatgaaaattaagaaaactatgcagtcataaggaaaaaaatatactcaaaataaaataaaagtatatcatgaacttttgaatcacttttttatttttagtaaagttaacatctatataacagttaccaggatcgaatatataggtatcgtatacacaaccgtcacaaaactgtttgtctagaatgtccgtccgtctagacaaacagtcatccaaatcattttgtacaacactggttagtaaatagcacgaattaagctcaatatgtatattcaaagtgaaggaaacatactctttcttatttataacgtgtacaatatatccatataaccggttgttacggaatgactttgtcaccaaacatgttcttcaaagaagaaagtgacgagaaaagtaaataaaacagtggagataatattagaaagaatattcagatatgtttatcttttaattctctttaaatattttaagtggattgttgaaatcttggcaagcttgttttctcgagattattatgatgtgtataagttttctttgcttttcatattcatttcccaagatacgcaatctttacccatcactgcttttgcttttgtaattgacggcaaatcttctttctaatcataaaaagtatataaatcgacatacctgtaacgacatcaattgtttagatcaaattaatattttttaaacatcaatattacaattacaaattactagagtacaagttaaaaatgctataagtaaatacatttctatattaaaagtgcgaatgaaacagtattttttcttaatgtcattttttattatattttaacattgatttggaacaacagtcacattacagtttgtttagctggcacattctgctttcttcgggagagcattgaacctgatccgtcgtctttccacaatgcccaagccggctaaattcattccaaataagtcatccaagtccataatcccttatctagtcgtttttcaaacagtaggcatcaccatatctattgtgttcagcctaatgttttggagacccttaaatttgtctaaactccacccaatctctcttgtgtcctttccttctttattgctttctctacagttgatccaaaagtatgatatatccaatttcttgaaaaccatttttggggaaaattttgaaaaccatttttagaattttacaaacacaagtaatatgttatttttcagtcaattttttactgtttgttttgattaaaattatgaaagaagcatacgatttctaaagaacacgacttgtcaatcccactcccatcatcgaagatgaacaaagccaatcacagggaaaaaaaatgaagaagaagagagctgcaatgtaactaacaaatcttcctaaaactgagtttgaatatctctctgaatcgctttagattgagatatttaataataataataataatagtaaaattcaagtctgagatgtaccatctattagacatgaaaaaatggatttgttggttacatactttacaattgtagaaacgaaatatatgatgtttttgatacaattaatcggcgatatagcgaaaagaatgtggtaatagcgataatgtagacacaaaattgttgcaaaaaatgaaaatgtcaatgaaacaatatttacgcattgttaaaacttcaatcaaacaaacaaaatatcaaacaagattttctttgtttcaccaaaatattaattttaacaaattgcatgtacgcttaaaactttaatatacttattaaatcttacttttatggtccttcatatgtaacataataacagtaaaagattacagaaacgtttaaacctaacaattatgaaagtttagaaagtgttataaatcttaaatgaggaaatggagcagctcaatgcactcaaacaagtgcccttgattagttgatttcaatcacccaagtagataagcacgtaaacataaatctggttattgccaatatgaaaaagaatgaattttcggatctgactcagatacgttttgcaagaataaagttaggcatttttgaaaaaacaagaaagccgtttaaatagttcttatgtaatactctacccaaagaaaagaaaaagtaactatggaacaaaattcccatatagaccaaaataaaatatatcataccataaatgattgaacagatcttattttcttgaaagtataaatatttttaatgcttggtgtgaaccgcaaatttttgtccccaacatttttagtggataaatatttctatgttgcaatttattatcattttctatataaataatatttccagcttgtatatgctatattctcgttactaaaaatatatgtatatatgtatgtacatatatgtatatttaaaaagttattattaaaaatctactactttctcaactatactctctttacaagaaaatctgattttaaagaaatttcacagttttctagatagcaaccaactttcaccaatcatacttaatttgaggaattacttacaaataaaatctttaaatcataaactagaagccacagtatctgttaaaataataataattgaatttaggatctgccattagtcgacgaattttcttgaatattcgtttctatgttaaaatggaagtcgtgttaagaatacaaataaataagtatttgttttgaaaaagctgaaaacatttttgaaaaagtaaaaatgactaaataaaataacaagaataagaattatcgttttaactccactgcttcctctgcagcactataaatatatgctttggtactctgcaaggttgttccgtatctctcaccaaaccatctctttctctctttctcaaaatcttgtttatttttttaataaaacaaagaaattaaaaagatg

SEQ ID NO: 5140 - DNA, 3000 bp, Unknown
  misc_feature (1)..( 3000): cDNA_ID_1827671_gDNA_ID_1620766_Annot_ID_50113 3000 nt of promoter + ATG
gtttacgtttttggcgggaaaattacggatttacgtttttggcgggaaaattatgagtttacgtttttggcgagaaaatcacggatttacgtttttggcgggaaaatcacgggtttacgtttttggcgggaaatttcaagtttacgtttttggcgggaaaattacggatttgcgtttttggcgggaaaattacgagtttacgtttttggcgggaaaattatggatttacgtttttggcgggaaaatcacgggtttatcttttttagtggaaaaattacgagtttactttttatcaatttcatcgcttgtatatttaagaaatttggaaaaatattaattttattaaattggtttaaatatgttggttaaacttaaattgacattggtttagagattttagttggtttaattcaattttacaaaacttgatgggttaattgggtaaaccattgaaaccattaaccattacaacccaactcattttactcatcaaaccaattgactcatcaactcatttggctcatcaactcatttgagtcaaaattttcaactcattagggttcatgggttgagttgagttgagttgacccatgaattttgacccattttgacatccctagccacatgtcatgataagtaatgattttagttttttcttttcactcttaaaacagtcttgaattaattgataattagaatttacaataaacttctttctataaaacatcaaactattaagagcacaggactaagatgatgtatgaaatgtaatgagcatgagatttgatgtatttggttttgtgtttacaagcatgagactaagtgatttgagtgttgatttcttagatttttttaaaattagcatgttagcattttgaatactactattgtactatgtcctcacttgggcaacaacactacctctggattcttaatttttccaaacaacattttttttttttacaatcaagtgttgtacaatcaatacaaatgtcatgtataagaagtagacttttaatcataaaaaagttcttacaaaattttggtaactttttaaatctgtttatccaaaataatttaatctttttaaccttttcactacaaaaaagtatatataaaaagcgggcatttttaattttaattgtaagttttacctttatacaaatacacaacaaaaaattatctattttaactatccaaaatggtcagctgttttggaccattaccaattgacaatatatattctacaacacttcaaataatttgacttcccctgaaaatataaaaagtttctcgccattacaacttgtaatctagtagttaatttgtgtcgttgtgtcacaagccaaattcaaacacgacataacaaatatttcttaagaaaaatacaaccctctcatatgtaaaacataattttaataacaacaaaattacaataaaattatttatttgtgctatgacttagtatcccatctccaacctacttcatcattttattctttcttcacacacatgcttcatcattttttggacctttttgtacatcaattttgttttataattttttttttaaagttaaaatctggactattttataaatatagttttgaccttattttttttgaactttttaaattttttttttttttgtgtaacaactgtgttttatttatttatataaggccaaataatacagagccaaaattaacaggtcataacactaaattaaaagaaaagcccaactaaaaaccctaaattgaaggaaagcttgttgtagacagcacatgaaacacgtatccaatggtaaccagacttctagacacgtgggaagtggaagagataggagtttccgttcactggcagaattgtgtgtcgtcgggaatcttcaatccgaccaaaatcaccagagaacttgatctatcgacaagtctcaaacttcgcccaaagaaatcatggcgagattccaattttagctttgatgagaatatgactctttgaatcttcttcttcttcttcttcaatcgacaagctttcaatcttcaattgcaggtcatcaaacctaaaaacgaaaattcaatcgaatccaaagtatcgatctttaattcagctcccaattacttcaacatgaactattaactaagagaaacatcaatccaacaatacaacttcgttcttaaaattttaaaacctagaaagcatgaagaacgaatcaagccctttaaacaaagaaggattgaagaattagaaacttagatcaatagaaagagaaaaaactagcgagagccaaagaaaaccaaaactaattggaaatcgaaagagtctaaagaaaaaaaacaaaagctagagcaaaagctagccaatactcgctagagagataagcgacgagatcgctagaaacagagccaaccaccggtgttgacaaaaccaccgatgccagaaacaaagccggacgaagatgctatgaaagccatctacgccggaagcaaagccaacctacaccactgagaaagctgatgcagaaagacgagaattgtgcctcaagcggaaccaacatcagtggagaataaccgccggcaaatcctgaacgaaaaaacttctttctctctgaaagatgaaagagagagaagagagaaggaaaccgaactttttaaaatataaagcctctttttctgtaaaagaagaaaaaaatattttgaaaaaactgaaaatacaaaggccctttaaatattttatttaaaaagtttgggtcaatttacactttttcaaaaacataatgggccttttattttttatctaaatgtttccctctgcccacgctatttgggccgggcctgcatatcccaactcgtgtcgatttcaagtttcaccgtcaatggaggatttgacgaaaagagactaataaacctaaatcttccccttcggcgttaaaccctaaaccctaatttcgtgctctgtatctctctgtttttgtttttttttgtttgtcaacaggtttcaatg

SEQ ID NO: 5141 - DNA, 3000 bp, Unknown
  misc_feature (1)..( 3000): cDNA_ID_1827667_gDNA_ID_1620766_Annot_ID_50114 3000 nt of
taagaaagaaagtagctagtgaacttaactaatgttatttagaggctaattgctcatgttactattatactagtattgtttattaccgcgatgccaataggcaacaaccataatctcctaaagtaatttttgtgatctttaatattaataagataattaaatataccgtatgttcatctttagataaaggtacaaatggagtgctacacgtcaagacaataagaaattaaattggactctctagatccgaaaaaaaaaaatgaaagagtaagaacttttttgtggaaattgttttttttttaatagaaaatttgtaatattataaaagttttgggggaatggaagatagagaaaggaagagcattaagaaaataggagaacatatggaaagttacaataaatacttggtacaaaagttgcagaaaataagtaaaaatatgatccagaaaagattagaggaagaaagattcttccaacgtagattcaaattattcaatattatacaaagggtactttggaaaatccacaataaccacataagaaaacatgcatcctcatctttcgactttctcacgttttggtgattggtatcttttttttcttcgaaccttccgtgtttgatttatcgccctcttgttcttttgtcccttttatattgctggtcctaatctgatgaagaaaattaatcaagaaattagaatgatttttctttaaatcaggatctttacagttaatgactgattatttctataccgttttggcgtagccttgctgggccggatacccacgaactgaatgaggagtacaagatatgttaatttccttcaaggttaaattagttaattacatgaatctcaaataaccaaaactcctatatatatacacacctggtgcaccagaggaagaatccatagttgagaaataactaaacaaggaattgtgagaagagtagattcgttaatgataagaagcttggttttgttttgaagatgatgctcgatcttcctatatatatatatatatatataattttctactgttttttccttagagacacgactcataattggtttgcaattttgcatacaaagtcaaaccacacttgtttattcataaaaatatagatttatgagaaagtgtactaccatatacaaaccaagaacttaacgtgttgagattatactcgccaataatctaaaatgatgtaatactctatttaatagtataagtttactacaaacgtttatccggattatcatatatgattgttttttagtaaatttgttatcttgaattgattattggggggcaaggtctcctgtaaatataacaaataaaacacgatatagagtggctcttaaactcttaagttagaaatagaaaaataataaagtgaaagactattaggtgagtagatgagagagtagaatggaaaatgtcggataacataaagaagaggaggtatagtcactccatgccgatgaaggatggtcaacgatgtatatgttaagttaagaggcatataaggtgaaataagtaaaaatgaaagtgttaagtagacgaaggcgtgacctagaagtggtctttggatgtgaccgaaataggtcggaagtacgtatgagtgaaaactaaaggaggttttgcgagcgaagataaagaaaggtgtttatgctctctagaataatcatgaactagtaactaagtgaaagtttggatccccttctcgttaaagaaagagttgtaccacgttggcttagtatattgggtttaattagacaaatccggatcatattcagattcatcgacttgtgcatgtattatgcactcgagtagttttcacctaccatctttgtctttatctccctataagtaaactagtgaatcccgagatgtaaggtgatatcatctctataccgtttgcagtgcaaaatgcggcgggtcagactatcactatgtggagcaaatatgatatatcaaccaactaacccttcatataactagagagatcttaaccggaaaaaatgatccgcagtttcatacaaaaagctctatagtttgttctttaagcagattaaagccagtcaatagcttttgattaagatttcaataaaaagagcaatttattttcctactttacttaaatgaattatttgtggaactttagtatctacggaagtgacgatgggacaatgaagtatggtgacgtatgacgattgttttggttagattggcaagcacacgtaacggaacaatccaaaatgatccaaaaatttaacaaaaataaatgtcagccaatgataatttattatattattcttaggttattattattgaaaaaactttaaaattcataatcttcctaaaattcacttaaatttatccaaatttaaaatccttcaaactaatccttaaattatttgtagctagccaaccaactacattagttaaatttaaatgcattgcaagctcacatgtatcaattatatataatgacatgtggtcaacatcacattaaaaacaaaaatattatgttttctgcgtagaaaaaaacaagctttgtggttaattttttttaatatcattttttatttcaataaatattttatggataaattaaaaatatgttaactccattagacttaacactaataacagctaaacacaaaaattgtaacatcttttgcaattcattgtaatgtttgcaattagtgggccttctttcgagccttcttatgtaccgaatatttgcctatttgggctttaaaacatattgggccgataaaaaagagctacaaaataaacagctaaacaatttttgatttaccatagttttttagtttttacccgacccggaaacaaaatccggcttttttcctccgacccccccaatagatctgactgaaatcaaaattttccgactctttctttctctcacactagtctttcattttcctcctcaactctgggcttgcttcgttctatgtttctccactgctaatg

SEQ ID NO: 5142 - DNA, 3000 bp, Unknown
  misc_feature (1)..( 3000): cDNA_ID_1827663_gDNA_ID_1620766_Annot_ID_50115 3000 nt of promoter + ATG
atccggcccagcaaggctacgccaaaacggtatagaaataatcagtcattaactgtaaagatcctgatttaaagaaaaatcattctaatttcttgattaattttcttcatcagattaggaccagcaatataaaagggacaaaagaacaagagggcgataaatcaaacacggaaggttcgaagaaaaaaaagataccaatcaccaaaacgtgagaaagtcgaaagatgaggatgcatgttttcttatgtggttattgtggattttccaaagtaccctttgtataatattgaataatttgaatctacgttggaagaatctttcttcctctaatcttttctggatcatatttttacttattttctgcaacttttgtaccaagtatttattgtaactttccatatgttctcctattttcttaatgctcttcctttctctatcttccattcccccaaaacttttataatattacaaattttctattaaaaaaaaaacaatttccacaaaaaagttcttactctttcatttttttttttcggatctagagagtccaatttaatttcttattgtcttgacgtgtagcactccatttgtacctttatctaaagatgaacatacggtatatttaattatcttattaatattaaagatcacaaaaattactttaggagattatggttgttgcctattggcatcgcggtaataaacaatactagtataatagtaacatgagcaattagcctctaaataacattagttaagttcactagctactttctttcttattttagttaatacgaagttgcctatgttgactaacttttaattattttagttaatacgaagttgcctatgtcgtctttgttaaggaagatggtttccagtacatatactataaaattttgtgatgatacaaaatttaatatttgttagtactatctatagcaaaattttgtacgtgatagtataaattacataagcggaaaattgtactattttttggcaacacctttcgtaactaaaatggttcaaaatttaaagcggatatacaaaatttacttgaaattaaaatgtataactaaacgagaaaaataagaaaaacaaattgcttattgctcacgaactccgttagtagacaacatacatcttcaccgattcagaacagtttgtggcaaatgctattgtcatcttttgttgatcgatcagacagtatataactgatcaaatgagtgcagtctaattcagattatatcggagagaggcttcttcgtttgttttgagcttctataatggatcacatatcttcaaagcaaaaccatttcaaacatgcaaataagtttgtgttttttttccaagaggcatctactagcatatatatagaaacattatatgctctaattagttatttcgttgtttgcttcgcagttcaatccgaactaaaaccaaaaatatcaatttggtcagtttggtttgttctggttttacctaatgctgagggctactggctaggtacacttcctcaaaaatttctattttatgaattaaaaagtatggactgtatggttgaccaaatcagaggcttctgtgagggaaaaaataatcacataattaatatctatatatatggtaacagcatcataaaacaaaaccaagtttcttatcattaacgaatctactcttctcacaattccttgtttagttatttctcaactatggattcttcccccgttcaaccaggaccaggtacgttcaagctaattggtacctgatgagttaagccaaaatagtttgtatattgcttttgattatttaagattcatgtaattaccttatatgaaattaatttatcttcttcgtcatttattcagttcatggacaggatgacaaacccaaaacggtatataacctatcacatacttatgaactgttaggatccagcaactatttgctggtttttagaaagatctgagaggaaagactaatcaatttcttgattattttccttcatcagattaacaccagcaatatcaaaggggcaaatattaagaccagcaatatcaaagggacacaagacaaaggcaccaaataaatcaagcacggaactcgaaagatgatgcatgttttcttgtctaattattgtggattgaatcatttggattgggttaccaaaaaaaagagagaataatttgaattgacgttggaggaatctttcttcctcttatcgttttcttcatatttctactttttatcattttatgtaacttttgtaccagtatctattcaaatgccattgaaataaaaatatggtttcgtattccaatgttgttttactcacatatatattaagaagactttttgcccaaaaaaaaatatattaagaagacttttgttttattctaatttttttttaacatatgtagctataaagaaaaactacaaaaacttgggaaactatataaacttataggattgaatgaattttcatttattcgatgagaatcatagtatattttctttctgtttattttattaatcataatttatttaaaatagtttgacatgaagtaaacttatgagattactattaattattaaagttttttaaaattaatttagtgaaacgattgacaacgcaccctcttatgcaagtataatatataatagataaaaaaatataaaattataaatagcgcactctcttgtgtaatttttatttttctaatcccaaattgccattttttaattcgaaattctctctttgttatcagatccacatccttctccaatttgtaatttttttaaaaaaaagacttaaaaatcctacttccatagctcatttacatccgtatcacagtaagcttgtgtttccttaattttgtgtcttaaatctcataagcataaagacgaacttttacaacaatttcttttttttcttcggtatctctttgatttttttttaactattattgatgttgaaaatataaagctcataagcaattggag

SEQ ID NO: 5143 - DNA, 3000 bp, Unknown
  misc_feature (1)..( 3000): cDNA_ID_1807318_gDNA_ID_1620766_Annot_ID_50117 3000 nt of promoter + ATG
cgaaaaaacgtaaagcaaaatagtacaatatggatcctgatcttttgacttgctcacttctttccaatcatgttctttcctttggttgttttctctcgctgcgttgttgttccatctacgttattaactattgtcgttttctctctcgtcactggttttgtcccttttaaattgcttttctgaagctgatgaaggaaaaataaacaagaaattagacaagacacttccaaaaaaaacccagcatcgagtcactagatcataaaacgtttatttatctaagtatatgattatatacccctttcaacgcggtccgacctgcatagataaacaagacatgttagtttcatacaaggtagtacttagttaatcatatataagttatttcagctatcttaattattcatcatgtacaaattagcccgaacgtacgtaccttcttcgcctgcagaattactggatgaagaatccatagatggaaacaactaaacaagagatcagagatatccgtgaatacgaagcttgttttttttattttatttttattttttaatgttcttaatttcaaatatatagagagaaaaattattattcttgttctcttagggacgacgccttgtaattggtctgctcacaaagcaaccgcacttgtgttttttgattcattgaatataatttatgagtgactaactaaatatttagtaaagaaagtgggaaaataatagtcaacaaattgaagcgttaaccttgccataaaatcgtcttttcattcaaaaagtgagggattaaattacataagaaaattacaaaacttttatttcataggccagaagtctagaaggtacgtaggccaatattctagtttgttcatcataggctcatcgcgataaactccatatgattaactgcaacactatttgttatgaatttccaaataatgtattttaattttgagctaggtttcatatgaaatcagaataacaaaatagtagtacgaagtacgaaaaagcaattttaaaaaacagctaaaaacataacaaaatagcagtaagaaaaagtggaaccaaaaagctgaaagtatcaaagccgtgttgctaatcaaacccaaaaacaaataatccacccttaccaaaaagacaaaacttgatagtattaattcacaaccatttatcaccaaaagtggggaaaaaccaacgagcatccttgaaaagttttgtcgaggaagtagttagatgttcaaactcttggaccacataatcgcttccgatttggtaaacgcaaatacggtcagcgttataaccatcgcgtagactaatcccacaacatctatgatactgatcattactaaaatatatgcaatctctcataactccatctttggccggaaccgtaattcctaaatccaaaagcaatgcctcgtcccctatagacttgattagtactgtaaattctgatgattttggatccatcttattgacagtgaagacgcatttagcctctggagaactatccattttaccacctacaatgatcaaaacttctccagacaaagtcacagcaagattgctgaaatacttcatatgaaatctatttacacacacagacgatccgaaacttgcacattccatttctactggagaaacaccaccggagaaatcaaaaacagtgagacattgatgtgcactaatcatgtaaagcttgctttctttaaacaccatatcaacacagccttgatgctttattggttgaagaactttccagctattgttgtcatctcctctcttgtgatgatatgctacataactagaaagattacaaaacacaaagtaatctctgcttttgtcatctacccacagaaccgctttgtctatttctatatggctaccgctaatgggtctcttgaatcgcatataccgttctccatcgattgattcgagagacggaagaagaatcctctctcgagtaaaaagattcaaaagatgaaaatcagctctatggtcgaacataaggaaccaactaccggaactcgctaaacaacgactcgtagacatatcaaaccctaaatctctgattatgtaggttttgttttcatgaggatcaaacaacttacatgaaccgttgttttcgacatttttgtttggaaaaagaatgatccatggagttgttggatttgttactccgatgactgatttcgaagcaacataccatgttgaagaaacgcatctcgctcgatgaaaatcaacgaagctcaagcgctccaagattaatctaactaggtccacgatataggccgcttcgaatcgtccttccatattttttccgtcggaatcgctcatctccttcttttgtgctatttcacgattttcaatcttagggtttgtgctcagagacgtgggggagaagatgagtcaataaagttaatgaggctattgggccattatgtaaaataggcccatatattaatgggtttcgttggattagaaatcttaacttgtaggaaaaaaaaaattcacgccggcaaaagaaaagaaaaaaaaaaccttcgccgtcgtttgcttagtcttcttcgctctatcccaacactcgatcaaataatcccagtgagcttcttccattccaaggtacgaatcgataaagtcatcaaacctataccttttcaggatttaatggtaattagtcaggatctaaatcgtttcttcgaatttgatttcggtgatctagaaccctaatttggtcgggaattttcaaatcaattgatttccctgccctaatttaatttgatgattgttctgtttgcctatgaataagtttgatttcaatggcaaacaaaaaaaagagagacattgatttgaatatttttacttaggtgcattgattctgcagattgtgttaatgtgtgtcactcttaatcttctgtcttatgtttttctcagttgataaggaatttgaagaagcctttgtttaatggaaagcaaaggaagaatccatccatctcatcatcat

SEQ ID NO: 5144 - DNA, 3000 bp, Unknown
  misc_feature (1)..( 3000): cDNA_ID_1827655_gDNA_ID_1620766_Annot_ID_50118 3000 nt of promoter + ATG
ctccttcttttgtgctatttcacgattttcaatcttagggtttgtgctcagagacgtgggggagaagatgagtcaataaagttaatgaggctattgggccattatgtaaaataggcccatatattaatgggtttcgttggattagaaatcttaacttgtaggaaaaaaaaaattcacgccggcaaaagaaaagaaaaaaaaaaccttcgccgtcgtttgcttagtcttcttcgctctatcccaacactcgatcaaataatcccagtgagcttcttccattccaaggtacgaatcgataaagtcatcaaacctataccttttcaggatttaatggtaattagtcaggatctaaatcgtttcttcgaatttgatttcggtgatctagaaccctaatttggtcgggaattttcaaatcaattgatttccctgccctaatttaatttgatgattgttctgtttgcctatgaataagtttgatttcaatggcaaacaaaaaaaagagagacattgatttgaatatttttacttaggtgcattgattctgcagattgtgttaatgtgtgtcactcttaatcttctgtcttatgtttttctcagttgataaggaatttgaagaagcctttgtttaatggaaagcaaaggaagaatccatccatctcatcatcatatgaggcgtcctcttccaggtcccggtggctgtatagcgcatccggagactttcggtaatcacggtgctataccaccttctgctgctcaaggtgtgtatccttccttcaacatgttacctccacctgaagttatggagcaaaagtttgtggcacaacacggggaattacagagacttgctatagagaatcagagacttggtggaactcatggtagtttaagacaagagttagcagcagcacagcatgaaatacagatgttgcacgcgcaaattgggtcgatgaagtccgagagagagcaacggatgatgggtcttgctgagaaagttgctaaaatggagactgagcttcagaaatctgaggctgttaagttggagatgcaacaagcacgtgctgaggcacggagtcttgttgtggctagggaggagcttatgtctaaagtgcatcagttgactcaggaacttcaaaaatctcgttctgatgtgcagcaaatacctgctctgatgtctgaacttgagaatctaagacaggagtaccagcagtgcaggtaatggttgtagaatggaagtttctgatatcactggctcccgacactcttcttatagttattgagtttgtcagcttttgtatcatcctcttatgaaggttgggatgaatttgattttatctgattctggcagggcaacatatgactatgagaagaagttttataatgaccatctcgagtcacttcaggcaatggagaagaactacatgactatggctagggaagttgaaaaacttcaagcacagttgatgaacaatgcaaattcagatagaagagcaggtatattgaattatttagttagtttctgctctatttagcttcattgttccacgaacttttttcagtaatttaagagttgtatctgtcaatcaaatgaaggtggcccttatggtaacaacataaatgctgaaattgacgcttctggacatcagagtggaaacggttattatgaagatgcttttggtcctcaggttcgtgagtttctctttgctagctcgtctttttgagacccattatagttttccacattagttgatttagatgtgcttgagctatatacgttttgttacttttgcagggatatattcctcaaccagtagctggtaacgcaactggaccaaattcagttgttggcgcagctcaatacccttatcaaggagtaactcagccaggatacttccctcaaagacccggttacaactttccaagaggccctcctggttcatatgacccaacaacaaggttaccaacaggaccttacggcgctccattcccacctggaccatctaacaatactccttacgccggtacacacggaaaccctagtcgcagatgagtccaccagctaagagtacatatataaataactcaccagctacagattccttcaactgtggaattgttgcctgtttggtcccataatctttatgggtaaagagaagttggtacagtggtgaacgttgagtgctattgtttaactgattttgttgagagcttgacttttgtgagacggttttcaacaagttttgtgatacagagagatgtaacatcgggaaagaaaaaacaaagaaagagaaatttgttgtttgcccttcaccattttgtctctatgactctatgtttcactcagttaaaaagtttacaaatgaatcgaaagttaaatttatctttgtaatactgtagtttctagttttagtttacttttgaagggcccattttattttttattttattttgtgagaagggcccatttcatatatatatatatattatttattttatttttggacagaatacgagttgttttaaaaaaaaaatatttttgaaacaccgtccgataaaattattgaaattttttgatatttttaaattcccgccagactcccatctaaatttcgcttctcctttagccatttgcttccattgtcacggacctgagaaagaaggggaagagagattgaagcaaacaaagagataatcgcagcaactttgtaccaattagaccaggtaattcttctccaataaagaaattgcaatttctaaggtttcattgttcgatttctgtaaaaaggtttttgatttctcaattcaattgctgaaatttggttcagttacctcgattttaagtttagggtttaccgattctggcccatttgatacgaaagatgtaagcttttcccaatattgaatccccttggctatataggggtttaatcgcacaatttgatttagaagaaattgttgcaatccccaatttacgtttttcatttgggtctgatatttgtaggt

SEQ ID NO: 5145 - DNA, 3000 bp, Unknown
  misc_feature (1)..( 3000): cDNA_ID_3074727_gDNA_ID_1620766_Annot_ID_167351 3000 nt of promoter + ATG
tgttattccatgactttgatagaacaagatgttatcaaaaacatatatttgttccggctgtgtttaaatatatttcaaagtatagggtgatcattgaaaacttgaacattctgtacatcacatacaattaaaaaggttcgaatagagccagaatatgtgtactgtgatatctagttaatcttaatgattataaacctttgaaaaatattttcttttttcttttgtcaacagctttaaaactttggaaaatcttactaactaaataaatatgaaaggaccacgtaacttagaacatctaactttttcttcttttaaaagacatagaagattagctaatttaatatcggaataattatgtttttcatatttagtattaaaataatacttttaattagtttgttaattttcttaattttatttatttaaacatataagtaaatctaaaagaagtcatcgaagaaaattataagtaaaattattttttaatttaataataaaatatttgttatgatcccgacaactgcctagtagttttgtgaggacataaaggagaacagtgtggacaggaaatgaaaaagaaaaaaaaaaagaaatatagaagttgaaaattgtacgtgatcttgaaaatatctcttacgacgcaacttatgacttatgattccatattcttaagattattttaactagttagaagcatgaaacatgtgtagttgtgtacatcaatatgcaaacagctatctcatacgttttttcttttggttacagatagccgtaaaaaagaaatatatatccatcaagttggtaaaaattggtgagttttctaattcttgattcgatcgtaatttgtgagttttctaattcgtgattcgatagtaatttgctttaaacaaaaactacggattggttgaaacaaaatcactccattttaactagtatttagtctgttgccgagagactttatgatttcgtaggctttgaactaaaagaagcagagagtcataagatgaatttgttggaggtaagtcctcggtcataaaccaagcacaagagggaacaaaatcaatattcaagttcttaatgaaattagggttaaagcttacaaaatcttagaattgtatatgtatttgttgtttaagacaggtttcattttttgttattaatatgcataattactagaaccaaaactctttttaatccagagaaaagcaaatgttcttgcaaactttctcgtaaaactgcttttcagtcttatgactcctattgatgctaccattgtttaagcttttggtcttttaaataaatacggttggtcaatctatatatttatcaaccatcgaagggtctacaaatcaacaagtcatctctgtaaatggattggctaaacctttgactactttgcaatttgcattcgattatatggttagatattccatgttatgaaactttaatttacattggtcaaataattatttgattttgggccttataattgttgcagtggtccttaatactattcatttactataattaagactagcaactgactttattttaattctgattttgttaccaagttaagcacaccatctccaaagttccaaaaaggtaaggaatttattattaagaaactaatataagcatttgattgatgcttcatgcgatcgtattctaatcatgattctaaattgtaattgattttattattgtacataattagatacgatataataattaatgtgtaaactcacttatgttaattttgaaaaattatggagtgtgtgtgttatatgtgtctataaaatttgttttcgtgttattttagggtatttcttttaaattattgaccaaaatcacttggctttgtctcaattgtgatcatgtatattagatgtgcaaaataacccttacttaaataattaactctatctctcgtggtctcatctaaatgaaccgcaaggatgctcgccgcgacatcaagtttatatcacttttcgtggagaacagctacgccacaacttcgttagccatctcgtggaagcccttaggcgaaatgcgatcaatgtgtttatagacaatgatcaagagcttagaggtgaagatatcagcattcttttgaagaggatcgagtattcttgaatctccattgttgtgttctcgagcaggtacacagaatcgaggtggtgcttgagagaggctgtgaagatcaaagactgatgtaattttaccttacttgcctttcttgcctgttggcacaatccattagtcaagtttgatagtgaaagcaatgccaatgatcatcgtcatgttacttaagtcatctcgtatcgttcgattcaaattagttgtcgtttaagtttttgaagcatatactaaaaaaacatttaagttttcagttgtcaattaataataataaaaaaaaaaggaaaatgatgatgggtgagttttataatagttacggtgaacttggtcacattggataatttgtcattgttcttgggcggaccaataaaagcctctcttttgaatcccccacacagatctatcgcctcttcttccctcgtgtctgccagaatttttgtttcccgttgataaaggttaaacctttcttcttcttcttcttgtttcgatttcaagttcttctctttcgtgacctacggtgccgtttcatattccctaatttgattgaaaagggttgcgcaagggctttgaagtgaaacacttttgattcttgttgttgcttcaagttttcatttttatcaattgggttttggagaaaacactatgagctgtgattgaattgtctagctcgaagaatcttgattttgtttacacagagaattggtttcttctttcttgatgatagtacaattggattctgaatgttgtgtagagtttttggaattgctcattggtgtatgcttttgttatgcagggtttatctttggtggatgattagtgaaactttttaaggagataatagttcacatgttttagttaaaa

SEQ ID NO: 5146 - DNA, 3000 bp, Unknown
  misc_feature (1)..( 3000): cDNA_ID_1827663_gDNA_ID_1620766_Annot_ID_167345 3000 nt of promoter + ATG
gatggtttccagtacatatactataaaattttgtgatgatacaaaatttaatatttgttagtactatctatagcaaaattttgtacgtgatagtataaattacataagcggaaaattgtactattttttggcaacacctttcgtaactaaaatggttcaaaatttaaagcggatatacaaaatttacttgaaattaaaatgtataactaaacgagaaaaataagaaaaacaaattgcttattgctcacgaactccgttagtagacaacatacatcttcaccgattcagaacagtttgtggcaaatgctattgtcatcttttgttgatcgatcagacagtatataactgatcaaatgagtgcagtctaattcagattatatcggagagaggcttcttcgtttgttttgagcttctataatggatcacatatcttcaaagcaaaaccatttcaaacatgcaaataagtttgtgttttttttccaagaggcatctactagcatatatatagaaacattatatgctctaattagttatttcgttgtttgcttcgcagttcaatccgaactaaaaccaaaaatatcaatttggtcagtttggtttgttctggttttacctaatgctgagggctactggctaggtacacttcctcaaaaatttctattttatgaattaaaaagtatggactgtatggttgaccaaatcagaggcttctgtgagggaaaaaataatcacataattaatatctatatatatggtaacagcatcataaaacaaaaccaagtttcttatcattaacgaatctactcttctcacaattccttgtttagttatttctcaactatggattcttcccccgttcaaccaggaccaggtacgttcaagctaattggtacctgatgagttaagccaaaatagtttgtatattgcttttgattatttaagattcatgtaattaccttatatgaaattaatttatcttcttcgtcatttattcagttcatggacaggatgacaaacccaaaacggtatataacctatcacatacttatgaactgttaggatccagcaactatttgctggtttttagaaagatctgagaggaaagactaatcaatttcttgattattttccttcatcagattaacaccagcaatatcaaaggggcaaatattaagaccagcaatatcaaagggacacaagacaaaggcaccaaataaatcaagcacggaactcgaaagatgatgcatgttttcttgtctaattattgtggattgaatcatttggattgggttaccaaaaaaaagagagaataatttgaattgacgttggaggaatctttcttcctcttatcgttttcttcatatttctactttttatcattttatgtaacttttgtaccagtatctattcaaatgccattgaaataaaaatatggtttcgtattccaatgttgttttactcacatatatattaagaagactttttgcccaaaaaaaaatatattaagaagacttttgttttattctaatttttttttaacatatgtagctataaagaaaaactacaaaaacttgggaaactatataaacttataggattgaatgaattttcatttattcgatgagaatcatagtatattttctttctgtttattttattaatcataatttatttaaaatagtttgacatgaagtaaacttatgagattactattaattattaaagttttttaaaattaatttagtgaaacgattgacaacgcaccctcttatgcaagtataatatataatagataaaaaaatataaaattataaatagcgcactctcttgtgtaatttttatttttctaatcccaaattgccattttttaattcgaaattctctctttgttatcagatccacatccttctccaatttgtaatttttttaaaaaaaagacttaaaaatcctacttccatagctcatttacatccgtatcacagtaagcttgtgtttccttaattttgtgtcttaaatctcataagcataaagacgaacttttacaacaatttcttttttttcttcggtatctctttgatttttttttaactattattgatgttgaaaatataaagctcataagcaattggagatgggatctcaagacccttgtatatacagagtgccaagccagttgcgtgaagtgaatccagaagcttatagacctcggatgcttctcatcggccctcttactcattccaagaaacctaaagttcatacggattcaaggtacgcagacatagcctggacgacctttgtagcctataatcaatttttttttttttgcatataatcatcttcttaacatttatttcatacaacgtatttttttttaatcgtaagaaagaaaaaaagaagaagaggacttttgttaagtttttggctgagttttaccctctttgttttgttagcaaaaaaaaaagtaaaaattctgcaatataccactttcagtttgctattgttcatatatttcgtacaaatttgtataatctatatatatgtaagtattcatctctattgttttgtggtacttttgagaatatctcaaaacataacaacgaaagtaacattaaatccggtaatgtcaggattttaattttgttccgagagctttttacgaactacattttacaatcaaattaacatttaaaccaaacaaaaacaatttgcagttatataaaacagaaaacgtaaacagattaatgagtctcttcaagaaaaagtttagtaaaatcttgattaaagtagaatccaataacatcaaaatttaacagagcttaataacatattgattgaataacaacaaattcttcataacattagaacactctgtaaatcacaaaccaataacaccactttagtctctttagctcctacttcatatcttttgtttaatgattaattacttacacaatatagatattaatgtttagatgctttattaggtatctagaatataag

SEQ ID NO: 5147 - DNA, 3000 bp, Unknown; identical to SEQ ID NO: 5141
  misc_feature (1)..( 3000): cDNA_ID_2144243_gDNA_ID_1620766_Annot_ID_167343 3000 nt of promoter + ATG

SEQ ID NO: 5148 - DNA, 3000 bp, Unknown; identical to SEQ ID NO: 5140
  misc_feature (1)..( 3000): cDNA_ID_3075821_gDNA_ID_1620766_Annot_ID_167341 3000 nt of promoter + ATG

SEQ ID NO: 5149 - DNA, 3000 bp, Unknown; identical to SEQ ID NO: 5139
  misc_feature (1)..( 3000): cDNA_ID_1827675_gDNA_ID_1620766_Annot_ID_167340 3000 nt of promoter + ATG

SEQ ID NO: 5150 - DNA, 3000 bp, Unknown; identical to SEQ ID NO: 5138
  misc_feature (1)..( 3000): cDNA_ID_4359960_gDNA_ID_1620766_Annot_ID_167336 3000 nt of promoter + ATG

SEQ ID NO: 5151 - DNA, 3000 bp, Unknown
  misc_feature (1)..( 3000): cDNA_ID_1827749_gDNA_ID_1620767_Annot_ID_50124 3000 nt of promoter + ATG
attatttgcttatgctctccagataaccttctgcaatgtgtttcagggaaagctgcaagatgggaaagaaattgctgtaaaaaggctttctagcagctcgggccagggcaaagaggagttcatgaatgaaatagtactcatctcaaaactacaacataaaaacttagttcggattttgggatgttgcatgtcgcccattagaagttgagagatgtgtgcagattggtcttctctgtgtccaacaccaacctgcagacagaccaaacacacttgaattgctgtccatgctcaccacaacatcagatcttccaccaccaaaacaacccacatttgtagtgaacacggtagttgatgaatcaccgtctaagaggttgatcactgtcaatgagatgacccattctatgatcctagggcggtaagagattatgtgatgaaacctgtagagtgaatgtgtgtttgattgttcacgaaaggaatcagttttcgaatgtatataacttaacctttcatgctttttgtaaaagatttttcacttaagtaaatagagaaaattactatagatgagcttccaatttggttgaccaatgatttactatagagtttgcatttccagttgttctccagcagaattgtctaatcttgtgaggagcttatctgcagagccaaatgagctcataattttgggtttccattggttagatactatcatatcctcatagtataaaagtagaattagtcaatgccttaaatctaaataagggagccatgattgaatttgcacgtattaaaagtgaagaagaaactcaagtccacaggagaaaagtgtgacactccaaccaaaacaactcataattggtactaacaaaatatttcacatagattccaaattttgattagtgtatagcgaaaaaggaaaaaactgggcttgttacatatcttcagctcaattcggaggaaactgatagatagtaattccaagacaaagatgttacatgagaggcttttgagtagattctaactttagattcattaaagtatttactaaagagcaatagtcataatattgagagaattgttttgatggacaataaaagctgaaagttaaatcctaagcatataaagaaagaatttgcatactagcaacaagacatgctaaacattgagggatcacaatacgtagttccttccttggaccggtatcgggatgtaacatctagtcatcataagctgttgctgatgctgctgctgctctagttgatattgctgatcatcagctcttcttccagtactctcctttctactattgaccaaatcgaaaatcaacttagtgaagacacgagccgtcaattcgctgtctgatccagcgtgatgagcttttccaacacgcctcatctgcaacacatccgctattctctgtagtccgaaacggctacttagtccgctgcataatccagccattttcttcacatcataaacaaaccttcccaaaagctgctggacggtttcatcaaactctttcgaagtctcgggtaatggttttctagttaaacctttaagtagataagctttgtcgtaagagccttgaaaagtcacccatctcatttttccatgtttctcattgagaatctgagaaaactccatgaagaactcttcgattccaataccttcttctctgatcttatccagatccaaaccattgttttttaaaaacgctatagatttatcatttttcaagctcttagattcgttgaaatctgacaagttgatctcccaggttttagtgattcctttgccgaatagcgttaaccctaactggatgagatgggtgttgtccacattgaatttcatgtctctataacgaatttcatcacttgcgtccatgggagtctcctttaagcatccgggaaactctgtgtcgatagcgatggaattacaatgtttcaaacaatctcttatcgaattcatctctgcttgcttgttccatctccaaacttcaccgctcatctcgaacgaaactaagaaactgtttgtttatctgaaagagaaagtgagataacaaatgaattttatttggttggcgttatattattagagaatttatagggattagattaagacaccgacttcagtttccttatttttaggatactataaagttttcattttttttccatcaaaagttcgtgttgacttttttgactcctaattcttgttaaacacgagttttcaatttttctcttaaaattcaaaaacaaaaaaacgcgtggttccgaagcggttttcaatttttaacactaaaccgaattaaattccttgcccgaaccgaattaaattctaatttctctctcaaaactcaaaagccttgtttccgaagcggtttacgatttcaacgctaaaccgaattaaattcctattacaaattaaagtctaattttccatcccgaaatacacgaaattgacaaaagactttattttaagtcttcccggaaggttcttctctgggttagtggcttgacgacacaagtcaagcaacctgtcatacactgacacaagtcaatcttgactgttgaattattcggctgcttttggatagtgacagttaagcccatatggttggagtacgaatcaatcgattggggtcattaaggtcttcaagacatcaccgaagctctgactttttgttatgcactgcaagtgttcgaggaaatgcctaaacgagataattcatagtctgcagttcaagaaaaatataggttcttctgggcctaacaagctagtaaggactggaacaatgaaaacgttgcgtatctgatacggtaatgacttcttcgtgccaatgtatctatcatgtatttattaaataatgcatatttttggaaaataagtaaagtagttctgacaagacacagtgttttttttttccccggctctcttgcttcatacacactaatccaaaaaagatagttattggagaaagaaaaaaacaaacaaacggggacg

SEQ ID NO: 5152 - DNA, 3000 bp, Unknown
  misc_feature (1)..( 3000): cDNA_ID_1827737_gDNA_ID_1620767_Annot_ID_50127 3000 nt of promoter + ATG
acgaacttacgatatatcgtgaaatacaacaaatctacactaaactgacggaattttctatgttctctttggtacattggttttggctggttttaaatactcttaatatgctcatttggcactgactcacaaattctaacccaaatttcagctcatatatcagaagatgcatggaggaatgatttgcaatcacaagacgtcccaggtttagaattttttgagatgaataccatacaaactgccaccagtaatttcagtctatcaaacaaactcggacatggtggctttggttccgtttacaaggcgagaaacgttttatcctattcgctctttttcttttctgttttttctgaagatgacatttgcaacttttttcagggaaaactgcaagatggaagggaaattgcggtaaaacgcctttctagcagctctgagcagggcaaacaggagttcatgaatgaaatagtactgatatcaaaactccaacacagaaacttggtacgggttttgggatgctgtgttgaaggaaaagaaaagctattgatttatgagtttatgaaaaacaaaagccttgatacctttgtttttggtgggttacatcttgcctctttcttgtaggtttcctctggaactgcttattttatagtttttacatggtatttttgcttaggttcaagaaaaaggctcgagcttgattggccaaagagatttgatatcattcaaggtattgtgcgtggacttctctatctccaccgtgactcacgcctcagagtaattcacagagacctgaaggttagcaacattcttctggacgagaaaatgaacccgaaaatatcagattttgggttggctcggttgtttcagggaagccaatatcaggacaaaactcgcagggttgtgggaactctgtaagaaccattcttcgataacatgataaactaattcccttgtcatgatagtcatatgtgaaactatgtgatgtttgcacagaggatatatgtctccagagtatgcatggactggagtattctctgagaaatcagacatctacagcttcggagttcttctgttagaaatcatcagcggagagaagatttcaaggttcagctatggtgaggaaggaaaagcacttcttgcatatgtaagtcagcctttatgttttcttgcactttccgattttgtaaaaggtttgttgctcttgtattgttaagatctgaaaccaatgcaggtatgggaatgttggtgtgaaacccgaggagttaatctcttggaccaagctcttgatgattcttctcatccagccgaagttggaaggtgtgtccagattggtttgctctgtgttcaacatcaacctgcagacagaccaaacacacttgagttgttgtctatgcttaccacaacatcagatcttcctctgccaaaacaacccacatttgcagtgcacacaagaaatgacgaaccaccgtctaatgatttgatgatcactgtcaatgagatgacagagtctgtgatcctaggacgttgaacatcaatgtgtgatggaaaattttagaattggaattattctccaaaggatcaaattttctaatgttgctaacttcaacgtagattatttcattatgttaaaacttaaaagagaagatcacatccaaaattatgcaaaaaggcttgttcaaagagaagagagaagagttggtcatttcctaaacttccaatttggttaaccaaagattatccagttcctgtttcgtaagcatctcttgtgttttacttcgatttcccgattgatcagtgtcattcgatcacagctcaaattaagctaaagacgagaaaccataccagtgaagaagaagaaggagaagagtagaacctgatcaagcatgtcctagaaaccataccagtgaagaagaagaaggagaagagtagaacctgatcaagcatgtccttgaaaatagagatttgacatagaatcgcacctgaattctcgatctccaaatctctctatctctctctcaactctcgtgcttacgcttgttttcaaattcaaaaacataatcgttaagagttgagttgggtgggggggggggggaataatattttactgggccttatgggcttatattggccattcgtattttggaccttttaatattcgaaaatacgacccgattcggaatgtgtttggttcggtttgtatttttttgtggtccggttcagatttcgagtttggatttggagaaaagcttgtgttcgaaattctagtgttgtagaattgactgttgaagtcgtcttcttctctccggcgaaactggcacaccaatattgactgtagaattcttcggctattttggagaaaacagtcacgcccagtcgcccagatggttggagtcttggagatggaattgggcactagtggagctctgaaagttttgattatgcatttcaaatgttcggtaaaatgcctgaacgagaattaatgtagtctccaattcaagacagctgttccaatgaatcaagtaacatttaaagacgagtgttgatgtttatcatttgcagattctggaaactaagagctggcgacaagaacatgggaacatcacgggatttttaatctgcggtcaatcaatggattcagacttgtgaaagttctcgtctttcgatatggttgcagagtatcggtggctatctttcactggttctcagcgcaagaagctaaacggacatggaaatgacaatgttgcgtatttgaatgggtaaaatagttggactttgtttgttgaagttatgtaactattttgataaaattttgtttgtattcattaaatagggtttaacttgatcctgtataaagataagtgtggttgatctggtcaacattgtttataggtgcttgaaaatagttctcactaagtccctctgtgtttttgttttggctttcttactctgtttgcttcttaaaataatctgaagaagatagtttttggagaggaaaaaaaccag

SEQ ID NO: 5153 - DNA, 3000 bp, Unknown
  misc_feature (1)..( 3000): cDNA_ID_1827733_gDNA_ID_1620767_Annot_ID_50128 3000 nt of promoter + ATG
agcaaggatctaatggacacaaggcaattttctgcagcaggagaacttctttccattcgtcttgcacgttctgagctaggtatgacttacaatataattcaaggaccttttgtatcttttgtaattatatcttccacttctttgatattgatgttttcgatagaagcatgacttattgttcaattcttatcctaaattcctcagatgtaaataagcgcaagatgaccattgttgctagtacagtgagcctgaccctattcgtgatctttggatttgctgcatttggtttctggagatgcagagtggaacataatggtaacacattgatgactttactatcgaacaatctctcactgttcatctaatcatttggttgtcaataaaattgctctgttacatttgttataagatatcgttaaataaaaaggtgttttttccactactaaattgactgacttgtatattatttttctggtacattggtttcggcctgttttaaaaactctgaatatactcacttggcactgacacacatattctaacccatattttagctcatatatcaaacgatgcatggaggaattttctgcaatcacaagacgtcccaggtttagaattttttgagatgaatgccatacaaactgccaccaataatttcagtctatcaaacaaactcggtcctggtggatttggttctgtttacaaggcgagaaacgttttatcctctttgctctttttcttttctgtcatttcttgacatgacatttgcaacttgtttcagggaaaactgcaagatggaagagaaattgcggtaaaacgtctttctagcagctctgggcagggcaaacaggagttcatgaatgaaatagtactgatatcaaaactccaacacagaaacttagtccgggttttgggatgctgcgtcgaaggaacagagaagctattgatttatgggttcttgaaaaacaaaagcctggatacttttgtctttggtgggtcacttcttacccctttcgtgtagttttcccctttatatctggaatttcttatctgatagcttgtatacttagatgcaagaaaaaagctcgaacttgattggccaaagagatttgagatcattgaaggtattgcacgtggacttctctatctccaccgtgactcacgcctcagagtaattcaccgagacctgaaggtcagcaacattcttctggatgagaaaatgaacccgaaaatatcagattttggtttggctcggatgtttcagggaacccaatatcaggaaaaaactcgcagggttgtcggaactctgtaagaaccatcccttgataacatattaaactagattggtagtcatatattaaattgggtgaaactatttgatctttgaacagaggatatatgtctcctgagtatgcatggactggcgtattctctgagaaatccgatatctacagtttcggagttctgttgttagaaatcatcagcggaaagaagatctcaagtttcagctatggcgaggagggaaaagcacttcttgcatatgttagtaagactttatgttttcatgcatttgcagaggttgcaaaaggtttgttgctttgatattcttaagagtggaaactgaaaaacaggcatgggaatgttggtgtgaaacccgagaagttaattttttggaccaagctcttgctgattctagtcacccatctgaagttggaaggtgtgtacagattggtttgctctgtgttcaacacgagcctgcagacagaccaaacacacttgagttgctgtctatgcttaccacaacatcagatcttcctctgcccaaaaaacccacatttgtagtgcacactagaaaagacgaatcaccgtcaaatgattcgatgatcactgtcaatgagatgacagagtctgtgatccaaggacgttgaaactgtagaattggaattattctctataaggatcaaaatttctaatggttgtaaaattacatcccttcctttattattcagaaactttttatctatgtggaaactgtttggtaaaattgactaaggtatattttattaggcatgattacatgattccacttcccactaaattgacaaaatactttgctcaaaaacaaatcgttgactctacttcattttaagacttcccgggagattattctcgggcctagtggcacaccaatgttgactgttgaattcttcggttcttttggacagaaacagttaagcccatatggttggagttgggaatcagtcgattagggtcattacgggtctaacgacattagcgaggctcggaggttttttttatgcactgcaagtgttcgaggaaatgtctaaacgagataaaacatagcctgcatttcaagaaagttattgtgttgtaatggtgaagcaaggattggattctttcgattgatgcagaactaataaggacttgaacaatgacaacgttgcgtatctgattgggtaaggacttcttcgtgccaatctatcatgtatgcattgtttctattattgatgcagagctaataaggacttggaattgtctcccactcattcacgttgttatttgtttagtgagcagttactttctgaacaccttttttgtgtatttaagtaaatgattgtctttgaatggaatagaagaaaatttgcagtaacttattctaaagtctttgataaccaaagtcttcttctttttgttcttgatagcattgaacaatgacaacgttgcgtatctgattgggtaaggacttattcgtgctttgacacttttgttctctattatcaaataacgcatgatttttggaacattagtaaagattattaaataacgcatgatttttgttctgtattattctcacaagtcagtccctgagttgacaaaacaaaaaatgtgcaaagagagtttttttttttttttttcttgctttctcgctttatgtaaagctaatctaaaaaagatagtttttggagagaaataacaaat

SEQ ID NO: 5154 - DNA, 3000 bp, Unknown
  misc_feature (1)..( 3000): cDNA_ID_1827726_gDNA_ID_1620767_Annot_ID_50130 3000 nt of promoter + ATG
aagttgagagatgtgttcagatcggtctgctctgtgttcaacaccaacctgcagatagacccaacacacttgagttgctgtctatgctcaccacaacatcagatcttccaccaccagaacaaccgacatttgtagtgcacaggagagatgacaaatcatcgtctgaggatttgatcactgtgaatgagatgacaaagtctgtgatcttagggcgttaagaaatgatgtttgatcttagggcgttgataacaaacttcaccttttattctttttgtaacatattttttgtatacatgaacctccattctggtgcaccaatgatccatggtgttgaagataatgtgaccagaaacactaatcagataatagattcatcatttcatcttccatgtaagccaaaatagagttcttcacatctaagttcttctcctccaacatccgaacttcgttgtcgagaaactctctttccaacaataaattcctgaattcactgtcttcaatctccctttgaaacccaaaacacatcttcacaaaaccttccctgtgtaaaaaaattccataagcaatgctttatcaatcagaggatcaagaacacaaatgcttgtttacaacacaatcgatgtttaccgcttctcggttagtcttgtaattagctcactatgctcatttctcaaacgacaaatctcatcctccaatagcttcagagagtttcttgaatcagctttaagaaaataaaacatagtgatagagatttaacaacacagaaacaaaaaacaaattcagaaattagaagcgactcaaattcagaaacctgtaacggagatcaaaccattgatctcgaactgagaagcaaggaacgatttagtaagctcagcttctttgacagacagagccgattccgtctcagaacaatttccgatctgtgattcgatctctcgcgtgacctgaatgtttgcttcgatttcccgattgacctgtttcattcgatcacagctcagattaagctaaagacgagagataccaatccagtgaagaagatgaagaatagtgaaacctgatcaagcatgtccttgaaaatggagatttgacatagaatcgcacctgaatcctccatttcctcttgcttcctcttcttttcaaattcaaaatcaaaatcgttaagcgcgctatgggaagataagcttttactgggcctgatgggcttttaacttaaatcacggcccattgagaccttgtgtttcgtcgcaaatcgaatattccgatctttcaatatttttggaaacacgaaccgaatatcggcgactttgatcgagatcgaaacaatggttgaatcggagaaaacgaaacacacatgtctccatcttgaaatctccggcgccgatccaattttcgtcaaaggaacatggtatcactctcgtttcgatatctccgtcaccgatggctccttcacttggacttgcaatgcgacggaggaggaggtagcggagagagcagcaatgggaccagcctgtatctgagtatttagagctcgccgagcaatacttagggtttcagcagcctaattcggtctatggtttctccgatgctattgagggatctaaacggctctcttggacgtttgagaaggaagggactaaacttgagtggaggtggaaatgtaaaccatcagatgatagcaagaagatcactgttaggattttggattttcttatggaggctaacataaggctaagtgaagaagttgtgaacaagacgagatcgtttgagaagatgaaaagtgaagctgagagatgtctcgcgcaaggtgaaaaactatgcgatgaaaaaacagagtttgagaatgcaacttatgcaaagttcctttctgttttaaatgcaaagaaggcgaaactgagagcagtaagggacaaagaagattcagtgagagcagttgaggaggaagagtcgacatacaaagctgaaagcttcgagagtggaagaagtgatgatgagcagagtggggaagaagcgtcagaaaaggcaacaagcagcaaagcccgtggcggaaagagagctgcacggagctaagacttagagattcccctgccttgagatttcaggtgggagattccattcagtgttttgtgaatctcatagctaggaaatgagagttttcgttgaaaaatcgctagaatctgtattgcttgtgaaagaaaatgcaatagacttggagataaagtaatttttaatttcggatccagtttggtttggttttttaatttccttggttcagttcagaatctggtttggtttttaaatttccttggttcagttcagaatcgagtttggtttgcaatctttcacgtgcgttcgaaattgtagaatgatcgtctcctcttctatctggtgagtcggtggcaatggtacaccaatattgactgttgaagtcagctattttggataaaaacagtgaatccctgatggttggcgttggaaatggccatagtgtgtagattggggcattattgtacaacggtatctctgaacgtttatgattatgcattacaagtgttcgatgaaatgcctgaacgagatttcacgtagtctccagttcaagaaaactggttctactgaaccagtgagaaagagtgttaatgtttaccattcgtaggttctgggtatatcaatctatggtcaatcaatgcgttcagatttgtgaattttctcatcttttgattggtgaagagtatatatataggtgcctatgtttcactggttctcggcgcaacaagcttatgtagtcatgaaaaatgacagtgttgcgttattgactgggtaaaaagttgactttttcgtggaaatgacgtaactattgacaaatttagttggttttattagatatggtttaagttgatcttgtatatcagaattttggaacaagagtactgtctggtctagtctggtcagtattgtatataggtgcttgaaaatagtcttacaagtacctgagtatttgtttcc

SEQ ID NO: 5155 - DNA, 3000 bp, Unknown
  misc_feature (1)..( 3000): cDNA_ID_2992534_gDNA_ID_1620767_Annot_ID_50132 3000 nt of promoter + ATG
cttggtatggaaccgggagctggtagacacagttcaatttttatctgatggggaatctctctcccttcggcttgcaagttcagaattgggtaggaatgaaaggcccttattacatttgaagtttcagctttctttatatgatgttttttccctctgcagcatggttttaagtttttgtttttctggtgattatttcagctggtagcaatcgaacaaagattattctaggtactactgtcagcctatctattttcgtaatcttggtctttgccgcttataagtcctggagatacagaacaaaacaaaatggtgagacacaggcactttgttctcactcactctctttccttgtcctcttttttaatctaactcggtaccaaatccgaagcaaattaatctcttcctcttcatctgatacacactacatttctagaattcttaagttgtgtcccaaggtacagtctcaggttgacagttcttttgggaagtctatatggtcagtttaaagctagatgtcctaacggttaatatgttcgcttctattgaaagtcaatgcttatgctaataaactgctacaaattaagcactaatacatgcacacttgttactcgtagaaccaaatcctatgttcatccacagttcacaagatgcatgggcgaaggatatggaaccacaagatgtctcaggcgtaaatttatttgatatgcatactatacgtactgccaccaataacttcagttcctcaaataaacttgggcaaggtggatttggtccagtgtataaggtaatgtatcattctgttctatttaccttttcttgttttcctattctgtattttcttcttctgtagatgactatgtgcaactattcttccagggaaagttggtagatggaaaggaaatagccgttaaacgcctttctagcagctctggacagggtacagatgagttcatgaatgaaataagactaatctccaaactgcaacataaaaacttggttcggcttttgggatgctgcatcaaaggagaagagaaactgttgatttatgagtatctggtgaacaaaagcctcgacgtgttcctctttggtcagtcctctataactctattccattgacctcttcgttcttccatcatatgagaattatgaaatgtgtcgttgtcactactatcactgatctgtactatcttattggatagattcaactctgaagtttgagattgattggcaaaagaggttcaacatcattcaaggtgttgcacgtggacttctctatctccaccgtgactcacgcctcagggtaattcaccgagacctgaaggtcagcaacattcttctggacgagaaaatgatcccgaaaatatcagatttcggattggctcggatgtctcagggaacgcaataccaggacaacactcgcagggtcgtaggaactctgtaagaaccattcttcgaaaacattctctacaagattcatagtcatgatattccatataggtgaacctatttgatgtttgaacagaggatatatggctcctgagtatgcatggactggggtattctctgagaaatcagacatctacagctttggagttctactgttagaaatcatcattggagagaagatctcaagattcagcgaagagggaaaaactcttcttgcatatgtaagttttttggtaaacttgcatatgtaagttaagacttaggtttcctacacttgcagagtttcttgctctaatattcttaggatgtgaaactaaataacaggcatgggaatcttggtgtgaaaccaaaggagttgatcttcttgatcaagctcttgcggattcttctcatccagctgaagttggaaggtgtgtccagattggtctactctgtgttcaacatcaacctgcagacagaccaaacacacttgagttgatgtcaatgctcaccacaatatcagaacttccatcaccaaaacaacctacgtttacagtgcactctagagatgacgactctacatctaatgatttgatcaccgtcaatgagattacacaatctgtgattcaagggcgttaaagaaacagtgtgtgatcgaaatttgttcgaatttgaagtgtgggttctgctcaggtaaattaaagtgatcaacttttcttcattaccttttaaaaatattttctctacttgtaaaagagtttgtactctttattgttgtccatgtgctcatgaagctccaatgttttcgttgacttggtcacaaactcaaacaaacaggtcatcatcatttttttattatattctttaacggttttataaatttaagataaacggtcgaaattaaaatcacaatggttaagttcgagtttttgaggcaattgtgaatttgtgagttcatttattcttcttctggtcaaagtttgcaacttttggctacaagcacatatttttctgagtcgtcgtcactgtctctgtctcttcaaagtcccacgatagttgaagtttactttgaatctggctcatctgaattatgcattgaatgtgttcgatgaaatgcctaaacgagaatttaaattggttttatcattcttttgttttttgctggtcttctaaggttttggatcttcactttgcaacttgcaaaacgtttgtcggtaatttccagttttgtgttgtccttctcgaagaatgcaaaagctcaacttcttggcttagtagaaacgagaaagttgacttatgagtaccacacgttattttctgtggacagtaaggttgggagattctttgtcaaggtcgtctattattttattatttttgtttctctctttgctggtcaatagggtattgtttagtacttgtaatattcaaagaagtagtgtgaaccaagatctagatatttaattatctcaggatacgttaacataaaagtttttttttctcttggtctcaatgctcactctatccccatgaagttttgctcatactcaagttatcttgcagagaaatagaaaaaag

SEQ ID NO: 5156 - DNA, 3000 bp, Unknown
  misc_feature (1)..( 3000): cDNA_ID_1827718_gDNA_ID_1620767_Annot_ID_50133 3000 nt of promoter + ATG
tcagaattgggtaaggataaaatacatttcttccgagattatgaaattcaactttctttataatgttttgtagcagcatgatttagcgtttttttatctgtttctggtgaatatctcagctggaagcagtcgaaggaagattatcgtaggcactactgtcagcctttccattttcttgatcttggtatttgctgcaattatgttgtggagatacagagcgaaacaaaatggtaagagactgagaaacttagaagctttctctctctctctctctctgttactctcttttcctctatatcgaaactgtagtaaaagacacttctatatatacacactaattagtctataatctgtcaaatcttgacgttaagcctttggttgttaaactgctacaaatcaagcaatacaacatgcacatatcttattcgtatttctgttgtctttgatactttataagatgcatggaagaatggttttgaacgacaagatgtctccggcgtcaatttctttgagatgcatacaatacgaactgccaccaataacttcagtccttcaaataaacttggtcaaggtggatttggtccagtttacaaggtatgtgaaattatgttttagttcctcaaatggaaagtttggtgttctctagataactttctgcaactttttccagggaaagttggtagatgggaaggaaataggtgttaaacgccttgctagtagttccggtcagggtacagaggagttcatgaatgaaataacactgatctcaaaattgcaacacagaaacttggttcggcttttgggatactgcatcgacggagaagagaagctactgatctatgagttcatggtgaacaaaagtctcgatatttttatatttggtatgtcttttattccatacatctctcgttattccttttccttccatcttatgagacatttttaatgtgtcactttcactaatctgttctactttattggctagatccatgtctaaagtttgagcttgattggccaaagagatttaatatcattcaaggtattgcgcgtggacttctctatctccaccgtgactcacgcctcagagttattcaccgagacctgaaggtcagcaatattcttctggacgacagaatgaatccaaaaatatcagattttggattggctcggatgttccagggaacccaatatcaagacaacactcgcagagttgtaggaactctgtaagaatctgtccacaacaacattcttaagaaaggatttatagtatagtcttatatattgacattttagtgaaactatttgatatttgaacagaggatatatgtctcccgagtatgcatgggcaggattgttctctgagaagtctgatatctatagcttcggagttctgatgttagaaatcatcagcggaaagagaatttcacggttcatctatggtgatgaaagcaaaggccttcttgcttatgtaagtgaaacaacttactgttttaacaatctaatatttcatcaaatgcagacacttccctgtttccttttctaaaacacttcttcacattctttagacatgggattcttggtgcgagaccgggggatcaaatctacttgacagagatcttactgatacatgccaagcattcgaagttgcgagatgtgttcagattggtctgctctgtgttcaacacgaagccgtcgacagacccaacactcttcaagtactatccatgcttacttcagcaacagatcttccagtaccaaaacagccaatatttgcagtgcatactctaaacgatatgccaatgttacaggctaattctcaagatttcttatctgtaaatgagatgacagaatctatgatccaaggaaggtaagcctaaggatcttgttatctcactacagaagtagtagtatatacttgtaaattcatgaacatttaaagcttaagattttgatatctcactctattttcttaagcatgtgatctcataaagccccaatattgcgttgacacgtcatcattttcggtataatattgttattaagcgtcgcaaagataaaaatatgctttttgatgacttctctggcattctcttctctgcattttataagatcatgttgatggaaagtcttcgactttggttacaagcgtcgatgcccagttggttagatttggatttctccgctatactttgtttctttgtaattaaaaaccatgttgcttcgaactttggaacgtttgggttatgcactgaatgtgttcgatgaaatgcgtgaacgagaatttaaaattcaaagttttgggcagtgggggcccaatgtttgaagccgcccatgaaaagtcatacctccactataggaaatcggagctagaactctgcactcttcttcaggtaagcttctcctaaatccaaagtctgttgctttcgatttcatatcagggtaacattctttcccaatgaattgaaaagttcttgtgttggtatttattccccaaatttgattaatctacagaggaaatagaacttttagctgcaagtaaaatgttgcaaaaacgttcttgtgctctgttactttctagaaaatggagaaagttttagctgcaagtaaaatgttttgcttttgtctttctgttactttcctagaaaatgtgttggctttatttatggttaaggcccagagatgggaatatacaaagttatcttctaaagcaacatggaatataaaactagtaaaacatttagttttttgacttctaatttggtgtcaccgtgtgattttgtgaatggaaagatgtgactctagtggtcaacgaggtctatgatttttctttccttttttatattgcggtcacgatggctttactagttattataataatataagttaggagtctccatagatataccatccaagaggtttcatattttatttgttctgttattgcattgactttataaagattcatacattcaaatccttagaagagctcttgcatatcgt

SEQ ID NO: 5157 - DNA, 3000 bp, Unknown
  misc_feature (1)..( 3000): cDNA_ID_1827714_gDNA_ID_1620767_Annot_ID_50134 3000 nt of promoter + ATG
attgaacaaattggatgtttggtatggaatcgagagcttgtggatgtaatgcagtttgttgctggaggagaaactctttccattcgtcttgcaagttctgagttaggtacggcattaagctgagcataaagtaattctaaaaaatttcgagtttcttcgtgatgttcttgtttgctgcagcatggtttacagttttattttatggtgcatctctcagctggaagcaatcgagtgaagattattgttgctagcattgtcagcatttctgttttcatgatcttggtttttgcctcttattggtactggagatacaaagccaaacaaaatggtgagacactgaaatgcgtagtagcccttatttctctgttttcttttcaatcagctacgttagtgtagcctttgaatgctaattttctacaatttagtactgacttggatacttgtaaatcatagattcaaatcctataccattggagacatcacaagatgcatggagggaacaactgaaaccacaagatgtaaatttctttgatatgcaaaccatattaactatcaccaataactttagcatggaaaataagcttggtcaaggtggattcggtccagtgtataaggtaaactttatcatgctttatctactctttttcttttgtcatcctctttcttgttcaccatatgactatctccaactgtggatccagggaaatctacaagatgggaaagaaatagccataaaacgcctttcgagcacctctggacagggtctagaggagttcatgaatgaaataatactcatctcgaaactccaacacagaaacttggtccgccttttgggatgttgcattgaaggagaagaaaagctattgatttatgagtttatggcgaacaaaagcctcaatacctttatctttggtcagtcccttattgtgcatatctctgcatctttccaattatattcatcatgtggaactcttgtacccttgtttatgtgtgaagctgaccaatctgtttttaatttggctagattcgacgaaaaagcttgagcttgattggcccaagcggtttgaaatcattcaaggtattgcttgcggacttctttatcttcaccgcgactcatgtcttagggttgtacaccgagatatgaaggtcagcaacatccttttagacgaggaaatgaacccaaaaatatcagattttggattggctcggatgtttcaaggaacccaacatcaagccaacactcgcagggttgttggaacgctgtatgtatctctgcctcctctatagatagataacaagcgtttacttgtttaaataatcaacctgaggaatttttgtcaaaatgaacagcggatacatgtctccagagtatgcttggacaggcatgttctctgagaaatccgacatctacgcatttggagttctgctattggaaatcataaccggcaagaggatttcaagtttcaccattggagaggaaggcaaaactcttcttgaatttgtaagccattgccctctatatcctccttgaatctgagtataaatcaaaatgtttctaataggactgtgttcatcgaatttgaaggcatgggattcttggtgcgaaagcggtggatcggatctactggaccaagatatctctagctcgggttctgaatccgaagtagcgagatgtgttcagattggtttgctctgtattcaacaacaagccggggatagacccaacattgcacaagtaatgtcaatgcttacaaccacaatggatcttccgaaaccaaaacaacccgtattcgcaatgcaagtccaagagagtgattcagagtctaagactatgtactctgtcaataatataacacaaactgctatagttggtcgataaaagcaatgatcacacatgtctacaaaagaatctcattgtaaattttagaggttttaatattcaaaaaaaggtgaccttggttattgtaaaacaacaaaacaaaaaccatttaatccttatgcacgagggatagagacagagatattacttcaacagtacggcacaaatctccaaaggcacgacgaatatttgtgttatttgagttttgacttaatcttcccaagccaatacaaatcgagagtgtggcttgtttctcacggcctttgaattcttttttatctctaaagttgttgtctttcttttatcatcaattgtgtgttgttgacattgtttctcagccaaagtttgagactttggatcgaatcacttatgcccagatgatctctgcatgattaatcacaatttctttttaaaaaattgtttagtcttgcactatttaaggtttgaccgcttctacaataagatatgcactgaatgtgttcgacgaaatgactgagtgagatttaactttcaaatattttgacttcgtgcggtttcttttttcaacagatttaccaaagagacatgttgaagcgactcgagaaagtaggtacattgaattgctcttaattgagagaactgtaagtaaactaaaatttgtgtactgtgttattattattaagctggcttatctaatagtggttttgtcattatatcactcttaggagattattcgagaaatggaaagcttatgtaacatccaggtaaattctgcaaatgggtcctgtttaattgtgttaatctctttcatggaatggaaggtgacaagtgtgaaagcttaaaagtatttttcagaggttggagaaaaagttgacttctttttagacttaatgcaattggaatgtttcaatgttttattgtttattctgtttaatattagaaaggaacatattgcattattgtaccagagagagagctgaactttgaataagtcaagttttgtgaacaaaagcttggtcaacttattaggtgtcttaagtagaagcagaccccatgaatttttatgtatatacatgaaacttgaggaagattgttctctcaattctttgagttcaccaaaataacgttttttttttgtcaac

SEQ ID NO: 5158 - DNA, 3000 bp, Unknown; identical to SEQ ID NO: 4948
  misc_feature (1)..( 3000): cDNA_ID_2994827_gDNA_ID_1620767_Annot_ID_167379 3000 nt of promoter + ATG

SEQ ID NO: 5159 - DNA, 3000 bp, Unknown
  misc_feature (1)..( 3000): cDNA_ID_3074936_gDNA_ID_1620767_Annot_ID_167378 3000 nt of promoter + ATG
atatacagaaacaagttctttccgaagattattttgggttcaagagaatcttgatgaagatcatcatcatcatcctctgcctgttaggaggaagaagatgggaagaatttttttgtcttttttggaagaggttcgcaactagttttgttagaaaagtttgttttgtttttgtttggagaagagagactaccagttttgggaatcaccccaaattagccgatgacaaatcttttgttaaccaaattagcaaatgtgctaagaatagtttgtgaaataaacaaaacaagacaattttacttggactatgattacaacccaaaaccctatatagtagaaacattaacctgaatcgcttcgctttatcgaggttgttggtatgatgccctgtgaactgaaaccaacagagacaagtcagtgtagaaatattacgcgaaatactcagctcaatccaacacaagttcccaaagttcatatatgatgcaaagtttaagtcattcttaaaagctaaaacctctctttgttaaaactgaaccagaagaactaagttatctcctttcggcctaacccgatgaagacctccaaaagctctcttctattaaacaagtctcagaaactagttctcatccctatttatataagcaaagcactctaagaaggaaatagaaaaatggaattactagatcgcttacaaaaactccaatagctctcttcttgtgctttagctcaagtaacatattctaaataatactcaaaatcacattctctctcagaaggtctgaaccaaagcctggtttactactcaaaagcagcaaaaatgttttttcatgtaaacaccaaaaccaatatctctccacaagattctaaagcctgtatcactcacacacatatctatctacgcttcacaacaacactctagatgtaaaaatagagacatatacacacagaaacaaccatcatatcttcaactttgtaacaccaaatgatccagtttttcctttgaatttgaagaacattcatttgttcctgttacttacctaagcgaaattcgaacaaaggccatcacttggcaagatgtgaatcgaacataagatcgttgattcttgtaatatcaatgtcagagattggatctattggcctgtcttccccattcttcatcaaaggaagaaaattcacatcttctctactgtagtcatctgtcacaacaagcaacataaccaaacaactcaatcaaactccgaaagtctaacaaaactgaaatgagaatcagtaactcaccaaacaaagtattgagagaggttggttttgaagtagacatgaagttgagaccaatgtaaaacaccaaagctactaacagagtcaccatcgaatacatcggcatcgccatggcccagtacttgctcgggtagtaataaatgcctatggactctaagaacttatctggtacatatccccaaattaagaagatcacagtggcaacaacaatcgaaatagatcctacaaaaccataaacctcggaagtttttggtccgtgtacttcttgattcaagcttaacattcttctcggactatattgcaaaatcgttgagaaattgacgaagataagcgatgtgttttttcttaagaaaagaccaatttgaaggacgagacttgctaacactcgaaacctcacaataagcgaatctttcaataaatcaggaaagatgcaatcgaaatctcaaatcacagattgcttaatcccaaaatgcgattatgaaaccctaaatcccactaatggcctcaaaatcttcgaaaattcatttacttttttgcaataatcagaaagttttgggaactagggatgattgggggatgggtgtagggaggcccgcacgaggtgagttctgcaaaagtaagcagcgtcaacacatcggccagcctataacccctccataaattattgcgccaattttgtgttttacgattagcgccgcgaccggttctcaccggacgctttgttttccttactcattagtttaaggcaagtattccagatgctgtctatcactttcttatagtagtctcgataggtctccaacgagttatagttccgatgtgggacaaaaataatacttacaatcacgatactcgttgaatgaaagctactctaataacaaatgaaagcccaataatcaattcaaggcccattttcaattttcttgcaaacatgagtctatttaacataatgcccaaagattttgcaattgtcgtggtactaatatgctaatttcgacatgggataacacacgatgaacttcatttattttatttaccattttttatttttattttattttatatccctaacaacgagtataataacaatatatttgagatctatgtaaagttgtgtatctcttatgaaattttattttattttaggaaaaggtaaactaatgtgggttaaattctagtaaattgaccaattaatttaactttcttaacattatctataatgtaataatacattttcaaggttactgataagtgattcacctaattgcattcgtagaattcctacatctcagtgatgatggaccccaatgagatgtagatgagatggacacaaaaaaaaaatgggctctaaagatcccagcttataaaattctgattaaacaataataacaattatggaaattttccaatagtgacatagaatcatatacaaatagggttagtgtgtaactggtggagtcattatgaacattgtatccaatcaacgaacatttcagtgcgagaaaaaaaaatgacaacacacaaaattttaggccatttcaagaatacaaaatcaggaacaggtcatagaattaggcattagaaccagctaataaacttcagaaaatataatctcccttcaatgaggtaaaagtcaacttttattccctctctatctgtctctctatctctcgtgcacacaacttttagaaagattgtctcgcaagtcacaatattcctaagttgaca

SEQ ID NO: 5160 - DNA, 3000 bp, Unknown
  misc_feature (1)..( 3000): cDNA_ID_1827683_gDNA_ID_1620767_Annot_ID_167377 3000 nt of promoter + ATG
ttataagtcccttcgggccccggagtgttttgagaatgttttcttcaacgttgtttccgaatgtccaaaaccctacaagggccacagggaagtaacagaaagctacaataatataggctacaatggctcccttccacatgggtcgttttgatggattttctggtgttgatggaatcgttgcttgaatttctaaaacaacattgtgacctgcatacgcaaaagccatctcccccaatgcgcctaagaaggctaatggcactgaggtgttgtttcttcttttatatccatattcaacattgttcgcgacaccctttgtcagtgaagctacccaagcaattgtggaatagctatgggaaagtaataaaacataggtcagagacctcaatgttatgtttgcacaagatatatgatatacgattttgtataatcgcgagaagtggtgttctattagcggtgttttggtcttttccttttaatattggttttgagagtattcttttttcacgttaggttttaagatttctttaaatgcaatgtatcgtggcctatataaggtatcttcctcttaatgaaagaaataacttccaacaactaacctaattctataagagagacttggcttaagaggaagcttaaactaatatattctctagttctaaggctggattactgaccacatgtttatcgaggttaatctaaagcacaagctcatgatacatagaaacaaagaggatgagattcacttacctcatagacatgacggcagctaccaaagagacaccggaaatggagttgaaatttttaagaagggaaagcacaaactgtgaagaggcaaagatcaaaatgaagtgtcgaactttcaactttctacactcgtagtctcccacagaaagttgatgaatctttttcagtgattcacctcctgtcaccatatacactatgcaagcacttgtctcaacaagaagttgaagcggcacgacgatgtacaaaccaagctttttgccaaaggctgcttgtcctagctcgtggtacctatcaaaccgtttcccttcaaacatttcgtgcatctcaatcatttgccagaacgtgtataacgttatgacccatgacaggatcaacaccacaactccaggtcccctgaaaacaaaataatttttatatctctagactgactcttaaaatataattctcaggaaaaagatatataccatccaagttctgacatggcgtaagggagaccaagaactccagcaccaactatggcagtgacgttgtggaaagctgaatagtaccaattagcatttcgtgatgctgtaattggaagccaatcttccagctcaaatgattgatcctgtaagtctcttagagttttcattcctcaaatttatatacgcaaaattatcatcttacggcacatcaagcttcaaaagcggaacaaactctctcaagaccaaagtttccaaattcattataaacatgatcatcacaaatagcatacctcaacaagatcttggtttaggatctggtttgacgaacttgggattcctttcattgtcaacttaggaatattgtgacttgcgagacaatctttctaaaagttgtgtgcacgagagatagagagacagatagagagggaataaaagttgacttttacctcattgaagggagattatattttctgaagtttattagctggttctaatgcctaattctatgacctgttcctgattttgtattcttgaaatggcctaaaattttgtgtgttgtcatttttttttctcgcactgaaatgttcgttgattggatacaatgttcataatgactccaccagttacacactaaccctatttgtatatgattctatgtcactattggaaaatttccataattgttattattgtttaatcagaattttataagctgggatctttagagcccattttttttttgtgtccatctcatctacatctcattggggtccatcatcactgagatgtaggaattctacgaatgcaattaggtgaatcacttatcagtaaccttgaaaatgtattattacattatagataatgttaagaaagttaaattaattggtcaatttactagaatttaacccacattagtttaccttttcctaaaataaaataaaatttcataagagatacacaactttacatagatctcaaatatattgttattatactcgttgttagggatataaaataaaataaaaataaaaaatggtaaataaaataaatgaagttcatcgtgtgttatcccatgtcgaaattagcatattagtaccacgacaattgcaaaatctttgggcattatgttaaatagactcatgtttgcaagaaaattgaaaatgggccttgaattgattattgggctttcatttgttattagagtagctttcattcaacgagtatcgtgattgtaagtattatttttgtcccacatcggaactataactcgttggagacctatcgagactactataagaaagtgatagacagcatctggaatacttgccttaaactaatgagtaaggaaaacaaagcgtccggtgagaaccggtcgcggcgctaatcgtaaaacacaaaattggcgcaataatttatggaggggttataggctggccgatgtgttgacgctgcttacttttgcagaactcacctcgtgcgggcctccctacacccatcccccaatcatccctagttcccaaaactttctgattattgcaaaaaagtaaatgaattttcgaagattttgaggccattagtgggatttagggtttcataatcgcattttgggattaagcaatctgtgatttgagatttcgattgcatctttcctgatttattgaaagattcgcttattgtgaggtttcgagtgttagcaagtctcgtccttcaaattggtcttttcttaagaaaaaacacatcgcttatcttcgtcaatttctcaacgattttgcaatatagtccgagaagaatg

SEQ ID NO: 5161 - DNA, 3000 bp, Unknown
  misc_feature (1)..( 3000): cDNA_ID_3075842_gDNA_ID_1620767_Annot_ID_167374 3000 nt of promoter + ATG
gtataattgatttgcattctggaatgtgttgtgttgttcacttggattatgtttttcattttccttttgtattccctaaaaagttttgcatcctgttcagactacatttttacacaatcaacagtttatccgtttaggtaaaatccatttgttggtttctctttcatctttcagtgtccttcttctatctgttgtttccagtatgtttgtgttgttcgattaagtgacagataagtcctaagctatctctagtgtagtggctttcttaatcttgttgcatgttatggttatttcttaatccttcttttttttaacttccctttacgttctcctcctatagattccctctgtttatgatctctaactagatttaagactcagttcgttttctccgctatcccttaagcatcaaatcaaggatttgaatatgcttcccctcagaaaagagatctaggaatctctacagagccaccacaaaaccatccgaaaccaattttaagctcttttccaacattcaaaaggatgaaaaggttattaatagaaattgactcttaccgtaaaacgtagattgcattgcatgatcaaaaacattcaccacaatcctctgtaaaagtctctgaaaactgaaacgtttattttcttgtaaactgtcttaacaaaacctttaacagacatgaaatttcataaagttataatcttaataaattctgatacaaagagagggtcttaataacatgtcccaagtcaaacacatcataaagctttgttttcttccaatgtttccatgtaccaaaaattggggaaaaaaagaatttcctctcctctcaaatttgtaacaatgagcttttatatgttcctccacaaaataagcagttttgaattcaagtgcagttcttgctggaacatcatcaaccacatgttttaaatcattcttgacaagctcaaattgttcgatgtttctaggtttagccgcttaagacactttttcttcttgataactttgttaatttttcattatccaccatacatcatatatatacactaaacttaaccatataacctatggttttatgcaaacctctaaactcatttactagttgggtcttatgtacatttgtggcccaaaagaccatttatacttaaaccgaagtcttcttcttctccctcaatcttggacgcttcttcttcttacgtcttctcttgtcaatcttcttcactttcccatctagtctcaatctctggttcctcaattcgaatttagataataatcatagtttgattccaacacaaatgtcaatctattcttttgacggtagaacattctgttttcagatgaacaaatccttgacatccataccactgtatgttcaacttctcatcttctctagcttcattccacactataaagctattggatatgcaaaagattcatgagggttccaattaaacaataactcaaaatgaaggtttcgttttcttcactagtcccttgagtcatcaaattcttcattgagtcatcaattttttcattaggcatcttaaaaccccccaattatttgcacctggtttcctcaatataaatcttggtgttcattttctaaatcattcacatctttgtcttcaacaaacaaagtctgtaaaatcttcttccatcttctttctctgatccagaatcactaaagacactacttctgaagcttagtgaaggagctgcagaccttggtcctttggagcatcatctactagttctaaccatgacgatacctacatagttaggtttggatcaacatttcggcggtcaaaggttggtgaactgcatcacttcgctgcatattcatgcttttcaagaaaagctattcaatacatcatcactggctagtatggagaatcttcatcatctctatgtcgaaagtagtcatgtctaggagatgtatagattgcaggaaagctaaatggactagtctaatttaaacaatccgacaattccatgctttaccagtcgtctctcagacgtgtttatacgtgagtgcataaatgatctggcttggcttctgtttgcctgcagattagatgttcagattatgtgtcattaatttttcaaaatttaaagaaagatgcgtattctactcttttaagttttaatgatcaaatctcacaaaaaataataatcttttcttttcctaagaataagttcagcttctttagatattgataagtaattaggtagatggggtgttagggatatttctcaatttcattcagttccacaattgtcaagtgtttttttttcttattttgcttcttcttcttctttagtgatgtgggttagtcataagttgttcactagctaaaagcagagtccatggcttcttcttatgttgttctccctttcttcttgtaatttggatttttttcattacttttcttttgcatttttttctttctccagtgtgttgttcacttggattatgtttttcatcatttccgtatcgtattacttaaaagttaaaacggattgaattaatccttttcaaactacatatttatacataatttcttttctagagttcaattctatatacaatttatttagttaaaagacttgatatcagagcgacaaaggacttaaatagttctaccaaacatgaaagatactaatttccaaacatgaaagaaagaattattcaatttttactctaacagtctacacgaaaatgaaagagttgtcattttgagaagtccttagatgccatattattgccagaaactaatttgtatggactctagctaccaaaaaaagaggagaaaaatcaaagtccttcatatggaaaatgggtggtctgaaaatcagtgacagcaatgtcttttattatcttctatctttctttgataatctcaacccacccgtactggaacaagatgttatctaaaaaacttcttcaccttcagctttagcttcgttgttgcttactgaaacttttctctctttacatcaaattt

SEQ ID NO: 5162 - DNA, 3000 bp, Unknown
  misc_feature (1)..( 3000): cDNA_ID_1827699_gDNA_ID_1620767_Annot_ID_167371 3000 nt of promoter + ATG
ccccaatccttgacttctggtatttcatgtaacccggcacttgcttgcacaacaaaattctctttctgtttcccaaaatcggaagcaatccataaagccatttcacgaaccacgtcatgcatcacacaatgatatatactaacctttgttagtaaattagcaagttctgtaccaacctttgttagcaagtttgcacgggtaagggtaccgagcatcgcataacccttattcctcgctctttttataacttggtcttctccgatgaatccttcgcatatcaatttgtctatcaaggtttcggtatatatctgaccatcttcaggaaacagagcacaatataggaaacacgacttgatatgttcatcccccaagctatcgtagctgtacttgagaatcggaagaattttgttttccatgccagaaaactctgcagcggatctagtcaaaacatcgattgcatactcccattcttgtaccatagttttagatgccattgtctcaccaatgacgttgagcgccaatggcagaccacgacatttttgagccacctctcttgccaaccccacaataacaggatcactacttaatgtgttgtctccgaccttgtttttgaacaactcccatgcatcctctggttccaaacagttgacttgcatcggcttatgatcccccatctccccacaaacttcccgagaacgtgtcgtgaatgctactttgcatttatttacttcactcggatagggaataccaatggcctctaaatccactttctcccatatatcatctagcatcaaaacaaatctctttccctttaaaactctgtgtatatcagtggccttatcactttcattcttgttcttccacaggtcgtcacaaaggtgcagtttctctgcaatatcttcttgaagctttgaaagctttgcgccttgagacaccacgatccagatcacaatgtcaaacgtaccacctatttcagcgaacttgttgtggattttcttgaaaagggttgttttgcctacaccacccataccgtgcagacccatgattccgactccatcttccataaggcggttccatgccttttcgagcatttcttcttgacctatcgtaggctgagtaggcctctcttcaacttcagatcttggaggtggctgagaaacttcgtcaaaatttccctccgattttagtatcttaacctcttccagtaacaagaatacctttttcccatatttgtagcttgaacatacatattttgtacacaaaccgcagagacacaacttttgaagctcaacgggactaacacttagcagatctttgcactctatatcaatgctattgacacggtcaagccatacctggacagcttcaagcctttgttgatggcgtgactcctctctcgctaccttgttctgtacctcatgttgagttgctctcagatcttccatttccctctgcagagctctgagattcttctcgagggttcgaatataacttttaccaattaagcaatcaaagatacgattcatcgtttgatcaccaacagcaatttgaaaagaaaaacaactccccatgatgatgagaatagagataaacttttagtaagcaaaaacgaggctaataatagtggaacaagaccactgcaaagttctgtggttacaagcgaagagaatgagaagaagaagagagaagaagagctaagtacaatttagatctggaaaaggagaacaagtgtttttaggtgaaaatattgactagcttctattttagcatacagtaaaatttatatcgttggttagtacaaaccattaaaacttttattgaataaaataaaaatacgaagctgagtactactacagtggagcttgacctgagactgcaataatgcgtgagatgtcgagttcatacctggggatttggaagctttccaggatgttttgggacttttcgtggcttatgatgaagagagatggaagaggaagaagaaattgagttctgtggtttacttatggctggtttgattattctccgagctggtttaagcgtaagtgtggttctgttttttttaggtcaatgtggttttgttattaaaatctggttcactagaccaaaccaaatctaagggttagaaaacgggtttatgactaccacatattaagcatcgtgaccaaaatttagtggtctaagcaaattgattaagttcctaatcctagtgtgaattaaactcaaacacactaaaatcagaaaaaatggaatcttcttctattagatcctgatctaagtactactagaacatctcgcttaggttgtttgcgtgttcttttcttggttttagttctaggaactgaaaatagtgacctattcttttttatttttgttcattcgagagagctcgaaccaacctttttctgaaaactaacttcatattaaaaagtaattagactaaatttaagtaaaacaaaagcaaattttatattgaaaaaagaagaagcaaatcatatgtatttgtatttggtttcttttatattcatcaaattttcagtttcgtttttcctgacacctatttaaatcaagtaaactacatgtgtcgctctacaatatgttcagctgtatctgatgatttatatggaaaacgttttatatagcaaacatgcaaacaatttctaaagaaataaataaattatattggaaagaaataacataaaatttaatagatatgtaattttttagaaaaaataaaaaatattcgtcaacataagtaaagttgttgttgagtttcttctaaatgcaatccagcatttaaaacaaaaataaatataaatgtttaataaaaattaccctttattatatttctttaaaaagacaaaagaaaaaaagaagaagcaaaatttaactaaatgtctaaaacaaaagcaaatctatagttgttcacaataagtgtgtgtatatatatatataatcttcatatatcatatcttatcaccacagaaaaatcaatccatg

SEQ ID NO: 5163 - DNA, 3000 bp, Unknown
  misc_feature (1)..( 3000): cDNA_ID_3075849_gDNA_ID_1620767_Annot_ID_167370 3000 nt of promoter + ATG
ttttttaacagtaaatcaagtactagacaaagaggcatttaaaaatagagctgcttaaataaaagaaatatagcctaaaattaaggcatagatagtaagttccatctccatggcagctcctcaagaacgttgtccaacgaagatatgcgggtggagatcactctgttaaaggtggatatgagattgtcagccggtgtatagtcacattggtgacgtctcccattgcgttcacgacatatataggtggtagatcgtaggttgaaaaaacggaggaaaacaaaagaccatcgccagtccggattagctctgtgtctgaggatactgagccatacagtgtagttagctaggccttttaaaaaaaaaattaaatttggataaagaaaatggaaagatagaaacataaaaagttgaaataacaaaaaaaaattggtaacttagaaaatttagaggaataaaactcacatgtgttgctatataagaccatctccaaggagaaaccaaaacaccatatttggtgatctcaactccaacgagactctataatggacgacatcttttttgttttgttgtttaatttggtaaaagttcacaaagcaccaaaaataaatcataactagattttaacccgcggtataccgcgggatgatttattttttaaaagtaatatatattaaaacttgtaaattttatttttataaaatatttatatttttacagtttataattattattaagtatttatatatattattttttattaaaaaataataaatcaaagatttaacctgtattgaaacggtgaattaattatattttactttttattaatgttgattcaaaaacccgtccctccaaatccgtcttgccaaaaagccatttattttattaatattaattttatttatgatataactctgaattataatataaacattttagctaataacataggagtgcaccatatttatttaataaggggaatgtaccatatgacccgaatgcacttttacccaaatccaccaaaaaagtcttgcaaaactactatagacccgaatgtaccatatttttttgtgctaatttttatgtgattaagatttaattgatttcgtatataaaatattaaattgttttacgaacttatttgtttataatttggtaacagatagataattgaatattcagtatattttgtttcagtttaggaaatctttaatgacccatctttaaatccaataagccctataattaagagatgaatattgtcgttaaatgattttggtaatcttaatgatgtcattaaaagattttgtttttgattaaatttttttaatggcattgtcatgtaattaattacaaaaattaaagttacatttaaaatgtacttcccaaataatatagtagaacgatatgcacttttatccaaatccaccaaaaaagtcttgcaaatatactatagagataagaaacgatagtcggttttgataggtataagattagcaaatatattagttcgcttaaattagttaaagaatataaattgaaaaggtatattacactttattcgaatatagtatcaaaacttatatagagatttgataaatttttaattgttgaatactttttttttgagcaaattttatgtgattaagatttagttgatttcgtatataaaatattaaattgttttacgaacttatttgtttataatttggtaacagatagatatttgaatattcagtatattttgcttcagtttaggaaatctttgatgagttgtctttagatccaataagccctgtaatctagatattaacttgcagtataccgcaggtaggcttatattttagttcaactaaaaacttttaaaaattcaaattatggcatatgcgaaaaaactctaattatttttctgtaatgatgatattatttttcggcaaaaatagaatcatataaagatgagaagtaaactataataattaataaaaaattaatatgataatttagatatcaaatctaatttgttgattttaattggttacttttttgggaattaataatgtatttcgtttttctaattaaattaaattaattaaaattcagatatcaaatcttatatgttgattttgattggttattttttttggaaattaataatatatttcgtttttaattaaatttaattaattaaattagtatttgactttttaatcctcaaagagataaattaatttactccttaaaattttatatctaatggcatacctatgtaattacttacaaaaattaaggttatatttaaaatgtacttcccaaataatataataggattttatttgtgttttagatttaattttatattttaattgttgttcgtttatcaattaaaagacaagtatactatcaatattttcgaatgtgtcatctctaaaagatatgatatggagccattcaaaaatttaccaaaaaaacaattaattttactggtaaataatatgacatatttggtcccaaatcctaattaaattctatgtcaatttaaatataatttattagtaaaaaatggtaataatatcacatatctggcaacaattcataatttaaaacaaaagaagaagtaaatctactattttgtcaagtttggaaagcaaatgtaagattaaagaaacaaatatttaaagttgttattaattaattatttgataacaatacataaaatatagattaaatcaaatatatatttttggagaaaaacatttacatataccttacatagccaaaaatatttttttctttattaagaaattcaatacttttcaaaatatatctgcatctaaacaacccagaaacaacaattgactaatataaataagtttcaacacacctgttttgctacaattgaaagcaacaaattcatactttgtaagaaaaatacatagccaaaccataattttcttttccgaagtaatctaaactagagaggaatccatcgcgatcaaaatg

SEQ ID NO: 5164 - DNA, 3000 bp, Unknown
  misc_feature (1)..( 3000): cDNA_ID_2135573_gDNA_ID_1620767_Annot_ID_167368 3000 nt of promoter + ATG
gatgggcttaataatggccaaacaagttatctcataactgataattatgtatgaagaaatgatcagttcaatgttgggccaactttttacttaagctatctaattggacttaatataaataaattgtgtaaaaagaaatgggcttaaggcctagctcacattggagctccgagagaagtcggatcgggttgaacgtgagactcggtctcctttgttattcacgatctttgtgaatcgggttttatggagatatcgtctctcgtaatgttgcctacctctcttggatttgtgggggattgtggttgattgattccacatcagacctaacacaaacttctatttaaaacccatatttcaagtcgtcttctttaatagattaagaacttgatcgttttacacacaaatagaattctccagcattttctctcttttaaaaagtaatttcgagagtattgtagtgattttgtttagagctctgttttcgagtggtgtgaaaccagtttagagaagttgtatcgtaagatccttgaatcacataatgtgttctctattatgatatcatatttgtattttagttattaattacaatttttttttaaaataaaattttgaccaaaaatataaacatattattttttaaataaatacctaaacttttcattgaagaatagtcctaggcgttaagattcggttcggttccactcagttttgattcttttcagttgtagattttatgatcaattagaatattttaatattttagttcggttttggttcagttcaggttttttggttttaaattttggtattgattcggtattttgttttgaatagttttagatattttggttatttttggatattttcatacatatatatttggttatttttaagtattttttcgcttttatatatttttgcatatttttgattatttcatctataaataactaatattttcgatatacaattgtcttttcaaatattattaggttcggtgaataatatcattcagctctttttgctaatttataataggttgataaaaaaaacttacaataagaaaaaaaattcttaactagatgtacctaaaattagttaataatttagtaagatcctcaactaatgggcatgcacacttttttcaataagagtttgggaataaaaatagagatatataataatgatcattaatctatgcatatttttggaccttgatttttcagtaaataacttaagtaaattatatatatgatatatcatacttaggtacaaaaattcaatactatatatatatataatttaatttaattagttttgtcaatttaattaatgtaatatttgtatctcttaattattaattactgttttattgagaaataaaaaacaaattgaccaattttaaaatatactttaaacatatccttacattagccaataagttagtaaaaatatgaacaaatggcatgcatatatttttttccataatattgtattttttcaataacattgtggaaacaaaaatagaaaaatataacaattatgcatgcatatcttatatttttttatttgttaaaagcttaatttggatcttgatataatattgacctaaaacaaaatcaattgcatatataccataaaaaaatgtcaaaaagactcaataagaatggattaaaatgaaagttaaccattgataactaaatcttaataaatgtgtcgtcattagtgtgtcggactgcaaaactgtggactgcgcatctgccgtcgctagtgtgtcggactctctgtttcacggtgtctccaggatataatcctcctttccggtgccaggttattattctccgatttgcatttttgtaactgtgtttctcgttgtgtattaccgtgatccaatcccatatttggggaaaacctttataaatgagaagtccatatttattaaaaaaaaaaaaaaaaaaaacttaacaaatggcatgcaaatcttcttattttttttcaaaaacaaataatggattaaaatgaagagttaatcaataaagactaaatctcaacaaatggcatgcaaatctttttatttctagtaatattgtaattttctccaataagaatgtggaaataaaaatagaaaaatataacaatgatatatacatataacatctatagatcttgatgatacaatattgacataaaagaaactaattgcatataccataattaaatgtcaaaaaaattcaataacaatggattaaaataaagagtaatcaataataataaataaattaaacaataatcatctaatttcttttggtcggtgataactgataagtgttagattatcaaagattgtgtcagtgactcgaaagatttttactttttgcgaatcctaagaacaaaacaaaaccgtgtgaggcgactaaaccgtcaaacgaacaacttgtcgccacgtcagcacacgaaccacccacgttggttcctcctccggctcaaagttcaccacgtgtctttccccaacggctagtttttttgtaagccgtcttttgcttaccagcaaaaagtaaggaagagagggagaacaacaaaatttaaaaaatttagatatttttttttgcttaggaaatttccagcattttctactttactcgttttcatttaaataataataaattgacttaaaaagaaaaagaaagataattaatctactataagtagagaagaagtagtagttcatttttctttgtcataatattaacaccaaaaaagaaaaattactcatttttctctcagcttttgttcatttcccacaaacatatactttcaagactcacatcaacaaatctcggaaaatcttcggaaaaatcttatttatttgtaagtttgtttcttgctcttaggttcacttttcattttctctttatccaattcctctgttttggggattctctgaaatttggggaaagatctgattttttgtacttttgctgttgcagattgataaaaatg

SEQ ID NO: 5165 - DNA, 3000 bp, Unknown; identical to SEQ ID NO: 5155
  misc_feature (1)..( 3000): cDNA_ID_3075855_gDNA_ID_1620767_Annot_ID_167365 3000 nt of promoter + ATG

SEQ ID NO: 5166 - DNA, 3000 bp, Unknown; identical to SEQ ID NO: 5152
  misc_feature (1)..( 3000): cDNA_ID_3075870_gDNA_ID_1620767_Annot_ID_167360 3000 nt of promoter + ATG

SEQ ID NO: 5167 - DNA, 3000 bp, Unknown
  misc_feature (1)..( 3000): cDNA_ID_3075874_gDNA_ID_1620767_Annot_ID_167359 3000 nt of promoter + ATG
ctcagggcagggcaaagaggagttcatgaatgaaatagtactcatctcaaaactacaacacaaaaacttagttcggattttaggatgttgcattgaaggagaagagaggctgttgatttatgagtttatgttgaacaaaagccttgatacttttctcttcggtgggttctttcttgcctcattcctttactatcggcagctttttttctctatatggaattgtcttttctgattgttttcacgctgtattgttgcttagattcaagaaaaaggcttgagattgactggccaaagagatttgatatcattcaaggtattgcgcgtggaattcactatctccatcgtgactcatgcctcaaggtaattcaccgtgatctgaaggtcagcaatattcttcttgacgagaagatgaatccaaagatatcagattttggattggctcggatgtatcagggaaccgaatatcaggacaatactcgcagggtcgtaggaactctgtaagaatctatttcaaaaacataattgactaaagactcaaagttataatcagatattaacttgggagaaactatttgatatatgtgcagaggatatatgtctccagaggatatattagaaatcataagcggagagaagatctcaagattcagctatggcaaagaagaaaaaacccttattgcatatgtaagtacgactttaggtatacagttgcaaatatctcaaatcgtttcttgcttttataattttaagatcaaacaacaggcatgggaatcttggtgtgaaactggaggagttgatcttttggataaagatgttgctgattcatgtcgcccattagaagttgagagatgtattcagattggtcttctctgtgttcaacaccaacctgcagacagaccaaacacacttgagttgatgtctatgctcacgacaacatcagatcttccatcaccaaaacaacccacatttgtagtgcactggagagatgacgaatcatcgtctaaggatttgatcactgtgaatgagatgacaaagtctgtgatcttagggcgttgagaaatgatgtttgattgaaactttagtctgttttgtaaacgattttttctatttatgaaaggtatattccaacagatgaacctccattttggtgcaccagtgaattactgtagagtaagaatttaccatggttaaagattaggtgactaataatagtacttagattcgaagccaatggctaaaagtttcatatttccagaaacactaatcagataatagattcatcatttcatcttccatgtaagccaaaatagagttcttcacatccatgttcttctcttccaacatccgaacttcgttttccagacgctccttctcagccaataaactcctgaattcactgtcttcaatctctctttggaatccaaaacacatcttcacaaacccttccctgtgtacaagtttccatataaatgcttagtaacttcaagattagacaaaatcaagaacaatgcagttattgatgtttaccgcttctcggttagtctttgtaattagctcactgtgctcacttcttaagcaacaaatctcatcctccaatagcttcagagagtttcttgaatcagcttttaaggaaataaaaccatagtgatcaaaattacgaatgtgaatattgaacaaatccttcggaaaatttagacacctgtaacggagatcaaaccgctgatctcgaattgagaagcaaggaacgatctagtaagctcaggttccttgagagacagagaagattcaatctcagaacacgctccgatctgtgattcgatctctcgcgtcacctgaatgtttgcttcgatttcccgattgacctgtttcattcgatcacagctcagattaagctaaagacgagagataccaatccagtgaagaagatgaagaatagtgaaacctgatcaagcatgtccttgaaaatggagatctgacatagaatcgctcctgaatcctccatctccgcagaaatcactctctgtctctctctctctctcgctcgctcttgcttccgcttcttttcaaaattcaaaatcaatatcgttatgagttaggggaagataagattttaccgggcctttatgggcgtttaccaaaatcggcccaatcggatttcggatctttcaatatttgtaaatacgaaccgactttttaatttatttcggatctagtttggttcggttcagattcgagttgggtttgtaatctttcaatatgtgcgttcgaaatggtagaattgatgatcgtcttcttctctctggtgacactggcacaccaatgttgactgttgaagtcagctattttggacaaaaacagtttcacgttgggaatggctatatgtactttcaattgtgtaatcggggcattagtgtcaaacgacattatgggagctttgagcgttctgataatgcattacaagtgttcggtgaaatgcctgaacgagatttcacgtagtctcccacttcaagaaagctcttccggtgaatccactaacatttaaaccgtgtattgtacgggtaaaaacaatgatttcagaaaccaatgtcatctgatttattcatataccaagagttttgatgtatatcattggcacgttctggatttaaagagctggcaagattatggtcaagcaatgcgttctgcatcgaaaaatttcttatctttagattggtggagagtaaatttgcacatctttcacttgttcacgtcatgaaatatgactatgttgcgtaattgactgggtaaaaaattggactttgtttgtggcatttacgtttccattgaaaaatgagtattttggaacattagtgcggtctggtcaacattgtttatagtaggtgcttgaaaatagttttgacgagtccctcgaagaaaaaaaatccctgagtgtttcttcacttggctttctttgtcttgttatatgttcgtttcttagttattagagaaaaaaaaatacac

SEQ ID NO: 5168 - DNA, 3000 bp, Unknown
  misc_feature (1)..( 3000): cDNA_ID_2135548_gDNA_ID_1620767_Annot_ID_167356 3000 nt of promoter + ATG
gttcaacataaactcataaatcaacagcctctcttctccttcaatgcaacatcctaaaatccgaactaagtttttgtgttgtagttttgagatgagtactatttcattcatgaactcctctttgccctgccctgagctgctagaaagccgttttacagcaatttctttcccatcttgcagctttccctaatacagattgcagaaagtcatttcgagaacataagcggaaaatacaaaagagcaaagaagattaaaattctccaaccttgtaaactgaaccaaatccaccttgtcccagtttatttgagagactgaaattattggtggcagtttgaatggtgttcatctcaaacaaatatgaacctgagacatcttgtggttccaaatcatatttcggtgcatcttgtgaagctagaatttcaggaatagataaagagataataataaggccatgaatatgaataaaaacaataagagatcgatatagagctagtaagatcatcagagtgttaccattatgtttaactctgtatctccagaaaccaaacgcagtagaacccaatatcagaaaaagagaaaggctgacaatactagcagtaatggtcttcttgcgcttattcccacctgagatataagacaaaaataaattgaacaactagccatgctgctaccggaacgaatagtatcaatggagttctagataaagttgtaattgaagaagtagctctttcttgatatcatttaagccgtacctaattcagaacgtgcaagacgaatggaaagaatctctcctcctgcagaaaattgcactgtgtccatgaagtcttggttccatattaagcacccaattccatgaatataagaaaaggccaagcaagaacagttgtggaggcaaattttgtagcatccttctgcatccacagcacttgcaaattcgtaaaagtctggaggctttatgttggcaactggatggaagaagtttgcatcttttttagttgagttttcctgacaatgtagtttggtacgcctcacacaaccatcagtccaatttcctcttttccactcctcaatatattttggtataaaccctttgaagcatttacacactgacttgacacaaatcccaaaaggtccacatacaccgtaataatcacatgagtgcgctggagccacaaagttcaatacccaatcagtcccactatgcctagaaatctccagtgaacccttcgatgttatcactatacgtggaagtttgaagtttctgtttaaataagtaagggatcctgacccgtttgcatcttgctaaaggcttaatggatttgtaaatgaatcatccattagtggtacccccgtgaaccttgttttagcccatggaccgcttctccaataaggcttcgagcctctcatagttaaagcttgtgttggcacttgcgttgtaatctgaagcacaaagtcaccaaccgctggattagtgtaacttttccaagaagtcaagacctgcttctcgccagtggcgaggttatacatcagagctgagaaaggaagcatagtatcaccaagatggtcaaagctttgccaaagagttcttcccgaaaaattgtctatgacaataagatttccggtgtctgaaagctctgcacgagacccgttagaagcaagagtttcaccactggaccatgcaacgccatgttttccattatataacagaagacttgcgttgctgctgatagcgagatttgctgtggaatctgtaacaggattttctctattggccacccacacaaccacccggggaatgattcccttgaaccagattccaagataatgattttccgagttattaaaactgaagaaacccaattcataaactccattagaggagctgagagtttgtcctattgacaaaggactctctttgtttatccctgcaattgcaaagctaaaacttataaagatggtattggtaaataagagcaaagaagcaaagaacgtgatcctcatcgtccccgtttgtttgtttttttctttctccaataactatcttttttggattagtgtgtatgaagcaagagagccggggaaaaaaaaaacactgtgtcttgtcagaactactttacttattttccaaaaatatgcattatttaataaatacatgatagatacattggcacgaagaagtcattaccgtatcagatacgcaacgttttcattgttccagtccttactagcttgttaggcccagaagaacctatatttttcttgaactgcagactatgaattatctcgtttaggcatttcctcgaacacttgcagtgcataacaaaaagtcagagcttcggtgatgtcttgaagaccttaatgaccccaatcgattgattcgtactccaaccatatgggcttaactgtcactatccaaaagcagccgaataattcaacagtcaagattgacttgtgtcagtgtatgacaggttgcttgacttgtgtcgtcaagccactaacccagagaagaaccttccgggaagacttaaaataaagtcttttgtcaatttcgtgtatttcgggatggaaaattagactttaatttgtaataggaatttaattcggtttagcgttgaaatcgtaaaccgcttcggaaacaaggcttttgagttttgagagagaaattagaatttaattcggttcgggcaaggaatttaattcggtttagtgttaaaaattgaaaaccgcttcggaaccacgcgtttttttgtttttgaattttaagagaaaaattgaaaactcgtgtttaacaagaattaggagtcaaaaaagtcaacacgaacttttgatggaaaaaaaatgaaaactttatagtatcctaaaaataaggaaactgaagtcggtgtcttaatctaatccctataaattctctaataatataacgccaaccaaataaaattcatttgttatctcactttctctttcagataaacaaacagtttcttagtttcgttcgagatg

SEQ ID NO: 5169 - DNA, 3000 bp, Unknown; identical to SEQ ID NO: 5163
  misc_feature (1)..( 3000): cDNA_ID_1827703_gDNA_ID_1620767_Annot_ID_50137 3000 nt of promoter + ATG

SEQ ID NO: 5170 - DNA, 3000 bp, Unknown; identical to SEQ ID NO: 5162
  misc_feature (1)..( 3000): cDNA_ID_1827699_gDNA_ID_1620767_Annot_ID_50138 3000 nt of promoter + ATG

SEQ ID NO: 5171 - DNA, 3000 bp, Unknown; identical to SEQ ID NO: 5160
  misc_feature (1)..( 3000): cDNA_ID_1827683_gDNA_ID_1620767_Annot_ID_50142 3000 nt of promoter + ATG

SEQ ID NO: 5172 - DNA, 3000 bp, Unknown
  misc_feature (1)..( 3000): cDNA_ID_2137064_gDNA_ID_1620768_Annot_ID_50143 3000 nt of promoter + ATG
gcaggttcactggattacattcgcatgagactccaaattattgaatgccaaattattcagtaagaacttctgcaggttgtagctattttttaatatatgcgactacaagtgaatgttcaccacagatattcactacctcatatgcagctccttggccaccattgcaagccaagtcctgctctgtttgtgaaaccgtcatcagtttccttgcttcaactagcttgctcatttcagtaaccagagttacatgctttgaaacgttgccttgcatctttttgtactcagggtagttgtcaacaaatctggccatatcctctgtacaaccaacgaattcacagatatataattgtcactagcacgagaatctgttgttacaaaagtttttgcagagaatagtttaagactagccatatttgtacctactgtctggatattttggttactcttggccacctgctgaaagtcatctaccattcgcttgatgttcattccaatatccccaaaattttcatacatgttagatttgaaaaatgcatcttgttctgatgataaaaccacctcctgccaggataagagacatattagctgtaaggttctcaactaaaaaacaatggcattggagaaaactaaccacttgctgatcttttggaagacttccaatggatttcaagtccactttattatcttgaagtcctatgagttcgtgcaccattgcctacagaaaatctcgttaattagtaagtcgtagtcttacaaaaaagcaagacagcgggaggcacatcttatatcatagagtagcacaataattttgtttagtcaagttacctgatatgtccactgattcagcaatggggtaaccgggtcatctcttctgtcaattacaagtagcaacggagagctttcagtccgtctaaagtcaaaaagagcgctttcatgctgatacatcaatttctgaaacataaacagcgaattttcagactattggatagacacaagtgggaattagttccatcacatgcatgcaaaatatagcgggaacaaataactttacgagagcttgtcaaacaacttcacttacagctgtttcgtgtgcaatcctttttgcagtatcagaggtcctctgatatctgatgacaggtcttcgtttcaacgccagaaacactgccgcaattccatcaacaacccgatcggaaaagcgttgcaaaccagagggatcgacaactgcggggatcatatatagatgatttgatgccatattcaatgtgaaatgatatggatcaccagaaacaaagtctgcataatactcctgcaatataaaaaaccacaaagactatgttaaacaagccattatacagtactatgccgagtgcaccaagcaatataagtttaaatcagaaaactaaagacaggtaggggggatactaagctccacaagtatggccgtttcatcacaaaccaagcaacttctcagagacagctaaaaatctatacatatattgatccatcatataggctatgaaacattcttttagcattagcctcctattcaaaaacatcatggatgagggaagtctaaaaatcacctgaacttgctgtacaacttcctgctcatcggaatcagccaaaatatgaatctgagtatccttcaacagattggagaaaactgaaagaattcataacaaaaacaacatcaaattttgtatattgtgagtgaacaatgataaactcgaaatagttagaagatgaaaaaatcatacataaatggtattctccaaatctaggattcgcaagctggtatcgtaatttctgaatattatctgaagttggacggatgaaataaacagctttcagatgtgacatcgattcttttgacacagatattgaatctatcatctccaccagaaacacttctttctgaagcagctctgactgtgaatacacaatgcttacattgctaacctgcaaattcaacaattaatccaataaacaagtaatcacgaagatgtgtttccggttacaagggaaattatgaaccacgattccagaaacaaatcagagaagattagcaatcgaagaagacgagatcggactttaccgtttcggagtcgagtatgagaaccttcatgccggagatgtcctgaagcatccggttaatgtaatcacgcacagacgtaaccaaaaccatcgtttcaccgcaaaattctgctactgttacgacgttgattcagatctacggcgactaatctgatgattcttgttaacaataacgctggcgaagtgatttcgcgttcactttcagatcttcctttccttaatcgagaaaactaaaaggtccccagactcgtcgactcatacgaagaaaagtgtttttgcaaaacaaaccctatattttattggttattcctcttttcaacacaaacttaatttttgattaactgaacctaatttgagggtttatttattaagtaataaaacatcagggttttacaaaggaaacatctaatagatcaggatttttccgcaaaaaaattcaaacttaacattgacccatcgtgttgattttgttccgatccgtccgctaatataatataatttggattagcgtcaaaaacgtgtgattattgtaatgctcgatgcatccagcttcatgtagtctctcactcaggaaagtcaaacttaatattcttacagtgagaatgaagctctcttctgaaagtcccatggcgccgtcaagtcagtcaagtcatcgactttacatttccaggtaagtctttttctcttctacttcatcagtttcttgagttcaatggaaactactttacctaacttaggggaatcagataggatcatagatcatgagagcaatgtggttgagtatgtgcattacagagatctgtattcatctgttggcttgacatagtgcatttgttttacatatatagtgagaaaacaaaaacgaagagattccaaagaaacggatacactctcgatgttgaaatg

SEQ ID NO: 5173 - DNA, 3000 bp, Unknown
  misc_feature (1)..( 3000): cDNA_ID_1827819_gDNA_ID_1620768_Annot_ID_50144 3000 nt of promoter + ATG
gacgaagactaactttgagaacgagagtcgatgtcttgactccatgggacttgaggaaggtatcatcgtctccgtaagaccagggtcggtttcgagaatttcataatcgcctggtaaacaacaaaagacgagacattttagggatttgggaaggagaaattaatttgattttggaccaaggcacaaaacggtgcgtattaggaaaatgagatttttagaagtccgtgttttgcaaaacgaacctttacttatcaggtatttgttattttaacccctactctaatgtttgaataaattttaaccagaaaacgaaaatcacacacagtagtacggttttacgcggtggaggaagaatcagcagcgacggtggagttggtctgagtctcaccccaatgccaaagcatactctcccagaaacagaaatcttcaaaacaagtcgtaagtctcttatctttgatcttaatcctccaatgtccgtctctgtaattcgctttctcagcttgtctccgatcccactcaagttgcgccttttgtttcgaactcagtagacaaaacctctgcaatttcttaggcatcgcgtcgtgcactctccaccaagttttgtgtgcttcatcgctcgcgaattgatggtatccaacgacattccaattgcaatcgtagtctctgaagcatacccatggtttgttgtaacctaggtaatgaagaacgtagagtatcggaggatcagctccaaatagtctcgtcttagatttcctgtgcttaggtgtgtctccttcccagaaatgcttcaagaaattcatgtgttttggaatccgatgccaccatgtgaatatctcgttaaggtaaccttggtctcctccattgtaggaattgatatcgttgatgtgatccattagtaactggaatgttgaatttgatggttcaatcaccattagaccggagttgaagagcgtaccgtcgtttccagttgtggagatttcggggtactcgaagaggaaatccatgtttctgaggataagcatgtctgcatcaatgaagatgatcttgttgtattctgtcaattcccaaagacggaatttgctgtagttccattggttatatgcatttgcttcagctttcgggtttctgattctttgaaatgtgtgaatcttccatccagctgattccaagccacttctatggtattcactgatcgaatcatcgactagtattaccaaattgcgagtagagcctgacattcgaatgctctgtgctactgcaatggctccacagacaaaagcatcatctgagtgcaagatcgtcgcgtacgcttctttcttggcatttgccgagtagaaattatctgcaattgaatcataatcagcttaggaggagagaatagagatgtcaaatttagctgatacaaaagacgaagaaacttactactgagtcactgacctttagcttgaagaggaacagaaagttcacaggaaccaacaggaagttgtaacttttgtcttaactggtgaagtttaggcttatacagccatatgtttccttgacgggcaacaagttcttgacccgtaaaaagattcggtattggaaagcaatctgataccaaaatcacatgaacatcatgaagcccttcagaagatgccgccactcgagctgctgcaagttgtaagtgcaatctagccacatctcttgaccattttcctgacttgttacatgggagcttggcaatgataagatcgattcgagacttgtcaggaacttgaatccaaggaagagaaggacaagtggggactttgaatttttcttcctcgtcaatccattccgggtataaagatttccaagttatgttacttgcagcatggtctagatgcaaagctatatgctgacagtgagattttatgaccacctgccatcgattaatctcgttatcgttgagatttagaaagccaattccttgatactcgcttctgccagataagtaatgctcaacaacaagtgacatactgttccagttgatctcagatgtagctatatagcgaggatctgtggttacagcaggttctagtatccatttgtttgcaaaacttgatggatcttcaggaatttgcaacggtggagaacagtagagtgtgaacatagcaaccagcatcataagaaacaaaacaagtttcagactagagaagttgacacacatttcaacatcgagagtgtatccgtttctttggaatctcttcgtttttgttttctcactatatatgtaaaacaaatgcactatgtcaagccaacagatgaatacagatctctgtaatgcacatactcaaccacattgctctcatgatctatgatcctatctgattcccctaagttaggtaaagtagtttccattgaactcaagaaactgatgaagtagaagagaaaaagacttacctggaaatgtaaagtcgatgacttgactgacttgacggcgccatgggactttcagaagagagcttcattctcactgtaagaatattaagtttgactttcctgagtgagagactacatgaagctggatgcatcgagcattacaataatcacacgtttttgacgctaatccaaattatattatattagcggacggatcggaacaaaatcaacacgatgggtcaatgttaagtttgaatttttttgcggaaaaatcctgatctattagatgtttcctttgtaaaaccctgatgttttattacttaataaataaaccctcaaattaggttcagttaatcaaaaattaagtttgtgttgaaaagaggaataaccaataaaatatagggtttgttttgcaaaaacacttttcttcgtatgagtcgacgagtctggggaccttttagttttctcgattaaggaaaggaagatctgaaagtgaacgcgaaatcacttcgccagcgttattgttaacaagaatcatcagattagtcgccgtagatctgaatcaacgtcgtaacagtagcagaattttgcggtgaaacg

SEQ ID NO: 5174 - DNA, 3000 bp, Unknown
  misc_feature (1)..( 3000): cDNA_ID_1827803_gDNA_ID_1620768_Annot_ID_50149 3000 nt of promoter + ATG
cttatttgaagcccaaaagatcatagtcagtgactcagaagctatggatacagactttgacggttatataagcattacctaggcaagctatcaaatatctctcgaaacaatagagtgcaaaagcttcataacaatctctaatcacctcgcagttgaaagctgcttctgaattcaccaaagacaaaaactgctcggaaattataagaaaccccgaattagaaaaatatctgaacacaaatcttaatggaaatttcactacaaatacaggattaaagtatatagtaacttattaaacctaccgattccacggcataaacaggaaccatcagaataagtccaataagaaacttctgttcctgtaatttacaagagaaagcgttatgcttagttactgatgatggtgatattatcaatttaatggatcaattcgataatagcaatgtcagtgaagagtcataaagatgaatcagtatcatttattatgagtaagagaatacgacaaagtgggtgttaaagaagtaataacaaacctctggttgattataagaagctaagtgctcaaagataagatacatggggaggaggatggcaataaccacgaatacactagcacttaagattggccaagtcaagtattgtccagaatcaacaccaagattaggatgccacattatcccaaatctacttgacgactctcccacggaaacaataaaaagcaacgagcagaggattcccctccactccattaagaaacagcaaacaacaagaagcaatcttcacatcaagcaagaggacacgttcctccaaacaactactccaaatctcatagataccaatatcactgatattaaaaatagatcctttctcaagctatgacaatagcagtgatgaccctttcagaaaacctgcattacgagtaacaacacacaacaattagattatattctgatcaaaaattgaatctttaaaacccaaattgactcataacaagaaataagttccttgatctaattcgtctttctaaatcacccaagcttaatcacccagcaaacaaaacgattttgcaaaaccctaaatcaccaacacccataaaacagaagaaaaagagagaaattgcacttacacgagtatctaattacgttatccagaagaaaaccctcgagtctttaaacttgctcgaatcaaggactccaacaaaaatcgagccagagattatctttttgctcttcgctatcttcaaagtttggatcttttttattattaatttccgcgtggaagagaaagagcctaaaaaggaaaacttcagcctttttgctttggcggttgtgtcaagctaaaccattttcttcgatcccttaatttgctgacgtgttatgttaaataatctgatgtgtctcatcctcattggactttattcttttgtccgatcactttgtagaaattattattattagctcgtttaaaacaattcaacaatcagtattttctatcattcaagctaatcgaaaatgatggatcactcttaaattgatatcacaaagtagatgagttctttaatcggtgtgttatcatgagctacgtataatattcaaacttttgacaatttcccttgtcaaaataatagtttgatgggtgaatggtgatagttgataaaaatggcaaacacatcttattttaaaaattaactcatcgtagatatcatgtctattacgtaaagttatacatcgtaaatgtggtgtgtatttagatatatgttttacggtacatttttgtaatgcggatagataatcagtttagaaatccctaaaatatctcacatgatcttttcacgttgcaaaaccgtatcagaaatcggttttgtattcttattaccattgctctctctctctctctctctctctctctgatctcattcatgtttcgttgagtttataggttgagatcccttataggttcgtagaatctatggttgtttaagagcgatgcgcaaaggaagcttaatgcggatgatggattggatacgataccaacttatgtccaaacacatgtaagttcaacaaatgcatgtcctttgtatctattaatcttatatgtaattaagccaaataatgcgtcaaaagtatatgaaccaacaattaccacaatgtaggggccggtgaaaccagtaacaagaagaaaggtataagctatagaaaattagtatttggtgaagctaactcaagaaaccctcaagccaacaaaggaatgtttatgtggtagaggacacagaggataaatgatgtcttaaagagtaaaaatattgtttatctccttttagcatctctctttcttttgtttgtatctgtggtagttataaacaactcttacaacatctttcttttttttctgtcatgtagatcgccaaaaaatgatgacattgtcactcaaataacattcatcaagttcgatccaactttggacacaccttctcaataccttgtgcaaaaaaaaaaaaaatctctagatcaactgaacaactcaggtaattaagacggttttaatatcaaagttatgatacaattcaatagaaagggaaatgtattttctcatttatggagaaaataattaatggtatgctagcattaaattatggataaaatatgacatggagtcgagatatactataatttatatagaaaatgatctaaatatctttattttttagatcatcaccatatttgaaatttctttaaaaggacatagcttatcaagaaaattattaccaactagtcattgtaataatcaagaaagatgaagtcatatatatatccttagaaaaagggataaggaaagatagatggtcaaagtgtaacagctagtctgctaatatccaacctttttatttatctctaaaatcttgatcatagtgatcacaactagttcacaaccctcagtcaaattttattacaaagagggagaccagaatattcctccttttgtcttcaagattttaaagccatg

SEQ ID NO: 5175 - DNA, 3000 bp, Unknown
  misc_feature (1)..( 3000): cDNA_ID_1827799_gDNA_ID_1620768_Annot_ID_50150 3000 nt of promoter + ATG
gttaataaattgtggtgttttttttgcctggtttccgaatccaatgcctatgccgaggaagattcgaccaaggattaacatgaggatgtttttggctgcagcgttaatcactcctccgaggaagaagctgacagagccaacgaggatgcttcctctcctaccgtagattctggtgacgtaagaagctccgaaagttgagattaaaccggcgaagtagagagaagaagtgaagagtgtgaggatttgattgtcgtatttgcagtaatctgtttcgtttagatgcatttgctttcttttgtagatccctgggaagaactctttcaagaaatcgtccattgatgtaacaccacctgcgtttaacaaggacgaataaacaaaaatgagcattggtcttgcataggttccttgatttacaagaaactaagcagtcgacacttaaacaaagctgaagctaactctcgtcagagagggaactgatattttcggacaaaacaggggaaatttaacaaaactgaagcaggcccttttcaaaaacaatacttggcagtttcagaatctggctatttgattggtataagataaaaccagatcgagaaagttatctaaccagagactccaagatcatagccgaaaagagagcctcccatggatccgacgatgcaagcgaagatgaagtaagaagtgatccgatgttcatagagatgagctctctttaggcctccttcatcggtaagagctccaccggccatggctttaaaatcttgaagacaaaaggaggaatattctggtctccctctttgtaataaaatttgactgagggttgtgaactagttgtgatcactatgatcaagattttagagataaataaaaaggttggatattagcagactagctgttacactttgaccatctatctttccttatccctttttctaaggatatatatatgacttcatctttcttgattattacaatgactagttggtaataattttcttgataagctatgtccttttaaagaaatttcaaatatggtgatgatctaaaaaataaagatatttagatcattttctatataaattatagtatatctcgactccatgtcatattttatccataatttaatgctagcataccattaattattttctccataaatgagaaaatacatttccctttctattgaattgtatcataactttgatattaaaaccgtcttaattacctgagttgttcagttgatctagagattttttttttttttgcacaaggtattgagaaggtgtgtccaaagttggatcgaacttgatgaatgttatttgagtgacaatgtcatcattttttggcgatctacatgacagaaaaaaaagaaagatgttgtaagagttgtttataactaccacagatacaaacaaaagaaagagagatgctaaaaggagataaacaatatttttactctttaagacatcatttatcctctgtgtcctctaccacataaacattcctttgttggcttgagggtttcttgagttagcttcaccaaatactaattttctatagcttatacctttcttcttgttactggtttcaccggcccctacattgtggtaattgttggttcatatacttttgacgcattatttggcttaattacatataagattaatagatacaaaggacatgcatttgttgaacttacatgtgtttggacataagttggtatcgtatccaatccatcatccgcattaagcttcctttgcgcatcgctcttaaacaaccatagattctacgaacctataagggatctcaacctataaactcaacgaaacatgaatgagatcagagagagagagagagagagagagagagcaatggtaataagaatacaaaaccgatttctgatacggttttgcaacgtgaaaagatcatgtgagatattttagggatttctaaactgattatctatccgcattacaaaaatgtaccgtaaaacatatatctaaatacacaccacatttacgatgtataactttacgtaatagacatgatatctacgatgagttaatttttaaaataagatgtgtttgccatttttatcaactatcaccattcacccatcaaactattattttgacaagggaaattgtcaaaagtttgaatattatacgtagctcatgataacacaccgattaaagaactcatctactttgtgatatcaatttaagagtgatccatcattttcgattagcttgaatgatagaaaatactgattgttgaattgttttaaacgagctaataataataatttctacaaagtgatcggacaaaagaataaagtccaatgaggatgagacacatcagattatttaacataacacgtcagcaaattaagggatcgaagaaaatggtttagcttgacacaaccgccaaagcaaaaaggctgaagttttcctttttaggctctttctcttccacgcggaaattaataataaaaaagatccaaactttgaagatagcgaagagcaaaaagataatctctggctcgatttttgttggagtccttgattcgagcaagtttaaagactcgagggttttcttctggataacgtaattagatactcgtgtaagtgcaatttctctctttttcttctgttttatgggtgttggtgatttagggttttgcaaaatcgttttgtttgctgggtgattaagcttgggtgatttagaaagacgaattagatcaaggaacttatttcttgttatgagtcaatttgggttttaaagattcaatttttgatcagaatataatctaattgttgtgtgttgttactcgtaatgcaggttttctgaaagggtcatcactgctattgtcatagcttgagaaaggatctatttttaatatcagtgatattggtatctatgagatttggagtagttgtttggaggaacgtgtcctcttgcttgatgtgaagattgcttcttgttgtttgctgtttctta

SEQ ID NO: 5176 - DNA, 3000 bp, Unknown
  misc_feature (1)..( 3000): cDNA_ID_1827789_gDNA_ID_1620768_Annot_ID_50153 3000 nt of promoter + ATG
ttccttccccgcaaagcctctcggttctttcgttgaatatctttggttttaaccactgggttagtctttgaaatcgagttatgatctgctctcccaatctcagtcttcagtctctttgaagctctgaaaattgtctgagactcatcatttctcgtattcttttcttgagagtctctgacatatcttgtaggctttgattcgatagtgttcttggccacagaaatcttccttccacgtcgagcatctccgttccgttctttggtgtctctgacataacttctaggctttacttcgatagagctccttccacgtcgaacatcatctcctttcttttgctgggtttctttggtccttaagacagtcctcgaaatcgacttatgatctgctctaccatcctcagtcttcaacctcttagatacactggaaatggtaggagactttggctttctccctgctttactcttctcggtttctactgcttttcttaaactcctgtcaggtgcttcatgatacattatacgcactggagaactaccccttacattgtcctcaagcaaatatacattccgcgtttcactaaaatgtgccaagtactttttatattccaaatcatgaaccaaaccggaatcgcaatcatcaacacaaacaatctgcaggttggttcttttggttttgccatctctagctaaaagatcatccccggatgcatccactttaccacaaagagacaacgttttaccaccaacttcatctgtgtctgtgtctgtggctgactcaatctcaattatttcctgccacacaatggtcttagccaccacagacttcttcggtttcttagctaaaacatcatcacctgatgcattcaccagcaatctaccaccaagttcatctatgtttgactcaatctttatttctttcttcacaatcgtcttagccacagagcacttcttcgggttcttagctaaaacatcatcccctgatgcattctcttcattacaaagaggcaactttctaggaccaacttcatctgtgtctgtatcagactcaatctcaatgatttccttattcaaaatggtcttagccacagcagatttcttcgggttcttcttagctaaagcatcatcctttgacgcgttcctttcaacacaaagatccatcattttaccacaaacttcatctatgtttgactcagtctttatttccatcttcaccgaagacttcgcattctcttcaccaaaaggagccaactttgtagcagcaacttcatcatcagtgtctgtatcagactcaatctcaataatttccttcttcgcaatagtcttaagccaggcagacttcttcggcttcctcttcatattcaacttagcaggctatataactctaccagatcctgaaacaaaaacaacttgggaaacgaagaaaaattgaccaacgaccaaacttttcttcacatttgaaatttgcagcgaccagatctggttgattcaaccacaaagaaattaccaaatcaatcaaacctagtctcacaaagtagtacaaaacagtccactaaactcaagctcgggtcttttcacgaaattccaacatttaaagaacaaataaacaaatgtaagttagaaattgagaacccaattgtaacgagagggaaaggaaacagaagaagaagactgaaatttgaaatctttggtctcgctacttacctgaaatttgttgttggagagccaaccaaataacgaatccagcttctaagtagagacgaagaacccaaattcacaacaattctcgaggaagttttccgattagaagaaaaccctagaatttttataccgtatttgacggtaaaccataaagctcgtcgaagtcgccagtcaccggaagtagtaaagcaaccataaatgcatgatcccaacacgatatacggtgttccgtaccgttaaagtacgcgctcaaatatgtaataacaaatattaagaatctaatctctattccaaagtattataaatgggccgaaatgaaggctttttggcccagttgagattatttccaacttctatcctcttattaatttataaacatggcctttacaaaattctattctaaacataaacatggcctttacaaaaaataaggctaccacacacaaaaaaggtccatttagcaatggtgctaaatgagaagagcttctctatttacctagcagaatcaataagtctaagagcattttattaaatacaatcctctgtataaattccattactcatccactagtataaaggttttcatttatagaaaaaaagatttttaagttttttatattattttcatcatagtttaaaataaaatttgaattgatattttattggtacgaatgcactctgtaaattaaagcacgtgagcatgtggttgatataccatactctctcttaaagtcagcaagtcaacacaatacctaactgaaacttgtcattcaatttagatcctcaaccatcacattaaataaataaaatctcatcttctaacagttaaattaaaaagttttaaaatccacatttaaaagacactagtttctgatttgtcttgaccaaaacctgtaatttatttccattaggggaatgtaagcaaatcataaaaaaatagagaccttatgctataaacttgaattataggtactaattaggtttataatacgtttttttattttttgcttaatctgtacactttcttctttttcttcttctgtttcattgtcttcatgcgactcgtcgagtttcgtcccttcactctcttcacatcaaattccgcaccaccacatccacgtgtctcaacctccactctcctacgtctctccaccgtcgccggcgtctgcagcgtctgcttcatcaattcctcgccgtctctctgaaagaaaaaaaggaaccacctttctctctctgttttgctcgatctgttgtaatttactctgtagcgatcatcagatcgccggcgttttaaaccgccatg

SEQ ID NO: 5177 - DNA, 3000 bp, Unknown; identical to SEQ ID NO: 5176
  misc_feature (1)..( 3000): cDNA_ID_3075901_gDNA_ID_1620768_Annot_ID_167402 3000 nt of promoter + ATG

SEQ ID NO: 5178 - DNA, 3000 bp, Unknown
  misc_feature (1)..( 3000): cDNA_ID_3075907_gDNA_ID_1620768_Annot_ID_167398 3000 nt of promoter + ATG
taacatgaggatgtttttggctgcagcgttaatcactcctccgaggaagaagctgacagagccaacgaggatgcttcctctcctaccgtagattctggtgacgtaagaagctccgaaagttgagattaaaccggcgaagtagagagaagaagtgaagagtgtgaggatttgattgtcgtatttgcagtaatctgtttcgtttagatgcatttgctttcttttgtagatccctgggaagaactctttcaagaaatcgtccattgatgtaacaccacctgcgtttaacaaggacgaataaacaaaaatgagcattggtcttgcataggttccttgatttacaagaaactaagcagtcgacacttaaacaaagctgaagctaactctcgtcagagagggaactgatattttcggacaaaacaggggaaatttaacaaaactgaagcaggcccttttcaaaaacaatacttggcagtttcagaatctggctatttgattggtataagataaaaccagatcgagaaagttatctaaccagagactccaagatcatagccgaaaagagagcctcccatggatccgacgatgcaagcgaagatgaagtaagaagtgatccgatgttcatagagatgagctctctttaggcctccttcatcggtaagagctccaccggccatggctttaaaatcttgaagacaaaaggaggaatattctggtctccctctttgtaataaaatttgactgagggttgtgaactagttgtgatcactatgatcaagattttagagataaataaaaaggttggatattagcagactagctgttacactttgaccatctatctttccttatccctttttctaaggatatatatatgacttcatctttcttgattattacaatgactagttggtaataattttcttgataagctatgtccttttaaagaaatttcaaatatggtgatgatctaaaaaataaagatatttagatcattttctatataaattatagtatatctcgactccatgtcatattttatccataatttaatgctagcataccattaattattttctccataaatgagaaaatacatttccctttctattgaattgtatcataactttgatattaaaaccgtcttaattacctgagttgttcagttgatctagagattttttttttttttgcacaaggtattgagaaggtgtgtccaaagttggatcgaacttgatgaatgttatttgagtgacaatgtcatcattttttggcgatctacatgacagaaaaaaaagaaagatgttgtaagagttgtttataactaccacagatacaaacaaaagaaagagagatgctaaaaggagataaacaatatttttactctttaagacatcatttatcctctgtgtcctctaccacataaacattcctttgttggcttgagggtttcttgagttagcttcaccaaatactaattttctatagcttatacctttcttcttgttactggtttcaccggcccctacattgtggtaattgttggttcatatacttttgacgcattatttggcttaattacatataagattaatagatacaaaggacatgcatttgttgaacttacatgtgtttggacataagttggtatcgtatccaatccatcatccgcattaagcttcctttgcgcatcgctcttaaacaaccatagattctacgaacctataagggatctcaacctataaactcaacgaaacatgaatgagatcagagagagagagagagagagagagagagcaatggtaataagaatacaaaaccgatttctgatacggttttgcaacgtgaaaagatcatgtgagatattttagggatttctaaactgattatctatccgcattacaaaaatgtaccgtaaaacatatatctaaatacacaccacatttacgatgtataactttacgtaatagacatgatatctacgatgagttaatttttaaaataagatgtgtttgccatttttatcaactatcaccattcacccatcaaactattattttgacaagggaaattgtcaaaagtttgaatattatacgtagctcatgataacacaccgattaaagaactcatctactttgtgatatcaatttaagagtgatccatcattttcgattagcttgaatgatagaaaatactgattgttgaattgttttaaacgagctaataataataatttctacaaagtgatcggacaaaagaataaagtccaatgaggatgagacacatcagattatttaacataacacgtcagcaaattaagggatcgaagaaaatggtttagcttgacacaaccgccaaagcaaaaaggctgaagttttcctttttaggctctttctcttccacgcggaaattaataataaaaaagatccaaactttgaagatagcgaagagcaaaaagataatctctggctcgatttttgttggagtccttgattcgagcaagtttaaagactcgagggttttcttctggataacgtaattagatactcgtgtaagtgcaatttctctctttttcttctgttttatgggtgttggtgatttagggttttgcaaaatcgttttgtttgctgggtgattaagcttgggtgatttagaaagacgaattagatcaaggaacttatttcttgttatgagtcaatttgggttttaaagattcaatttttgatcagaatataatctaattgttgtgtgttgttactcgtaatgcaggttttctgaaagggtcatcactgctattgtcatagcttgagaaaggatctatttttaatatcagtgatattggtatctatgagatttggagtagttgtttggaggaacgtgtcctcttgcttgatgtgaagattgcttcttgttgtttgctgtttcttaatggagtggaggggaatcctctgctcgttgctttttattgtttccgtgggagagtcgtcaagtagatttgggata

SEQ ID NO: 5179 - DNA, 3000 bp, Unknown; identical to SEQ ID NO: 5174
  misc_feature (1)..( 3000): cDNA_ID_1827803_gDNA_ID_1620768_Annot_ID_167396 3000 nt of promoter + ATG

SEQ ID NO: 5180 - DNA, 3000 bp, Unknown
  misc_feature (1)..( 3000): cDNA_ID_3075911_gDNA_ID_1620768_Annot_ID_167393 3000 nt of promoter + ATG
gaagaagagctggtaaataaaatacggaaatgtgttaaataatgatataaaaatgtggtaaatgaacattaaatatcgaatgtatggaagaatgatgataagaaaaatgaaaattagaggagattaaaaagaaggcatgtgggaagggtgttgacaactgtcagaaatgccatgctcagatgggggcaaacagccttcactccttgtgggtctctcttaattatctcttttcctcttcccttcctctcaattctcatcatttctaaccccaaaacaagtaagtaaatcatactctatgatctgtttatttgcatttttattaacgttaacccgactttctagactagagagagctcatattttttgtactagaaaggtgtaagcaactaatatctatgcatcaaagatgaatgaaaaagaccaaagttttggccaaaaaaatgaaaattaaagagaccaaacatgttatactaatatattatgtgtagtatttcataatttcttgattcgaactttgatctagttggggaactcggcttccatcgaaagacattcacttcctactaaattgtataattttttatttttcgaaagatacaagacgacaaacaaacacacacatatatatatatatatatgattgtatttctccattttagctatatattgtataagtaaacactagtcgacaaaaaaaaacacacaatctcgaattatagacaatttatattgatcgtaaaatgatattctattagtgaatagaccaagttaccaacgagacctaagaaaacatcgctacaaaaaatcatagtctagttgtatggtcgtgttagcattctgattaatcgtcatattgtatcaatcgctatattgttgaactcatagtagcatatttggaaataattcctaatgaaatattactatcccattaaaattaaagttgaaataagctcatggacacattataataggttaaacatatttttgatttttttctgcccattctccctttactattgcataagttcttagtcaattttaacaaaacaaaaatataagttcctagtcaattccgaatgggaatgttattaccccattgaattgatcaagttcatacatggaccatgcataggttatcacgaagagataaataaacatttacttgccgaatgcaaaatatcaacattaaataaacgaaaacaaaaaatgggtcattctcaaataatattgatgtgtgaatttataatgtgtacacacctgtcatcataagtaagcgatcgactgtccttttctaactaacttcaacatttcacttcaatacttcaactctctttctctctctctctagtctttatataaaccctacgtacgtactctcttcacactcactgagtcaaactcacgtgtcaatgaccgagtcatccattatctccgtcaaacaatcgtctccggtgccggaggaggaggatcatcatcatcaccaacaagactcccaccgaaccaacaccaagaaacgtgtaagatccgacccgggttaccgaggcgtccggatgcgaacgtggggcaaatgggtctccgagatccgagagcctcgcaagaagagccgaatctggctaggcactttctccacaccggaaatggcggcgcgtgcacatgacgcagctgctctcaccattaaaggaacttccgccgtcctcaacttcccggagctcgccacttaccttccccgtccagcttcctcctctccacgcgacgttcaagccgcagccgccgtagcggccgccatggacttctccccctcctcctcctctctcgtagtctccgatccaaccaccgtcatcgccccagctgagacgcagttgtcttcctcgagctattcaacgtgtacgtcatcgtcgttgtcaccgtcaagcgaagaagctgcgtcgacggcggaagaactaagcgagatagtggagttaccgagtctagagacgagttacgatgagtcattgagcgagtttgtgtacgttgactcggcgtatccacctagttcgccttggtatattaataattgttatagcttttattaccacagcgacgaaaatggcatttcgatggctgaacctttcgactcttccaattttggccccctttttccttagttttatttttaaataatctcttcttttaaaaacatttagcctccaaacctctgaagtttatttaattattggattcagaccagagtttaatatacttgattaaacctgatagtaccatataatgtttattgctctcttttttttgatcggatcttctagatattttgtacgaacacgccaattgtgattggacgataaatggttttttgtttatattttgctaattaacttatatagtttaggtgaccattttttatactttaggtgaacatttgagaattaaactatttatatcaaagtagcggtagataaaagtattatctgagatggtttgttagttgacatatattgaatcttttcaacttggtatttattatcaccctctgtatttaattcacaaaatttctactgttagcttcatataaccaactttttcaatttaaattattgtttacagtgaatgagaaatacaagtacaatgcaatatttaggaaatacacttttgagaagaaaaatagaaactcattttctttccctaattaaaaacaatttgtaccagagaagtaaaagattatcgttctaccaaaacgaatttgcaggttaaggattatttatcatttcctcttgtttgactttgtttgcattagtcagacataattaatggcttgacccttaatttaacatgtccatgcactaactcatatgcaaatccaacgatgtgaaatttaaaaccttttttttattcatttttaatctttgtaaaacgaacttatattatgtttgaacaaatattttttcatacgcaatccttagatggggaaattaatacctttgtaacaaaaaaaaaaaaaaaatg

SEQ ID NO: 5181 - DNA, 3000 bp, Unknown
  misc_feature (1)..( 3000): cDNA_ID_2137078_gDNA_ID_1620768_Annot_ID_167392 3000 nt of promoter + ATG
agctattcaacgtgtacgtcatcgtcgttgtcaccgtcaagcgaagaagctgcgtcgacggcggaagaactaagcgagatagtggagttaccgagtctagagacgagttacgatgagtcattgagcgagtttgtgtacgttgactcggcgtatccacctagttcgccttggtatattaataattgttatagcttttattaccacagcgacgaaaatggcatttcgatggctgaacctttcgactcttccaattttggccccctttttccttagttttatttttaaataatctcttcttttaaaaacatttagcctccaaacctctgaagtttatttaattattggattcagaccagagtttaatatacttgattaaacctgatagtaccatataatgtttattgctctcttttttttgatcggatcttctagatattttgtacgaacacgccaattgtgattggacgataaatggttttttgtttatattttgctaattaacttatatagtttaggtgaccattttttatactttaggtgaacatttgagaattaaactatttatatcaaagtagcggtagataaaagtattatctgagatggtttgttagttgacatatattgaatcttttcaacttggtatttattatcaccctctgtatttaattcacaaaatttctactgttagcttcatataaccaactttttcaatttaaattattgtttacagtgaatgagaaatacaagtacaatgcaatatttaggaaatacacttttgagaagaaaaatagaaactcattttctttccctaattaaaaacaatttgtaccagagaagtaaaagattatcgttctaccaaaacgaatttgcaggttaaggattatttatcatttcctcttgtttgactttgtttgcattagtcagacataattaatggcttgacccttaatttaacatgtccatgcactaactcatatgcaaatccaacgatgtgaaatttaaaaccttttttttattcatttttaatctttgtaaaacgaacttatattatgtttgaacaaatattttttcatacgcaatccttagatggggaaattaatacctttgtaacaaaaaaaaaaaaaaaatgttaaatcaactaagtattgggtgagtcttctcaacgaaaacatcaatcaacaccggcctcataagttgattaaattaacacatttattataatcatcgtacattgatttgaatcaaaattaattgttacgttaattagtaatgcatctaactatcccgtaggaaaaggccattatattgggatccgcggtcaacggaggttccacccacgagcacggtctttatttgttttttcctttctcaaatatatatacggatgtatgattttttgcttttggggttaaacaaatatgaattactgtgcttagatcagaaatagacacttttatacaaatgattatatgattactgttcatagcataagctcctatgaaaacaaataataatcgcaacagccgtttaacctaatcgaatgctgaaaagccctcaaaatagttcatctaatccatgaatcgatttaacagaaaaagttgaaaattgtatgcatatgatatactcaagtatattccgagttttgagttgtgtaatgcaaggagtcaaggaccatagtttgtcgttgaacacaaccacgccaagttgtccaccaaaactggaaactaactaccatgccgttgtttccatagaagcaaaaccattaaccttcccattatcccgcatggccacatatatgtttaataatatttctcaccatacatttaagtctctctcgtagtcgttatttacatagcctacgtagttcattcatatcatttttgtttctttaccttatatcaaacaaattggttgttgattagaaaaacataaattggttcattaaatatcaaactaacgccatcaatctattgtttttttataaaaaaatgaaagagaagaaagtttgttgatatgaaacttacacttgctttgagttttgatagacaaaccaaagcctaactagtatttcctctattggtacttgaattctgaactttttcaccttccctttcgaggtggtttaacagtataccagttgagatgtaccaacaccaaattcttatacttttttttcttttaaccttgaattcagtattttaaacgaaactatgggaatgtgtttgagacggattttcattaaggacaatgcaaataattatgagatgctcagaattgttgtatatatcaaaaagccaacacctatagttatatatataactttcttcgatttaaaaacaataagtcgctttggccgagtggttaaggcgtgtgcctgctaagtacatgggctctgcccgcgagagttcgaatctctcaggcgacgttatccttttcgttttttcgtctatttttaaaccgacttacatagacactgcgtataagacaattgattccttttttttgttgttaatcctatcaaccctagaaaaggcttcacgcccgatttcttttttccccagaaaaaggcttcacttccgttcgttgttcttcatcggtctgcgccgcctcgcacatcgtttcacctttctcagaatctctcttcccgtcgattagtttcctcagaggttagcttcttcgatttctcagattcaattctgctttttgctttcctcctgttgtttttaggtttttgtcgatctctatgttcagcgattcctaaaccctacttgttttccgctctattgtagtgaatccaacccagatttttcagattttaatcggaattattcgggatctaatgctcgcgtcgagtttatcgctagaaaaccctaatttcggaggatctgtcacttttattatcagaagcttgttgttgtaattacggattaggtatgtcctgatcgttattgttctttgtttgcaggttgcgatttgttgaaaaccttgatttagactatg

SEQ ID NO: 5182 - DNA, 3000 bp, Unknown; identical to SEQ ID NO: 5173
  misc_feature (1)..( 3000): cDNA_ID_3075917_gDNA_ID_1620768_Annot_ID_167387 3000 nt of promoter + ATG

SEQ ID NO: 5183 - DNA, 3000 bp, Unknown
  misc_feature (1)..( 3000): cDNA_ID_2137064_gDNA_ID_1620768_Annot_ID_167386 3000 nt of promoter + ATG
aatttaaactgaaaggaaacagatgatagtctgactgtacccctggtttgtacttgggagaccgtgaagccaatttgttgaacaattgcatcaactgaacaggattttctttctcatagcgcaaagcatatagcattaccaaacgcagccggtcgatgtcagacacactttcattatttaagagatccgtaactgcctgcaaataagcatgaatagagagtcagagctccgtgcttacagcagagtctgcacaattttgcatatttcgctaacttctgcaggttcactggattacattcgcatgagactccaaattattgaatgccaaattattcagtaagaacttctgcaggttgtagctattttttaatatatgcgactacaagtgaatgttcaccacagatattcactacctcatatgcagctccttggccaccattgcaagccaagtcctgctctgtttgtgaaaccgtcatcagtttccttgcttcaactagcttgctcatttcagtaaccagagttacatgctttgaaacgttgccttgcatctttttgtactcagggtagttgtcaacaaatctggccatatcctctgtacaaccaacgaattcacagatatataattgtcactagcacgagaatctgttgttacaaaagtttttgcagagaatagtttaagactagccatatttgtacctactgtctggatattttggttactcttggccacctgctgaaagtcatctaccattcgcttgatgttcattccaatatccccaaaattttcatacatgttagatttgaaaaatgcatcttgttctgatgataaaaccacctcctgccaggataagagacatattagctgtaaggttctcaactaaaaaacaatggcattggagaaaactaaccacttgctgatcttttggaagacttccaatggatttcaagtccactttattatcttgaagtcctatgagttcgtgcaccattgcctacagaaaatctcgttaattagtaagtcgtagtcttacaaaaaagcaagacagcgggaggcacatcttatatcatagagtagcacaataattttgtttagtcaagttacctgatatgtccactgattcagcaatggggtaaccgggtcatctcttctgtcaattacaagtagcaacggagagctttcagtccgtctaaagtcaaaaagagcgctttcatgctgatacatcaatttctgaaacataaacagcgaattttcagactattggatagacacaagtgggaattagttccatcacatgcatgcaaaatatagcgggaacaaataactttacgagagcttgtcaaacaacttcacttacagctgtttcgtgtgcaatcctttttgcagtatcagaggtcctctgatatctgatgacaggtcttcgtttcaacgccagaaacactgccgcaattccatcaacaacccgatcggaaaagcgttgcaaaccagagggatcgacaactgcggggatcatatatagatgatttgatgccatattcaatgtgaaatgatatggatcaccagaaacaaagtctgcataatactcctgcaatataaaaaaccacaaagactatgttaaacaagccattatacagtactatgccgagtgcaccaagcaatataagtttaaatcagaaaactaaagacaggtaggggggatactaagctccacaagtatggccgtttcatcacaaaccaagcaacttctcagagacagctaaaaatctatacatatattgatccatcatataggctatgaaacattcttttagcattagcctcctattcaaaaacatcatggatgagggaagtctaaaaatcacctgaacttgctgtacaacttcctgctcatcggaatcagccaaaatatgaatctgagtatccttcaacagattggagaaaactgaaagaattcataacaaaaacaacatcaaattttgtatattgtgagtgaacaatgataaactcgaaatagttagaagatgaaaaaatcatacataaatggtattctccaaatctaggattcgcaagctggtatcgtaatttctgaatattatctgaagttggacggatgaaataaacagctttcagatgtgacatcgattcttttgacacagatattgaatctatcatctccaccagaaacacttctttctgaagcagctctgactgtgaatacacaatgcttacattgctaacctgcaaattcaacaattaatccaataaacaagtaatcacgaagatgtgtttccggttacaagggaaattatgaaccacgattccagaaacaaatcagagaagattagcaatcgaagaagacgagatcggactttaccgtttcggagtcgagtatgagaaccttcatgccggagatgtcctgaagcatccggttaatgtaatcacgcacagacgtaaccaaaaccatcgtttcaccgcaaaattctgctactgttacgacgttgattcagatctacggcgactaatctgatgattcttgttaacaataacgctggcgaagtgatttcgcgttcactttcagatcttcctttccttaatcgagaaaactaaaaggtccccagactcgtcgactcatacgaagaaaagtgtttttgcaaaacaaaccctatattttattggttattcctcttttcaacacaaacttaatttttgattaactgaacctaatttgagggtttatttattaagtaataaaacatcagggttttacaaaggaaacatctaatagatcaggatttttccgcaaaaaaattcaaacttaacattgacccatcgtgttgattttgttccgatccgtccgctaatataatataatttggattagcgtcaaaaacgtgtgattattgtaatgctcgatgcatccagcttcatgtagtctctcactcaggaaagtcaaacttaatattcttacagtgagaatgaagctctcttctgaaagtcccatg

SEQ ID NO: 5184 - DNA, 3000 bp, Unknown; identical to SEQ ID NO: 4895
  misc_feature (1)..( 3000): cDNA_ID_2993602_gDNA_ID_1620768_Annot_ID_167384 3000 nt of promoter + ATG

SEQ ID NO: 5185 - DNA, 3000 bp, Unknown
  misc_feature (1)..( 3000): cDNA_ID_1827785_gDNA_ID_1620768_Annot_ID_50154 3000 nt of promoter + ATG
aaagtagcctcctgctctaagcattctattaacttcaagaagaagtatcccatctgtgtaattcatagaaacaaaatgctgtagtcacttactatgctaaagctcaaataacattagaggagaagcaaaaagccagaaattaaccatcgcgtgtccaattaattctgcatctggaacaatgaatcatctcaaaagactggcttggatacaacaacctccgtgtggcaaagacagccaccatcgcaggaacaccacgctccaatgcaaactgtatctgattctcatgaacatcttttggtgctacagacaaggttgtcgtgttacgctgcatcaaaaacgcaccaaagctcgccacaccacagccaatgtccaaagcaacacgggtgcgtgatccaaatgtaatatcaggaatcatctgcaaatttcaatctaagagaatataagatcaacacaaaaaaaaacagattagccaatacaccaaaaaaacaggtaggaagaatcaaaaaacaaacctgggagatctggtctaagtactgatcagctccatggatgaattgagttccacctccagggaaaacaaacttatctttctctcttctaatccaattttgacctcctttatcttccactaaacgtgtatgaggcacattattgaaccatatctacaaagcacaaatcaaagttagtgactttacacttaaggcttagataaaggtaagaacttgatcacactatttcaccttgtctctgctctgtggccattggattggtttcttataaccatctggaggtggaatcaagcaatctaagctctgtttaggacaatgtctctcgtaattttctcctcgatctgtattgttcaatctctttatctcttcttcgttgtctaagcaaggaatgtaatctatcttcgtcttgtcacacaatttgagtttctcaatctgaaaaccgacttccggcgattctttttcctcaaccgacgaatttccggtggctgatttaagctcgtcgatggaatctggatcgaatccgccgatttcgaaggaatcagacatggcaccattctcgttgatgatacctgttctcaccactgtcggtggaagcggaggaggtgatattttgagacgaggacgcggtggaggagatggtgccaccgccgcgacggatgttatgttggtttgaatagcttcggtgacgtttgaagaagaggagatgggaaaaggaagagatggataagagaaggaatctgagaagtgattgaagagaaaaattgttgagattgagagaaacgcaaacgcaatcaatttaaccaatctcggagttttgacaacgtctaatccaacgtcggagagtttcatggcggtttaaaacgccggcgatctgatgatcgctacagagtaaattacaacagatcgagcaaaacagagagagaaaggtggttcctttttttctttcagagagacggcgaggaattgatgaagcagacgctgcagacgccggcgacggtggagagacgtaggagagtggaggttgagacacgtggatgtggtggtgcggaatttgatgtgaagagagtgaagggacgaaactcgacgagtcgcatgaagacaatgaaacagaagaagaaaaagaagaaagtgtacagattaagcaaaaaataaaaaaacgtattataaacctaattagtacctataattcaagtttatagcataaggtctctatttttttatgatttgcttacattcccctaatggaaataaattacaggttttggtcaagacaaatcagaaactagtgtcttttaaatgtggattttaaaactttttaatttaactgttagaagatgagattttatttatttaatgtgatggttgaggatctaaattgaatgacaagtttcagttaggtattgtgttgacttgctgactttaagagagagtatggtatatcaaccacatgctcacgtgctttaatttacagagtgcattcgtaccaataaaatatcaattcaaattttattttaaactatgatgaaaataatataaaaaacttaaaaatctttttttctataaatgaaaacctttatactagtggatgagtaatggaatttatacagaggattgtatttaataaaatgctcttagacttattgattctgctaggtaaatagagaagctcttctcatttagcaccattgctaaatggaccttttttgtgtgtggtagccttattttttgtaaaggccatgtttatgtttagaatagaattttgtaaaggccatgtttataaattaataagaggatagaagttggaaataatctcaactgggccaaaaagccttcatttcggcccatttataatactttggaatagagattagattcttaatatttgttattacatatttgagcgcgtactttaacggtacggaacaccgtatatcgtgttgggatcatgcatttatggttgctttactacttccggtgactggcgacttcgacgagctttatggtttaccgtcaaatacggtataaaaattctagggttttcttctaatcggaaaacttcctcgagaattgttgtgaatttgggttcttcgtctctacttagaagctggattcgttatttggttggctctccaacaacaaatttcaggtaagtagcgagaccaaagatttcaaatttcagtcttcttcttctgtttcctttccctctcgttacaattgggttctcaatttctaacttacatttgtttatttgttctttaaatgttggaatttcgtgaaaagacccgagcttgagtttagtggactgttttgtactactttgtgagactaggtttgattgatttggtaatttctttgtggttgaatcaaccagatctggtcgctgcaaatttcaaatgtgaagaaaagtttggtcgttggtcaatttttcttcgtttcccaagttgtttttgtttcaggatctggtagagttatatagcctgctaagttgaat

SEQ ID NO: 5186 - DNA, 3000 bp, Unknown
  misc_feature (1)..( 3000): cDNA_ID_1827781_gDNA_ID_1620768_Annot_ID_50155 3000 nt of promoter + ATG
ctcctaccaaattattcaaacagagcagattctaatttcattggagcagtgggggttaaacattcaagcaacttaaaactacatataatccaaaaaagagtcatcaactgatcaaacatttcaccaaattaacattacaggagaaactgttaaacctcgaaacttcaacaaagagagattcatatctgggactaaaaaggggctgaagcacgataatgaaggaatcgaatcaaacacatgagcttgaaaacatataaaacataacagaacagaacagcgtcaaacagagattgaagcaagcaaagacaagaactgacgaaatatgacaagacatacccaataaaactgaacaacaccttcgagaaagaaagacgagatcaagaactgaatcaaatctagacgaaaaagagaaaccttcgtctagttagtttctcgaattgaagatttctatagaagttttttttttctgaagggagacaaatactattacagctagatttggcctgaaaaaaaaaaaaaaattaggaaagtgcgagagtatctaattctccactgcttacgtagatgtacatgtgtactcgctctcagatgttgccacgtgactctggtcaactatccgtcaaagtcaaatgcttttaaggatcacagtgtccctcaaggatatatctgtctttccatttctttttcttttttacatacacccaaattattggctctattattgcatccaaagtgtcagtttttttctttcattttttggaaaggataaaaatgatatatctaattttagaaggtttttttagtggttacaagtatagtaatacttttacaccataccttaaatttatttcctaaaagataatttcatataaagtaaatctattgaatttaagaacttttatgttgtaggtctagaataaaaaatgattaagttaaaggtatattgaatctaagaacttttatgttgtaagcaagcaagattgtgtctaaaggtctattgattatataacgcgaatgaaatactcctctctttgggcctaaaaatgattgtcgagagagttcgtgtaagatattgaatctggcccaattttagtcataatttataagcccactttggcattgacagttatataaaattcagcagaaattatttaattgaaagatttctcgtaaaatgttttgagtacgatggatattcattataacaaatagcaaaacgactgaaaaaaaaagaaatatacttatataataataacatataattgacgtgcatggaccaaaaataataccaacctctaaaacagaagggacaataaataaagagcatccaaatatgtgacacgtaactagccaaaaatattacaaaggtcacattcatcataaatctattgaatttaagaacttttatgttgtaaccaagattgtgtcttcctttctactcatttttcgcccaagaaaaacaattatagtaggtccaaaagtaatcatttacccaaacaaaacaaaaaaacgagtttttcaagactttcatgaacaagctagttagagaaacatcaacgtcatgcatgttgcaaattcgttcatatatcttagtcattactcatttgtgttactaatggttttgtatagtgaagagagttgaatttatctacaggctgcatctagttttgtaaaacataaaattacaaaactcctttacatatcttagattaactcttttctttttctttttctgtcataaatcaaaatcgagtttttatttgattgatggtttatgtatgtcaagtagtagtattatatttaatgtagatattttagactagctagtgtccatggtcatttcgtcttaagtttgaattaatgatccattaaataatacacgtgttttatcattgaagggtatttgatcaatgaaagagtggccaaatatcaattaatttcgttattttgcttcacatttaattgtattgaattggcctaactgtgacatgtccatgtagctatctctttcgttttaaatgacatgctattgtttggtcaggatttgtttttggttataactattatggtcatgattcacgcttctttgcaaaatcaaattcgatttttgaaaaataatttaaagtattccattcatctaaattgattttgaaaccgagtcaactctcacaaaatatttggaaaatttaaagtattccattaatctaaaagttttgtttgtttgttaaattgatcatcatatatgttagtacaagccaataagatcaagggaaattccaacatttaataaaagggttactaacatataaagtattaggctcccaaagatcatgcgaataattgggacacggtctttcgattccatgtattaattacgaatttacggcacaagtacagaaaaatgattaggtctaaaaaactaattaagattaaagaaatgagatgctctcttattatcatatgtaaagatcgagtggcgttgtcgtggcagaaacaaaagccaccaactgagtagtctacatttccttatcttccggttaatgtttttgacctctctctcagtttgttgccactttcatttctcatcaactctgccattcaagaattcatcatcatcatggaccaaacaatacattcatttagttttatcttcaatattaaatgtatcttaaaattgtctcaatagttgaatattttggtattgggtctctgtttttgagtcatgtttgattaattaatgaacaaaaatcaattttgttcgagtgagttcatttgaaaacagtcgggttggtccggtttagatgccattgagttttctctccaatgataaaagaaccagcttcctataaaacctaaaactaggtgacataaaacatggaaaaatgttgaaattagttgtttcataatatatagtactccataatatatagttgttttattttgcttgaaacaaaaataaaagtaagatggaaatagaagaaagagaaggtagggtccatg

SEQ ID NO: 5187 - DNA, 3000 bp, Unknown
  misc_feature (1)..( 3000): cDNA_ID_1827773_gDNA_ID_1620768_Annot_ID_50157 3000 nt of promoter + ATG
acgagcgtggtctcctctttgaggagttcaactttaagtaatttccgatcaccggcggtcaatatctcagacgagattttacacgattcgttgaaagttggaccgtcatcggttgggagctttggttcgtcctccatttagtgaattgggtcgggtcgggtcagagttagactctgtagagacccgaataggagaggacgtgactctgggacaagaatcaaaggagtggggaattgtgatgaggaggagaatctgagagagattggaactgagaggacgatttttgttacaacgttgcgcgggatatccagcaatgagacgcttcttaagcttttatttattttcttttattttattttttctcctcctcgtaaacaggttttaattattactatttatttttttctgtctctcggaaaatgatttttgtttttttagtgcaaattaaatgtaaacaaacatatttaggtttcaatttttcaaaaaattaaaatgactaaatatgagagaatcctaagaatcacttttcaagagaaaaaagtgtctattttgtctataaaataaattaaaatttgttagaggttaaataatgtttttattaagcttttggtttcataaaagtggatgtggtaatatgtttaattaattatgaaaatatcatgtgtcattctttgttttgtccgttaattaatgaaacatcaagtaacgaggagttgttacataagttattctaagaaattcgaagagacaacaattttattttgcttgccttgcttatgtatttgccttagaattgttgctttttgcattaatattgttcttgaggaaactgcgtcggaataggtcaataccgagagacggcattacagtaagactacatcaactccaaactacaagtctgttttgttgatcatacaaaagcgaaacaattagttttagtgttcgtatggtttgttctcatatttccaagatgcatccaaaagtgcgttgagagaagtgagtgggacatggttatgtgtacaagtagattataacttgattagttcaattcccgcatctcatatttttgttctcaactccattgtttttctctctttttttagcaatggaatgatgatccatagcttattgtcatatatcaaagcattccttggtttccatattatcaaaactatgaattaggcacagattttatgcatcatgtgtagctagatgatagcataagtttttctcttagctcttaattctcccttggattatgatatcacctccatggctccatatagacagacagtaatgcaaacatcaaaatatagtaattatcaacaactacaacactataagcctatataacacccttgcagttccacgcttcccagggatcatggcgatactcttctgctctctcttttattgtgatgcttctttgatctcttataaagtcgacatagtctccaacctctaagttccgccgcaactgctcattcatcttcaatatggacggtgtccgacgacatatatgatatggatgagaagatgaagtggatgaggtggacaacaagaagaaatactgcgacttcgtgtatgaatatcctccccttagcttccacgtttttggcttctaatgacagggatcatagcaagggtttggtcacattcaaaccgtgactcaatatcgttaacaagactctgattcggataaatgcttggctcatcatcatcgcacttatttgcatcttcaacgaggagaacacaagtcagttaaccatcgttgtctggagctatgaaacttattcccgcttgcttggtcgcgaaagtctccgccgatgttatgattgcgaatgagtggggctgtgtgagtcttattgtaaaataataatacaactagctaggtttggtagactaaagttattacatgaacttttattctgatatacacatacaatatatatttcttttttctaatgataaaccattatggaagaatactagcgagaatcttattagaacgaacgactaatcaagtaatcatagactaaagaagctaattaaacgactaatcatgtctttatggaccacctttgggaccattttgattgaacacaactccccaatagatctgaatatcttggaaataaattggcaatgtatttttagtaaaagcttgtgtgaattttctctacaaaaaagttctaacttttattgttttgacatatgtttgggtaagatttaaaaaacctatgactttatcgaaaaatataaatatttttttgtttgtcaattaaattttcatcgtaatcattgagattaaaataaaataaaaaaactaagacccacacaagtccaaatcaaacaaattagcaacaacaaaaaaatataagttgggaatagcaaaatagtatcgtttggggattttacaatttattttactgaaaaagagaaaaaaaaaaaatcggtatctctgaaaaaactgaccgcctcgcgttgtctcttccctacttcctccgattccttctcctctctctatatctgatatcgtaatcttctccgcctctctagggttttctccgttactcgtgctccagttttacgttcgttggcattcgctcaatcgcttctgattcatgaggttagggtttcgttattttcaggaggtgacaagattttattttattttatttagtctctgttgcggcgtgtttaaaatcagaagagatcggagggtttttgtcatcaatgttgatgattgagccatccattgtcttgtgttaggtctttgagttgaccttcttaagttttttttttttttttttttggggtctctgtttggttgattttgtagatcatgttaatacggggctgggttctattgagaatctgttaaaggtctttgaaccattgcatagtttgatttactaaatagcttactgatttttcattaaaaatccctttttttgagaatgttatttgtttggctttgaatcaggtagcattacgatg

SEQ ID NO: 5188 - DNA, 3000 bp, Unknown
  misc_feature (1)..( 3000): cDNA_ID_3076129_gDNA_ID_1620770_Annot_ID_167460 3000 nt of promoter + ATG
aatgttttgtgatcgaatctcttaaaatacatcaataaagagtttaggatgtcaagtttgcatcaaatatgcccacggagccccaactagaccatgaaaatccgatgttgtatcaggtcaaatgacctagctagaggtgtcaatgccaaaaagaattttcaaattccaagtatttctttttttttggcaccgatgccaaaaagaattttcaaattccaagtatttctttttttttggcaccggtgtctcctcagacatttcaatgtctgttggtgccaagagggaaaagggctattaagctatataggggggtgggtgttgagggagtctgggcagtccgtggggaaccccctttttcggttcggacttgggtagcgatcgagggatggtatcggatatcggcacgaggaatgaccgaccgtccggccgccgggattttcgcccgagttttctcagcagttctcggacaaaaactgctgaatcgtcgaggagccgagttttctcagcagttctcggacaaaaactgctgaatcgtcgaggagaatgggcttgccttgcgtgggctgccattagttcttcgaggcgttagggtggcggcggtataaaagtgtcggagttttttcagcagttctcggacaaaaattgctgagtggccgagaagaatgggcgtgccatgcgtgggctgacatggattcttcgaggcctaggggtggcggtatataacttgttcgcatgatattacgtgtcatggcatgggctgacatggattctcctaggccgtttgggtggcgggtgtcatggcatgggctgacatggattctcctaggccgtttgggtggcggtatagttgtcttgcgtagaaataccgagatgtccccatgggcatcgattccacccgcctaggttggatgggcgtgcttcgttggaaagcatggatccgcctaggctgtcccgagtgtgagcgaggtgtgagtgtcgcccatgggcatcgacaccttgcggctaggaactggaacgagacgggtggcaaagatttcgagtatattccgagaattagcaaaccgtaacgaagatgttcttggcaaccatctttattccgagaattagcaaaccgtaacgaagatgttcttggcaaccatcttttgatgggagtccggctgttcgatagccggccaagggtgatgaacgaaatgtgaacccttgtctcgcctaggttggatgggcgtgcttcgttggaaagcatggatccgcctaggctgtcccgagtgtgagcgaggtgtgagtgtcgcccatgggcatcgacaccttgcggctaggaactggaacgagacgggtagcaaagttgttgatgttattccgagaattagcaaaccgtaacgaagatgttcttggttgttgatgttattccgagaattagcaaaccgtaacgaagatgttcttggcaaccatcttttgatgggagtccggctgttcgaaagccggccaagggtgatgaacgaaatgtgaacccttgtctcgcctaggttggatgggcgtgcttcgttggaaagcatggatccgcctaggctgtcccgaaggtatctcgcgcttgtacggctttggctcggattcgtccgtcttctttcttcttagccgagtacttcgtatgagtggtgatcggatagctagtgttcgtaggctccatgctcgcgccgtatgagtggtgatcggatagctagtgttcgtaggctccatgctcgcgcatcgaactacctaccacctatccttctcagttaattcacgggcgatgttacgctcgatgatgagttccggggcctgtgtttcgtacctaatttgaaggaattgttgagtttggtttacacctttgcccgcggcttctccttcgtggggaagtcgtgggcacaaacatcggcgcttgttcacctctcgtcatcgcatttgtaaaagttgtcgacggtgactcgaagtgattcagtcccgccaaagctcatcaaaagttgtcgacggtgactcgaagtgattcagtcccgccaaagctcatccgtccttcgggcaaaagatgacggtcaagacctcgtcctttctctctttccattgcgtttgagaggatgtggcggggaattgccgtgatcgatgaatgctacctggttgatcctgccagtagtcatatgcttgtctcaaagattaagccatgcatgtgtaagtatgaacgaattcagactgtgaaactgcgaatggctcagtaattctagagctaatacgtgcaacaaaccccgacttatggaagggacggtaattctagagctaatacgtgcaacaaaccccgacttatggaagggacgcatttattagataaaaggtcgacgcgggctctgcccgttgctctgatgattcatgataactcgacggatcgcatggcctctgtgctggcgacgcatcattcaaatttctgccctatcaactttcgatggtaggatagtggcctaccatggtggtaacgggtgacggagaattagggttcgattccggagagggagcctgacctgacacggggaggtagtgacaataaataacaataccgggctctttcgacctgacacggggaggtagtgacaataaataacaataccgggctctttcgagtctggtaattggaatgagtacaatctaaatcccttaacgaggatccattggagggcaagtctggtgccagcagccgcggtaattccagctccaatagcgtatatttaagttgttgcagttaaaaagctcgtagttgaaccttgggatgggtcggccggtccgcctttggtgtgcattggtcggcttgtcccttcggtcgctttgaagaaattagagtgctcaaagcaagcctacgctctggatacattactttgaagaaattagagtgctcaaagcaagcctacgctctggatacattagcatgggataacatcataggatttcgatcctattgtgttggccttcgggatcggagta

SEQ ID NO: 5189 - DNA, 3000 bp, Unknown
  misc_feature (1)..( 3000): cDNA_ID_3076123_gDNA_ID_1620770_Annot_ID_167462 3000 nt of promoter + ATG
cgattaagacagcaggacggtggtcatggaagtcgaaatccgctaaggagtgtgtaacaactcacctgccgaatcaactagccccgaaaatggatggcgcttaagcgcgcgacctatacccggccgtcggggtagggcgcgagcccgggcggagcggccgtcggtgcagatcttggtggtagtagggcgcgagcccgggcggagcggccgtcggtgcagatcttggtggtagtagcaaatattcaaatgagaactttgaaggccgaagaggggaaaggttccatgtgaacggcacttgcacatgggttagtcgatcctaagagtcgggggaaacccgtctgatagcgcttaagcgcgaacttcgaaaggggatccggttaaaattccggaaccgggacgtggcggttgacggcaacgttagggagtccggagccaccctggaaacggctcagccggaggtagggtccagcggctggaagagcccaccctggaaacggctcagccggaggtagggtccagcggctggaagagcaccgcacgtcgcgtggtgtccggtgcgcccccggcggcccttgaaaatccggaggaccgagtgccgctcacgcccggtcgtactcataaccgcatcaggtctccaaggtgaacagcctctggtcgatggaacaatgtaggcaagggaagtcggcaaaatggatccgtaacttcgggaaaaggattggctctgagggctggctgcttccgcggcgagagcgggtcgccgcgtgccggccgggggacggactctgcttccgcggcgagagcgggtcgccgcgtgccggccgggggacggactgggaacggctctctcgggagctttccccgggcgtcgaacagtcagctcagaactggtacggacaaggggaatccgactgtttaattaaaacaaagcattgcgatggtccctgcggatgctaacgcaatgtgatttctgcccagtgctctgaatgtcaaagtgaagaaattcaaccaagcgcgggtaaacggcgggagtaagcatgaatggattaacgagattcccactgtccctgtctactatccagcgagcatgaatggattaacgagattcccactgtccctgtctactatccagcgaaaccacagccaagggaacgggcttggcagaatcagcggggaaagaagaccctgttgagcttgactctagtccgactttgtgaaatgacttgagaggtgtaggataagtgggagcttcggcgcaagtgaaataccactacttcggcgtggcctatcgatcctttagaccttcggaatttgaagctagaggtgtcagaaaaggctttttgatccttcgatgtcggctcttcctatcattgtgaagcagaattgctttttgatccttcgatgtcggctcttcctatcattgtgaagcagaattcaccaagtgttggattgttcacccaccaatagggaacgtgagctgggtttagaccgtcgtgagacaggttagttttaccctactgatgcccgcgtcgcgatagtaattcaacctagtacgagaggaaccgttgattcgcacaattggtcatcgcgcttggttgaaaagccagtggcgcgaagctaccgtgcgctggattacgccgcccgattgccgaccctcagtaagagcttagtgtaacgaccgcgtccgccgcccgattgccgaccctcagtaagagcttagtgtaacgaccgcgtcccgcgttcataaagaggccaggttgttttaggagaaaactagaccatggtcaagaaacggactaaaatacttagtcagaagaactagaaagttcaaagctgaaccagctaggtgagccggacaagttgtactcatagacgccaaacccttactatgacgttttcccgagcacctatccatcctaggataaggcatgctctttcccgtccgaacctcttaatttttcgcgattcaacatagaattgcctttttcccgtccgaacctcttaatttttcgcgattcaacatagaattgcctttacgaggctaaattctataatcgctctcttattacacagcggaagtctttctaaccttggtttaattctaaccaactcttgtaccggtttcatcgtctttgtcccttagacttagatcgatcctttactcggtcaagacatgcatatgttcgctaaccattctaagccaaacaatcgcatattcctttatcctactttcaccttggccaatatgcggatttgattccttagcccgtttgtcgccttactcacttggccaatatgcggatttgattccttagcccgtttgtcgccttactcaattcgttcaacaactcatcatcggtcgtgaattgatgaaccaatctctatcgttacttagccatacaaccaaccaaccccactggtctaagtacaacgatagagattggggatcgtacgattcccttggttcacgatggccgaatcaagctcttggcttattggtccatttgttctccaaacgtacgcccctccggctaccggtcgtttaacactaagaccgcccacggtttactaaccgtttacccgtccggtcgtttaacactaagaccgcccacggtttactaaccgtttacccgtccggtccatggtggtcgataaagctttcgggttaatgatccatccatgcggtccgaacgacatccttatcacacccaagggtccgtggattcatccactggatcatcgtaggctagcccatgaaatctttcttccgtcggccttaggtttgctcgcgggtccaacatccgttttgtccatcggttcccaccgtggactttctttcaccatggctgaggagatagatacatgaaggcggccgcgatgttgagtttcaccatggctgaggagatagatacatgaaggcggccgcgatgttgagcctttatggtgaatcacgttccttacccattcttggtgctttctccctttatcggtaagattgcatcc

SEQ ID NO: 5190 - DNA, 3000 bp, Unknown
  misc_feature (1)..( 3000): cDNA_ID_3076083_gDNA_ID_1620770_Annot_ID_167481 3000 nt of promoter + ATG
ggcccataactagctacgaagactttcccaatcttttgtaatcttcaaaatgtggttactttcagctcaaacttaactttcttattactattttatgatatttgataatcgatcaggagaccttttttttttttcttaaagaaattttcggaactactagaattttctcttggaattgaaaatatttaaagaaattttcggaactactagaattttctcttggaattgaaaatatagctaagctagctaggctttaccatacgttaatgatactgtctttttctctttacaattccatattcgaatttgatttgtatataacatattgggaagaatcatcaatatgtattcagctcaaaagaattcaacaaaaaaaaatgcctattatcaataaaaattcactgggctttagaaggcccacaatagtataatggatcctttttgttgggcttatttcagtcagggaacaatagccttgattttgttcctttttgttgggcttatttcagtcagggaacaatagccttgattttgtaaatctagttacgtggcatttaatatttaaaactacaaaatttaccagtcttggctcaaaaaaatatttattcacttttcttcttctctgaccaaaatcaaaatttgttcgattctcattcttcttctcacagtcgtaaaccctaaaaaaaaaacagagaaatcaaatttcaatctcgaaggatctacaaagaagcatgacgaccggagatctcgttaatatccatcctactgagcttaaattcccctgtcgaccggagatctcgttaatatccatcctactgagcttaaattcccctgtttttacgttttcgattctccgaattgaaccgtcgttgtttgtttgggtaacctctgttataatttgtgttgttgttggtggtgagaagttgagttgaagaaacaaagttcgtgttcgatgcaattgaccaacaagacaactactcaatgtgtcgcttttaaggtcttttacattctcttcttacaattctgtcttattagtacacattgagagagtgttgatgttaattgagagacacacaggttaaaactacacattgagagagtgttgatgttaattgagagacacacaggttaaaacccggtgattcctgcaatgttacaggttcttaaaaccatttcttctttcattcaaaagctttggttttttttagtcaacaacacaaaagatgattgttgttttgtttcagtgacgatgcaagcccagaaagaggcaccacttgatatgcaatgcaaagacaagttccttgttcagactgttgttgtctctgatggtactacttccaaagaagtcctcgctgaaatggtttgcacactatatgcttttttaattccaaagaagtcctcgctgaaatggtttgcacactatatgcttttttaatttgttgcagttcaacaaggaggctggtagagtgattgaggatttcaaactgcgagttgtttacattcctgctaatcctccttcacctgtccctgaaggttctgaagaaggcaactctcctatggcttccctcaacgatattgcctctcaatctgcctcactctttgatgacgtgagatgatgattcattttgttatccaatgttaagaaaccgagtgtaatatgcatcttcttatttcaggtgtcaagaatgttaagaaaccgagtgtaatatgcatcttcttatttcaggtgtcaagactttgtcttttaccattctcgacatcttgatagttaagtttcaccaccaacatcctctctcattcgctcaggcatggtctatgatttccaaattgacggaggagaagacttctgctactcaacaaagtcagaagctccgtctcgaactggtacgcgttgaccccagtgcactaagtgatctacttgttatttgtgtaatcttcataaacgaatacatgtatatattgtgtattcaggaaatgctgaggaattcataaacgaatacatgtatatattgtgtattcaggaaatgctgaggaatggtgggtctgctcggttgcgtgattggctacttattgaaccggatataaacgccatggggttagcttcatcatccttttaatcatcaaatcttgcaaagttcttaagatttttgaccagattttcgtaaaatggaggtggtttttttttaaaagtttcatatttaagctgtaaaatcagtagctgtagcacaggaacaggtgtgattttgtggcaggtttcttgttattgatttaaacacactttcgaggtgtgattttgtggcaggtttcttgttattgatttaaacacactttcgagtgattaagaaaacaaacgcatcatacaaagtagaaagaaaacagttacatgttttagtcttggaagtcttctttgggcttggtctttgtctttcgatatctttcttccatctgcatgcccatggaataagctgcttgagccaccttttctatgtttggaacgttgtagctctgcgctatatatatcccccagatggttccgcagacgaatgagaagtagcttcttataaaccccattttcaacaccagatgcagacgaatgagaagtagcttcttataaaccccattttcaacaccagatctatgtttatcttttacttcttctccaaggggtttgtttacaagttcatttatttcctcaagggaaaagttaaactttttctccaagggtcaactccttaaatctcgccatctataaaagtctatcagatattatatgaatgtgtcgttttcgaacagcaacaactgtatttttgagtgatcggaaaagattttccaaagtatagaagaagacaaatacgttttacagaactagggataacacaaacaattatagaagaagacaaatacgttttacagaactagggataacacaaacaatattgttaaggcctctcttcttcctcataggtatcacatagcactagtttcaagataaacctaatg

SEQ ID NO: 5191 - DNA, 3000 bp, Unknown
  misc_feature (1)..( 3000): cDNA_ID_2052773_gDNA_ID_1620770_Annot_ID_167510 3000 nt of promoter + ATG
caaacatttccttgttcgtttgccctagacaaggcaataaatcatatcctagagaagcgtaatcgatcattcgattttctttacctaagcgtacaattgaatgttttcttatattatttcttccgttcctttgtcttattattccttaagtctatgttcttacttacgttcactctttttttcttggttactcggacagattccaagtttcttattctacaagataaatgaatcttggttaaatgaattgctggtgaaggtattatcatttcttccaacaaaagatgctgtaatgaattgctggtgaaggtattatcatttcttccaacaaaagatgctgtaagaacgagtcttttatcgatgcgatggaagtctctttggatgtggctgccgaaactggagtacgattttaggcattattcagtttcggaaggccaagggttagctagatttattactttgagtctactaggacataaagctccggccattgaaagcttgagtctcaagcttaggtatggagcaattggatcaattaaaccgtgagttaagtctcaagctttgtacttttgcggagcgtccaactaaattggtgagttaagtctcaagctttgtacttttgcggagcgtccaactaaattgcccaaaagcttatataaatgcaaatcgattgtgatcttgaaactgaaagacgagattctcgttgatgttcctcgtaaggtatgtctcccctccttgaaaacattgttccttggacgtgtgacttactcggatgaagattctcttcaccgacttctctccaactgccctgttcttgaggatctagttgtggaacgagatagtaaccctaaagatgtcttgtccttgtcatcttgatgggattatgatgaattaaccctaaagatgtcttgtccttgtcatcttgatgggattatgatgaatactccttctttgaagtatttgaaagtcactgatgaaaggcaagagagtgatagtgataatgagagtgatagtgatagtcctcgatacttctacgattttgaagatatgcctaagttggaggaggcagattttgtattgacattccaaaatatcaaaaagttctttaaatttgtcacatctattaagcgtctttcgttatgttatttttgaacaatattcttgaagttgaatcttttgtcatcttatgcagttatttttgaacaatattcttgaagttgaatcttttgtcatcttatgcagtctttatatcatgagggtcttgtcttcaaccagcttgaacaattgaagatatgttcatgtgattcagattggtcaattttactttctcggttactcgaaagttctcccaatttacgagagctcgaggcttacgtgatagaagtaagtttcttcgttagagacatattccattggttcaatttactatattgtttaagccacaaatcagtggggcaatcagctgaattgtgttcctaaatgtttgttgtcgcaaatcagtggggcaatcagctgaattgtgttcctaaatgtttgttgtcgagtctcgaaacgttcaagtggagtgagatgtatggattgctgcagaaccagatggatgtggctaaatatatcttgagaaatgctcgatgcttaaagtctgcgacaatcttttttccgacaacctatgctaaagaaacaagagatgagatgatcgaggagttgtcactttcttttcaaggtccagagacatgccaagtcttcactaccctccatattacaatggttttttatttgcagcaacttgatctaacactaccctccatattacaatggttttttatttgcagcaacttgatctaaacttaaggtgttttttttgtctttgttttttttgtatactttatctttgagcatactatttttcttgagacattggctttatctttttctgagatcttaacaaataaccgaactttgaagagacaagacatgacatgaacttttatttgcagcaacttgatcataacacaagactcaaacacaagactcaaacacaagacttagaagatcagtcaacaatatagatgttgtagaaatttgcatcctaatattagaagatcagtcaacaatatagatgttgtagaaatttgcatcctaataaagttcattacaaagaaatgacccaagtttcccacacatatccgcatcaaaaaaacaagtgccataacattgcattaagattcatattcatattaccaaacagagcacttgcacacatacatcaacacaaaaccggcaagaacatcataggaacactcatttgaaaaaacccaaggaatagattcgactatgtaaacacacttcaaagaagaacgagattttctcagcgctctcaaacccgggttctcaacttcaaagaagaacgagattttctcagcgctctcaaacccgggttctcaaacccgaaccggaccggaaccggaccattacccatttaacccgacggtttacccataagccgagccctaattttttcaaagaaaagggccctaaacttttcgtcttctcgcttcccttcctctatctcgtcttctcgcttcccttactctatcccatagaaaaaccctgaatttggtttggccaatgatgtcaaaactcttacatttggtaagtctcttcaacgattttggttttgtgagcacttacttctacatttggtaagtctcttcaacgattttggttttgtgagcacttacttcttcttacaagaattacatgtctttgttcaggttgtaactgttgatctgtttctgtcacaaaatgggttcgaaaaagaagtgttttgatggttctagagatggaatcagcggtttaccagacgcaatgatttgtcacatattatcatttcttccaactaaagtagctgcttcaactaccgttcttgccaaaagatggaagccatcctcgaatgacttgtgaagagaggagaaagggttctgaaagttttatgatcctcga

SEQ ID NO: 5192 - DNA, 3000 bp, Unknown
  misc_feature (1)..( 3000): cDNA_ID_2052834_gDNA_ID_1620770_Annot_ID_167489 3000 nt of
acatctctttggattggatatataataactgtggtcgacgacgacacaacttcccccaaacaaaacgttacgtctttgacataaaagatgagcggaagcaccaccggttgtggaggtccatgcggcgcatgtaagtttctccgacggaaatgcgttgctgactgtgtcttcgctccctactttgattcggtggaagggacgtctcatttcacggccgtgcacaaggttttcggggcgagcaacgagggacgtctcatttcacggccgtgcacaaggttttcggggcgagcaacggtcacgcttacttacgaggcattggctaggcttcgcgatcccgtctacggatgcgttggtcatatcttcgcccttcaacatcaggtattcaactatataaaacccaatattgtcacatatttatgtatatataatatatgtttgatgatctatatacattgaaagatttactatgcatgcatgcgtgtatttagttatatagaagttcattgtataataaaatcatcccataacattaggttaaagatgaagaagttcattgtataataaaatcatcccataacattaggttaaagatgagttccatttaatcgcctcttggtttcctgtttattagttttgaaaattgcatagtactaattccacaataagagtcaaagttgctaatattgaaaatagctaacgtgtgtcttcccaatggctcgtttgtcgaaaacagcgttaaagaaagtcaaatcgtcattctttgtggttacattccgacttgtttgtctttaatagtatatcggttgaataaaacagtttgaaaattttcttctaatacgaataagtatatcggttgaataaaacagtttgaaaattttcttctaatacgaataagtcccacatgtgaacaggtgatgaatctacaggcggagttagcttacgtccaaactcaactctcaacattacaaggtcttcctccgccgaattctcaaaacaattcacggacagaagcagcctcttcatctaatgtgccactcatttcttctgtcgatagcaaagacaatatgtcttcctcgtcgtcacacattccttgtatgtcacaacaacaagaacaagaacagccaaaagaagctattgaggtcccatgtcacaacaacaagaacaagaacagccaaaagaagctattgaggtcccatgaggacggtgatcttaacgctcttgcccgtgagttcttcactaagtatttgaccggaggcaaataccgaccatcttctttaatataaccatgttaacctttgcgacatttattaggaactctttattttgtactaactggattgccctgtaacttaaaaggggcgttaatagattctattggatttgcagtgcaaactcacatctcacatctcacgcttgacgtcgacatgacacccatgtccctctacacatctcacatctcacgcttgacgtcgacatgacacccatgtccctctattaaatgtgtaattcataggtaatacaggcccaaaaggttaaggcccaaaatccccaaatgggcttatgttaaaatcttgccttttgcatccaaacccacttgccttttcttcaagtgtgactaaaaacattatgtaataaagctaacgttaatcacttgtcttggaaatatacaggggtgattaatatataatagtggtgaaggtggtctcgaggcctcgaaattttaatttgaactcaaggaaagatggaaggtggtctcgaggcctcgaaattttaatttgaactcaaggaaagatgaattgagatacggataaattcttatttaacacacaatgatttaaaatcacaaatgctctattcttttcttggaagtgaaagcaatataagagaaagagtcagagtgagtcaaaaaggagacagaaggcagagaaggtcaaacaaacggcttgttaatctgaccgcttgtcactttattatctgtcacctaccaatcacattcctagtaaactcttgtgtgaaccaacataaacatattgttgcaaaataatcctagtaaactcttgtgtgaaccaacataaacatattgttgcaaaataagcaaacgggacaatttttttttttttttttttaatcaattccggacgtgaaattatttattaaccaaaattcactgtcggtcttattcttaacgacaaaaaaaaagataaattatttttggatatttcttcttgcaaaaacctaattttctctcatctttttttttttttttacgatctggttttttgttttctttctactctgttttcaactggggacactatgtttttttttcttcttcttgtttggatctgttttcaactggggacactatgtttttttttcttcttcttgtttggacgtgagctgaccaggagaaatctgttcttgtgtttagttcaattctcggctgaggaacgttgactgttgactgatagagcaacttcagtgtgttgagaccaaacataaagcttcaggtctctgtttttcttttaaacacttttgtctgagatctcattatttttgtacttttgcttctaacctccttgtgttgtttttttttcctgttcaaactattatgatgtacaatttgagaattttcagtgtaacattcctgttcaaactattatgatgtacaatttgagaattttcagtgtaacaaaaaagtagaagcctttacaaaaattaagtctcagcgttatatcattaccacatttgttgagattacttgaaattcgaaatcaagtttctatatttatgaagctatgtggttggatgatgaactctcttttaaagttttggcttgcttgtaattgcagttaaggataggatttgagaatggaaacaagcgacagaattagccctggtggtggtataggagcagaagttccatcagcgtatcatatggctcccctggtggtggtataggagcagaagttccatcagcgtatcatatggctccccatg

SEQ ID NO: 5193 - DNA, 3000 bp, Unknown
  misc_feature (1)..( 3000): cDNA_ID_3076117_gDNA_ID_1620770_Annot_ID_167464 3000 nt of promoter + ATG
acttcgatttttcaatcagtaatattggtggttcagagatgatgatgatgaatcttttaaggagatcagcgatagccatcggccgccaatgatgatgatgaatcttttaaggagatcagcgatagccatcggccgccaatatcccaaaatcggtaaggctttcgtattccatctcactctgccggcatttctatataatattggctaaaagctattggttcttctactacatagacacggattgtttaggatcttgtgaaaattgaggtcgtttttttcagtgtctctagtcctgtttgaattgaatctctctagtgtccttgatctggggaaaacttacagtgttacttttgttatatatcagtccaagagggtttttagcaactcattagtgttacttttgttatatatcagtccaagagggtttttagcaactcattacattttctttgctctttacacccttttgggcttatatgttagtctcatacctctcatcgtttttcttatgcaggactctactggagctaatggtcagcagtgataattgtgtaatcaaacttcaaatcctagtgttgatgtgtaccttgttgttctgacaattgtctgttatacaggactattgtttcgcttccgaaacccgcaagcaagtatatgtacggaagctcgtccaaagaacatcaactcatcccgcaagcaagtatatgtacggaagctcgtccaaagaacatcaactcatcagcagaataaggtgtttcttcctacaagtttctacttaatgtctacgttatgtgtttgccatttatcacaacgcaagccgtcaaaagcgacagacagcttctgtcatctaataatgatgcttgctttgccaattgttttacaggctaagaaagaggtgacgactgtggaggatccttttgattctcctacataccacatcccggagaagccggtgacctttacagaaggtgcgtcctacagtcttgttatccggagaagccggtgacctttacagaaggtgcgtcctacagtcttgttatagctcatttttcaaccaaaagagtgaggcttcagaaatctaatttgaatttatctgctcagacacttggatttgagtaatctaaagacaccattatgtattctaggtacaaggtctttgacaaagccttgaagagaattcaagatgatggtcaggtaattagaaactaactctacagattgatcatagcggaggggtggtgtatgaaacaaaagcatctgtttataaaatgaaacaatttctgtgactgtgtatgaaacaaaagcatctgtttataaaatgaaacaatttctgtgactgtctatggacaagaaactagaaaccgagctgctcgtcaacgtatacccaacagagtatttacagatgaagacggagtggagcatgttgaggtatttcattgtagaacctctattgcgcttggattcacattcttgctatataaattgtctagagttttgcaggtttaacatgatcaaaattgaatatgcttcaggtaaacttctacatccgtgggcctcaaggagcagggaaagtgtacacggagatgtttactacatccgtgggcctcaaggagcagggaaagtgtacacggagatgtttattaacaccttccccagccaaattgatgctggagtcttatttgcctgcctaaagcactcgtatttatgactcagcagatccggaaaacattcagaaacggcttagattgttttagttggggtgttggagaaaagagagagaattgtgttacacatgagctgtaggaatgacttcttatcaagcaactgtttgctaattgaaaaacaagtctaaactgtgtttatgatcctcttggggatgtctaggattttaaacaagtctaaactgtgtttatgatcctcttggggatgtctaggattttaacagagacatggagaatgcatatatcatgaagcatcaagtatacaatagaggcaatcatggatcaaacggtgtttatggtatcagtaagacagcggagaatgcaaccgggaccaactctctctctgagtttccccgagccatcaaggctacaaacatctcgactacaagggccaatcaaattacataatcacggaaaaaacaaggatagatacaagcaaacctaacactcgagcaataatttgagtaatacaaggatagatacaagcaaacctaacactcgagcaataatttgagtaatcctaattaatcttgtgtttaattaagaaaagaaaacacaaaaaagttgaaaggtttagtggtgcatccacgtagcaagacattttaggtgtacgtcgaccatattgttggccgtttatagagcatcatccactctcctcgacgagcaagatcatgccgcctctggattcttctcattcatcggtgttcctgcgatcccctccgtagcaccctccgcctcctcagcgccttccccgtgtaaattaccgttcccgtagcaccctccgcctcctcagcgccttccccgtgtaaattaccgttcatacttggctattgttgcaatgtaattttcattgaagtcagtcaccaatgaccattgaacagatgttttaaaatgtccacgtaagcaattgttgtttggaacgattttcggttagcattcgtgccttttttacctcaataaaaggccgtggcattaactcacttgtcttgagacgttatgtcgttaaaaccaagcccaaagttaatttcggcccaaatcgttttcaactttcccgccgtcttttaactttgttaatttcggcccaaatcgttttcaactttcccgccgtcttttaactttataaaatttccgcactcccgactcttggtgtggtaggcaattctgaatcgcgaggtttagttctccggctgaatcagagaacgacgagtcggaaaaattcgaaactctagaactgaataaatgtcgacgtggcaattatttcccgattccagcggcgatg

SEQ ID NO: 5194 - DNA, 3000 bp, Unknown
  misc_feature (1)..( 3000): cDNA_ID_3076125_gDNA_ID_1620770_Annot_ID_167461 3000 nt of promoter + ATG
gtgaagagacagacttgtccaaaacgcccaccacgaaggtgcatagtgagaagagtaagtcaagagatagacttgtccaaagaagagtaagtcaagagatagacttgttcaaaaagaaacagaagagaatagaagagtaagtcaagagatagacttgttcaaaaagaaacagaagagaatgcttggggttacactcacgaaggtgcatagtgagaagagtaagtcaagagacagacttgttcaaaaagaaacaaaagagaatgcttggggagatagaagtgtgagatagttctcaagctaagaaagttgtaaaagctaagaactagcatcaaatgatggatgaaacacaaggtagttgttgaaaagtcaaacacttggtgatgaaaactggtgattgttgcgaaaatcgtccaggattcctcgaccaggaatgaaaactggtgattgttgcgaaaatcgtccaggattcctcgaccaggacttgaaatcgtcgaggggaaaaaatcggttccgaggaatcgtcgatccggacttggaatcgtcgagaaaagtttaccgggtccgaggaatcgtcgagaaaagtttaccgggtccgaggatttgtcgaccaggagtggaaatcgtcgagaaaaatctatcgggtccgaggaatcgtcgaccaggacgaggaatcgtcgaccacttcatcgaccgggtccgaggagtggtcgagggtttgtcgaccaggacgacttcatcgaccgggtccgaggagtggtcgagggtttgtcgaccaggacgaggaatcgtcgaccgggtccgaggatttgtcgaccaggggttgaaatcgtcgaccacgtccgagacttcatcgaccgggtccgaggatttgtcgaccaggacgatgaatggtcgatgaaaatctatcgggttcgaggaatggtcgaccaggggttgaaatcgtcgaccaggtccgagacttcatcgaccgtgtccgaggagatttgtcgaccaggggttgaaatcgtcgaccaggtccgagacttcatcggatttgtcgaccaggggttgaaatcgtcgaccaggtccgagacttcatcgaccgggtccgaggaatcgtcgaccaggacgatgaatggtcgatgaaaatctatcgggttcgaggaatggtcgaccaggggttgaaatcgtcgaccaggtccgagacttcatcgaccgtgtccgaggagtggtcgagggtttgtcgaccaggacgaggaatcgtcgaccgggttcgaggaatggtcgaccaggggttgaaaggtttgtcgaccaggacgaggaatcgtcgaccgggtccgaggatttgtcgggtttgtcgaccaggacgaggaatcgtcgaccgggtccgaggatttgtcgaccaggggttgaaatcgtcgaccaggtccgagacttcatcgaccgggtccgaggaatcgtcgaccaggacgatgaatggtcgatgaaaatctatcgggttcgaggaatggtcgaccaggggttgaaatcgtcgaccaggtccgagacttcatcgaccgtgtccgaggagtggtcgagggtttgtcgaccaggacgaggaaatttgtcgaccaggagttgaaatcgtcgaccgggaccgagaattcgtcgaatttgtcgaccaggagttgaaatcgtcgaccgggaccgagaattcgtcgaccaggacggcggaatgctcgaccaggacgatgaatgggcgatgaaaatctatcgggttagaggaatggtcgaccagaagttggaatcgtcgaccgggtccgagaattcgtcgaccaggacgaggagtggtcgaggatttgtcgaccaggagttgaaatcgtcgaccgggtccgagaattcgtcgaccaggacggcggaactggtcgaccagaagttgaaatggtcgaccgggtccgagaattcgtcgacctggtcgaccagaagttgaaatggtcgaccgggtccgagaattcgtcgaccaggccgaggagtggtcgaggatttgtcgaccaggagttgaaatcgtcgaccgggaccgagaattcgtcgaccaggatggcggaaccctcgaccaggacgatgaatgggcgatgaaaatctatcgggttcgaggaatggtcgaccaggggttgaaatcgtcgaccaggtccgagacttcatcgaccgggtccgaggattcgttcgaaaatcattggatatgatgcaatgttttgtgatcgaatctcttaaattcgaaaatcattggatatgatgcaatgttttgtgatcgaatctcttaaaatacatcaataaagagtttaggatgtcaagtttgcatcaaatatgcccacggagccccaactagaccatgaaaatccgatgttgtatcaggtcaaatgacctagctagaggtgtcaaaaaattatgaaaatttaccagaaaataggatttagtatccttatgatgcatgccaaaaagaattttcaaattccaagtatttccaagagggaaaagggctattaagctatataggggggtgggtgttgagggacaagagggaaaagggctattaagctatataggggggtgggtgttgagggagtctgggcagtccgtggggaaccccctttttcggttcggacttgggtagcgatcgagggatggtatcggatatcggcacgaggaatgaccgaccgtccggccgccgggattttcgccggaaaacttttccggcgacttttccggcgatcggttttgttgcctttttccgagttttctcagcagttctcggacaaaaactgttcgaggcgttagggtggcggcggtataaaagtgtcggagttttttcagcttcgaggcgttagggtggcggcggtataaaagtgtcggagttttttcagcagttctcggacaaaaattgctgagtggccgagaagaatgggcgtgccatgcgtgggctgacatggattcttcgaggcctaggggtggcggtatataacttgttcgcatgatattaccgag

SEQ ID NO: 5195 - DNA, 3000 bp, Unknown
  misc_feature (1)..( 3000): cDNA_ID_3076203_gDNA_ID_1620771_Annot_ID_167526 3000 nt of promoter + ATG
tttgatcatcgtttataactctcattgtgatttcagcaaatttttgtagcatttcggaattttgatctcttgatgagttttatttacgttttctgtttgctttttttatctagtgatcaagttttgagatttatgttgttgttgttatgatgatcttgtagatgcctttaggaagatgaaagtaaatgagaccggcgtggaggaactgaatccgtatccagatcgtcccggtgaaagagattgccaattctatttaagaactggtctctgtggctatggaagcagttgccgttacaatcatcctactcatcttccacaggtcagaaactaaacttcatttattttggctgagtcttacttaagttgcaattttggcctcatgggtttactgcttttaaacatcttaataggatgttgcttattacaaggaggagctccctgagagaattggacagccggattgtgaggtgcagtttcttgtatctctcactatctcaaatcttggttgttgtttggatgagtacattgtaaacagttaaaaagaaaacgagatttttgttcagaataaagctaaagtaagagaactgattctagtttgtaacttcacataagagaggtagcaagaatatacattgaaactgcagaagatattcctcatctggtttagtctttcctccaaatgttttccacaaacaactttttcttctacatgcaattttcgctgcagtattttctgaagacaggagcttgtaagtacggcccaacttgtaaatatcatcatccaaaggacaggaacggtgcacaacctgtaatgttcaatgttatcggtttacctatgcgtctggtaatttccatcgttgtagctaaattctttttctttagtcgaatgtggaagacttatttgaatttcttctccagggtgagaagccatgtccatattacctgcgaacgggaacttgcagattcggagttgcttgcaaattccaccatcctcaacctgataatggacattctactgcatatggaatgtctagctttcctgctgcagatttacgatatgctagtggtttaacaatgatgtctacatatggaactttgcctcgtccgcaagttccccagtcctatgtgccaatcctggtttcaccctctcaaggctttttacctcctcaaggctgggccccttacatggttagtctgaattgaagctgccaataacgtaaacctgttctttactgttgatatcacattttatgttgcaggctgcatctaactccatgtacaatgtgaagaatcaaccttattactccggtagtagtgcatccatggccatggctgtggcattgaaccgtggtttgtcagaaagttctgaccaaccagaatgtcggttttttatgaacaccgggacatgtaaatacggagacgattgcaaatacagccatcccggagtaaggatttcacaaccaccaccaagtcttataaacccttttgttcttccagcgagacctgtaagtctcttactaaactgaaagaagagctttggttacaaacaaatgtggtcttacaggtcactagtaaaacttttacaaagattttgaacatctaatgagctactgttttgatttttgctgtctagggacaaccagcttgtggtaacttcaggtcttatggattctgcaagtttggaccaaactgcaaattcgaccaccctatgctgccatatccgggcctgaccatggctacttctctgcctactccttttgcttcacctgttacaacccatcagaggatctcaccaacaccaaaccgctctgattcaaagtctctttctaatggtaaacctgatgtgaagaaagaaagctcagagactgagaaaccagacaatggagaagtgcaggatttgtctgaggatgcgtcatcaccatgatcatgattcttaaaaaccccaatgatctctctctgcccttttttgtggaagaggaggggaggtgaaaagtgtttctcttttctttttttttttggcttggagatggccatggctgaaaacaatataggatgaaaccagtgatgttgtcacaggtttctcttctgtttttgactctgttaataaattttaatcagacttatcagaggaaaaatagagtttgtgttgtgacactcactaagagctctttatgaatgacaactcgaacgtaaaattacatcttttgcttttgtcaagtgtttacatcagtaatatccccaatttcaagcttatttttttttttcaattttaaaactaaaaaggttccaaattttttttatcgatgagtcatatttcatttgaacattccaaaagtaaagaaaagagttgaaaactttcctcagcctattacaattgcctttagctgttaatgagttttagagattcgattagttttaaccaacagttcctgaataattggattttactctcttgttgagtttaattattccaatatttcttcatggtgctgttttgctattgctggtgataaacagttgatctaccgacgatttgcattcgacggtggtttcttcaccagaaatcgatatctccgatggcgaaggatgacgatgggaatcttttttggctcatcttacacgtgtattattacgtgtctttggatgatctttcttgatgcaatcttcttctgtaaacggtgtattattgggctcttcttgagcttgcttttgttcgcaatctgtttatgtgtgttgggctgtaattggccttgtagcaaacggtttattgaataaagtccactattgagaaaaaaaaaaaaaaaaactgaaaagggttgtttttaggcattttttgtcggagaaaaatctgggaagaagcttcgtcctttgcgtgacagggaatctctccgttggggttttgtggctgcctacgatttctgcaagcaaaaccacagaactcaatctaattaattagccgagtcgactcaatccgagtttctacagccgcacgagggaatc

SEQ ID NO: 5196 - DNA, 3000 bp, Unknown
  misc_feature (1)..( 3000): cDNA_ID_2990596_gDNA_ID_1620771_Annot_ID_167527 3000 nt of promoter + ATG
atgaatgacaactcgaacgtaaaattacatcttttgcttttgtcaagtgtttacatcagtaatatccccaatttcaagcttatttttttttttcaattttaaaactaaaaaggttccaaattttttttatcgatgagtcatatttcatttgaacattccaaaagtaaagaaaagagttgaaaactttcctcagcctattacaattgcctttagctgttaatgagttttagagattcgattagttttaaccaacagttcctgaataattggattttactctcttgttgagtttaattattccaatatttcttcatggtgctgttttgctattgctggtgataaacagttgatctaccgacgatttgcattcgacggtggtttcttcaccagaaatcgatatctccgatggcgaaggatgacgatgggaatcttttttggctcatcttacacgtgtattattacgtgtctttggatgatctttcttgatgcaatcttcttctgtaaacggtgtattattgggctcttcttgagcttgcttttgttcgcaatctgtttatgtgtgttgggctgtaattggccttgtagcaaacggtttattgaataaagtccactattgagaaaaaaaaaaaaaaaaactgaaaagggttgtttttaggcattttttgtcggagaaaaatctgggaagaagcttcgtcctttgcgtgacagggaatctctccgttggggttttgtggctgcctacgatttctgcaagcaaaaccacagaactcaatctaattaattagccgagtcgactcaatccgagtttctacagccgcacgagggaatcatgaatcggctgagaggccgaggtacaccgattctgggttccgcactcgtgcctcagctgaagaaaaaagccctaaattcattggtcgccgtccaggattcatatctatccaccaaggtgatcgaagaatttcaattcataccggtttctgaagaattgggattagtaaatgttttttgcatcaggatttttgttaaaatgtcaatctataatctgcttataatgggtttcgtttaatctcttaggacttgttcgagaggcacagggtcgtgtttacagttggaacttctatagcatctgttgctacggcttggattggtatgttacaattccatattttttgcttactttatcttcaattagagaatctttacctcttaccacgtattttgatgtttaagtttctgaattggattgctttgaaaggcgagcaatggctattagtgaagtgattcagattttgggtgttgattggcttcaattcatgagtgtttcattgggatagctttagctctcaggcttgatctctaggggtgaaatccattctgtgataaatttgaggcctttttccggatcagactatagattacggtttagttgatttgatctgccataagtttccaagtgtttggagatcatcttggtcagaattctgtgatgatgttcaataactaatctgtccaaaacttccaataactgaagtttagtactttgagatctctacatgatattctaggtcttttgttattctgctgggacataaaacaagttagaaactgaatttcttgtgtgatactagtgaccgttggaagaggtatctcattggtcttttgtttatgtttgtactgagtcaaatgagttttatgaccgtgttctaccgaatggatgaatgattgtgcaggttactcattacgacattacaatgaaactagaattaatcagaggctggagtccattgagaatgcggttagtgtgtccctcatttgccaaagtttattgcacatagtattgcatatttgctttaaatttagctgctttgcatagttggattcatatagctgctcttcttgcaaatgacttggtgcttcctcttatgatgtctagttattgatcctctatcatgaacttacagcgtagttgtctgaatttagtcctctttccgttaataatatagatttttttgctaatacttacgtggttgactattttacactttaaaatattcagtgttttgtttttgtaccttaatgatccttagttgctctattgtctcagtctgtcacttgaaatgtttgtttttttggtcatgccagatgaaaaacacccaagagttagaacgaggagaactgaagaagctcgttgatccagtcggttccaggttcactacaacaattgccacagcgggaaccactttgatcctcgggtttgtttccggaaagactgttataggttgacaagttagatactgtgtgtcgggtttctcattaatagtttccgtctgtttttcttcaggtatgggttgggttggcgaggcgggatatggtatgcaaataggaagtttagaagggagcaaatgagattggccgggcagttaaaaccgagagaatggaagttactagggaggataaaacctcgagcttggccaacaacaaagtttctcagacgaccattcccaagacagaacaaaacaacagaaaatgctttgaaggcaccagaatgtggaggttgaaaaattgaagaacaatctaaagaagtagctgatcggaacataaaagtgcacatgggttttgtcttgaagccaaaggctcttctgtctttttattcctttatgaggaaattgagataacctaattcgaaaatcaaatagatttgtgttataaattgactctagtagtgtggactatgaaatgtgattcagctaatctttatatcgagatcaaaatttaaggattcctctgttttcgcacataaaaaagaaaaagaaaaaggattcctctgtttatgaacaagataaccaaaaaacatggccaagtagatgagaggagagtgtgctgacgtgtgacaatatcattggtgcgtacacgtaagtccacgtagacaatgtttttagttcgtgtcctaaagagtcacttttttgtgttttggtggagaagaaagagagggaagaaact

SEQ ID NO: 5197 - DNA, 3000 bp, Unknown
  misc_feature (1)..( 3000): cDNA_ID_2052970_gDNA_ID_1620771_Annot_ID_167530 3000 nt of promoter + ATG
gtatttcattttcttttgctctgtaagcttatttttctcatcgatccaacataaacaatcggaatagaaaataattcatcactctttatcactaggccaatactggactcccctcttagtgacataatttttgttgtctcttgataaccagattcgacagcttgcaaacgagatcaaagaactaactatgaccaatccagttaccatctttaatggagattcaaactccagtggtatgtacaagtcttagtttctcataaaatatttatgtactacttttgataatgtaggaaatgtttcaaatatgtttattttttatgagaaacagagaatgatataatctttgcttttgctcttgtaggctatgcatcttacctggttccagcggctgccgttggagctatggggtactgctacatgtggtggaaggtgtttatctctttaaaatctgtctatttttctctatgtttcatgtgtcttttgttatagttttgtaacatgtggtttaccggtaaactatatatcattgacttctaaggtttacccacattgcagggctggtcgttttcagatgcaatgtttgtgacaaagaaaaatatggctgatgcggttgcctctgtttcgaaacaactagacgatttgtcagacacattagcggtgaacaaataatttttttgagaccttcctctgttatatattctatttcattatgattttttgacctagtgcatttgtttacgcagtcaacaaggaaacatctttctcagaagctagcgaccttggattggaaggtggaagagcagaatgagacatctaaaatgatcttaagtgatgtaaggaacccgttttatttctcactttcttgtattgatgccttattttttccttagacttaagattaggatacttatacattcgtctgagagagatctcctcttgtacatttaacatcttagaagaatttaaaacacatttaggaattccaaaagattgtagagtatttatttattaacgtcctatctctttggccctgaactgtttttcttcacatgtacagtagagtcctttgtttctttcaaattacagcttgattctcatatctgcgatttactccatctatgcctttctttgatattcattttaatgctaatgctcacatggaatcttgcttcaattcaggttactgagatgagatcaagcatttcgcaaattgggtttgattttaagcaacttaatgaaatgatttctggaatagtaagtctcatcattgccctctaatatgcatcattgccctctaatatgcatattttaaaggggctaatatatctttactctcttatatgaaatttttacaggaagggaagattgaaagtcttgaaagcaaacaagtaatttgtctacaaccattagatactacaaaccacttcacgctatcaattttcttaaaactaattgatctcaaacagatattttttttgttaaaattttaggatgtgaccctctctggactatggcatctatgtcaagttgcaggcgttaaagacagcacaagtactaaagtatttcaggtgagtgttaacttacaaattaagtgaaacgttttcttacttatttttcacgtagttataggccttaatgaaaaaaatcttgtttctggctttgtggtttaggatgttggtgagagattacctattgatggaaaaccatccactaatacttctctctctgtaagaatgctactatacctttttccatcatataaatgtgcatttccattctgttgacgcaaaaaagttgcttatagtgaaaaaattcaacgagatggttgatcttgaatttgcatatattcaaggcaatctctcatcaagcttattcgaataaaaattggaacctgaaaatacttgtggtagtagctgttatttgatgatttcatgtcatgatgtttctttggctttctaaaactataaaactatggaaactccagggtctgcggtttctgacggaaggcaaagaggatgcaaatgtaatacacaagccggttatggcgaaagaaattatggtgatgggggaaaaaacaaaagtcactgcagcgggaagaagcagagttcatagagcgtttccaggtggaatatcttgggtacgggatgtttcaggactatcctaatattattttggttgatatacaaagaaattgcttgtattcgtcccaaattctgatactgggactggcaattattttttcatgtaaaaagaagaaaaatctacatatgttattgcatccaccaacaatttggtttgcccctaattatatttggtcttgatgtttgtaaagaaagagtgtgattaaggctttcacgtatgttgatgtcttcattgatttggacttttgtgctcctttttccttttgtgtttggatcaattttgtttgtgtagaaaatagaaagaactaccacagaagacagaactactgtcttgaaacatttgtttcgtcctttctcgtaggattaattgtctttagttggcagagaaataaaatatttcgctcttattgggccttggcccaaaatagatatagagacagcccaaatttaatttaacccgaaatagtccaaccgggtgaatttgacagcaattaaaaaacccggcccggcttcttatattaacaagaggcttggcatcggttaatcggagcttctttcctctcaagtgaagtgtctggatcttcgtcgctcaacgcaaatccctctccggttcatgtaaatttccaacttatttttgtgctcgaattttggttaacgggacaaatttcacacttttacggagtatggaagcagcctttgtcttctgggctgttgaattgcgattcattgtgtatgcccaacaatggtttaattgggaggttccaatgattttttgtgcttttttcttacttaatataaccactgttgatgtttcttctgtgtccttgtatcgccacagtggataagcagcctggggaag

SEQ ID NO: 5198 - DNA, 3000 bp, Unknown
  misc_feature (1)..( 3000): cDNA_ID_2052959_gDNA_ID_1620771_Annot_ID_167533 3000 nt of promoter + ATG
ttccggtcagacgccaaattcaagatccgtcagctgttctttacccgtttgctctaccgggtcgagggttttcagcccgacctgttcgaggattcgtcgcagatccttccgtgacggctggtaatctgagtgggtaccctcctcgcccgagttttacttacgatcctggaccatatgagcagcgtcaaatggaatccttgttgcagcagtttataagggagagaaatcctcagattcgtccattaccacgccttggattgggttctcctgttgggttgggtcccattagagcaagtcctcaatttctgcaaccgcgggtgaggtttcttagatgaagtcctcaatttctgcttgtcatgtttcatttgttaatgcttagattctagctaagtagtggaaagattagtggggaaaatgctcgagatgatccaaagtttcttgattggagtcttagtagaactgaatctgactgtaccgtgacttaagaatcatcttggttaatattggatccatttttgtcagagtgattctcattcgaactaatgcatgtagttctagaattttgatcgactagtctagttatacaacaatgtgagttgttggacgtgtctttcatggttttcttataaaccatgtgatagttagtaattggatctagttatctttctattttggttctttgtcctgctatgtgcctgctttactctggtcttgaaaattctcttttgtggaatgaggaagacttgaaaatgcttttatatcttagcaaatgttaagctgttcttctcttaatagttggtttgcacctacttacttttgattattgctcttgctccagtcacattttctcattttcgtaaattttggtacttaggttgccccgcccccaacttcaattctagacactagcaggaatagaaaggccaggtgaacatcaaatttctctactttgatattacctttcttttggtttcactgaaaatattattttaaaaaaaacttgttcaagagacttagttgccttgctgtttcttcttccttgttattagaagcaaggatggggctcttgccgttgttagagggagaaaggtaagcctactatcatatgtactgcttgtttgagaatttggaaaagacatctgttaagtttagattgtaatactattcaactgtttacaggtccgaatcactgaggggtcttcttctctttattcacttggtcgatcgtggttgaaaaatggtgctcacgttggaattcaggttcgcactttatatgctgctgttagagtaggatgttagtgtcattgacgactccgcttgataaaagattcatcggttgtattttcaagatattggtttgtggggttttgattcagaaaacctctcagaatgccaaatttactcgaatttggaaactaaattacttttgatcactcacctatttgcatccgtgctagttagaggattctttcttgatatagttatatttttagaagccaatcttagttaaatgatcttcaattgcatactcaaagcttgttatctgctttgcaatggaaatgtgcatctgcaatctcttgagcgtaaccatatatctgggactaatctaactttcagtttctctgttgacagccgcaaaggagtggtataatgaaacctttgccaaaaccgttacctgtggatttaacaacagagacaagtgtaccagatgatccagatgaagaatcagcggatgaagacaaagaggtttgtgttaagtcttcaagaaccattgattctatctgagcagaacagaagacattagtctgattctttcctgctgttgctaatttcagctcttgaatatttactacatgacgtttgattccactcttttctttgatgatctcaggacgaggaagctgtaaagcaattatctgagaaggatcttttgaaaagacacatcgagcgagctaagaaagtccgtgcacagtaagctccccactattctctctttttgctccttaggtcgtgtagtatttgaaagataaagctccccacaagattcatggattagttttcataatcatcaaagcaaatctagcagaatattttggtaacttgaaaaagcggatttctttctctttcagattacgagaagaacggtcgaggaggatcaggaggtacaaagaaagaataactcttattctggcacaatccgaagaccgatgatgcttgaagaacgactaaaaaagggtaaagttttgttaggaattagcttcatatgactgttgttgatttagcatactagtaccacgtaacaacatacgtgtagtaatagtataggtgtgttcttcttcgtcttctatagattagtaggactactcaatgaatagtgtttcattcttcctaaaactaaagaggaagataaaattgtttccttaaagtcagcttttactaatttgacaataaaaatttcttctcttacacatgtgtcaatcagcgaagtggtaataaataaactttactgtcattcgactaattgtaactttataaacaagatttgagaaaaattgagattttgtagtaaataggtggaagtctctaattggattagaggcttttcgagagagaatcgcatagggaagcggacagagaagataacaaacgctcatatttaaactctctttccgttacatttgccacgtaattacaacaaacacgtgtcatcgccgctaagaactaatttttgtcattgctccacacatgcaactactaaactaccgatgatctctctcgctcacgtttaatccgccatttctgtaaaatcctcttcccttttctgaagtaaactttttcccgcaatcaactcttgctttctatttttctcgattgtttacacttttcattttcagctctctgtttctttctttcacactaaccccaattctagtttcttactctccaagaaacaaagagcaccgatctcagttttctcgagaaacagaggacaaactcaga

SEQ ID NO: 5199 - DNA, 3000 bp, Unknown
  misc_feature (1)..( 3000): cDNA_ID_1399465_gDNA_ID_1620771_Annot_ID_167535 3000 nt of promoter + ATG
attgtcgatacaaacgaacaaaaagcaagtatgtatgatcgacgatagaaaaatacattcccaaagggtgacttgcgatccaagatttctccatagagatggctcaaaatctgtaaacacgtaactgataatcgaatcctgtatactatacatacaaacatgtatgtgtctaagtacataaaatttaaaaggcttcagccttcaagaagagtgaagatccatggaacaagatcttgtccaacttcgcttctctgacgtagccctaacctgaagaacacggcaatataaaaaaagtgtcagtgaaagctatttacgtaatatgatttttttcagcatagagttttggaaacttgttttaaacctttgatggtaaaggaggcaaagatgctcgtctcgtaagctcctctctttcctcttgaacagcctttaatctttctcttaacaattccacttcattttcaatctttaacctctcataatcaaccgcagacatcgattttctccttgaacccgaagagctcagcgacttcttgcgtggacgacataagggaggtagctttcgagcaatccccgagacaatgatactgttttcatccaacgattctttaggtttgccaacagaggattcttctagattcttcttcttactaatgttctctgtttcgtccttcaccatataaacatcacgcacacgtgagtacgcgacttctgaatctgatttatacagatctctgtttttatctctgtttccttcttctctataaggcatatcgagaaccgttccatcaagttcctgaacgagcaaagctcttctctcttgacagtctttgttttgtttgtgttccggttctggaacattcttctcttttattaaagaacattccaattcctctgtttcttcgagtagttgtctataagcttcaacttctttctccaagaaatgtttttctctctcacgccgtatcaaaatgtctttgagtatgaccatctcttcagcatcaaaagtcgatctctcttcaaccagtctctggaactgcctcgcttccatttcaattgccgccttctcatcttgcagcctatgtatcatcgccatcgcttcatccgctgctgatgctgcagcgcttctctctttgtcaagctcgacacaaaccgttgctcgagccgctctctcttctttcaataattcttctaaatccctaacagatcttttctctacatttctcacaaaagattgttctgctgatgaattggagtttacctgttgattaactgatacggttttctcaaattccggccaatgagatagattagtcccctctcctgccttaccacaatctgcaatacatccaagaagagcaaggcctaacattgattattcgaatgtagaagcaaaatctcaatccataaagaagacaagttaaggtaagaaagaaaacctttttggtcatcattggaacatgtctcatcataaggctgcatcaaattggtttttgcggtctcatcaaaggcttctgatgaagaaatagatctgagacttgcacagtttacacgacctgatctcctatggtttttaagaccgtttcttgatcttcttgtaacaaaacgtttgcctttcatgccctgaacggtcataagatcaaatctaccaagttccttattgttaatcacatttggttcgtctcttgacaaatcctctgtttcatctttaactctagcattgcttatatcaccactgttctttctcaccagctttaactcaacaaaccggttcgaatcatcgtcactagtaatcgaaccaaaagggattttgctttttatcgatcgatctacggctgagattctgtctgatgcacgatccaccagaaggtcttcatggaggcatttcctcatagtgtttgatacaccgaaacgtccattgtgaaattttggaagaggtaaacctagaaaccctagaaatctcaacaggagatgtatacaaagagatgtacatagaagcaaataagctatggagagattcagaaatgcgcctatgagaccagtgaaattccaatagtgcgtatctaaacacggcattttgataaatagattagtttctatagctctgagtcaaatctattcaccaaatccaccacctatgggaaaatcaagaaacatggatgatgtgttcgaactttgatagacccatttcagatttctataccagacataaaaattccattccgaaattttagtttcttgtaatataaaaaacaagtacgtaaagcaaacagagctgaaccacatgttgatgatgaatctcaaataggttactatttttgaacaccatgcataattggattttacctgaagttgaggtctagcattagccaagtggggattaatgcgaacgttattagggttcacaaatggatatgatgcaaaatcatgtagacaaggcacgtgaggatgtatactgtcagagatgcttcgaggaacacaacacctctgccatggcaatcttatacacatctatgcttacataagatggttttatttggtttaaaaaatgttattgcacttttgattttcttattttaaactaaatttttcgatttttcaaaaataatatttgattaaatttgatccttaagttttagtttttatatttttcaaaaaaaaaaacttttattttttttgggttttggagttgtaacaaaatttgaattattttagtaaataataatagtttatgtgatttaagtaaagtttttaatttatcaataataaagttctaacagtacaaaatgataaatcttttttaaaaaagcttaaattttaaacaaaccgaacttggtataataagaagagaaccaaggattatgaatatagaacggtcgaattaaaccggatctaaaccctaaacctctatgaaacctcctgaaccggtgagttccttctgtatctcgattctcgaatgtcgatcgagccatcgtagagatagagagagaatccatagaaatg

SEQ ID NO: 5200 - DNA, 3000 bp, Unknown
  misc_feature (1)..( 3000): cDNA_ID_3076184_gDNA_ID_1620771_Annot_ID_167542 3000 nt of promoter + ATG
acccattggtctctctgtctttcttgtggtattaatagtttgaattgttgtttctgtaatgtgatgaagactgttttagacgtgggcaccgggagtggaattcttgcaatttggtcagctcaagctggtgccaggaaggtttatgccgttgaagctactaagatggctgatcatgctcgtgcccttgtcaaagccaataaccttgaccatattgtagaagtcattgaaggatctgtcgaggatatttcattgcctgagaaaggtattattcactttcccttttcttctctttcactgcgattagaaaagagtagtaatcagggtttaacttagtggctattgattgagacattgcaatttggttgagttgaacatgtttcttttgataatttttactctactcgacattgcgctaatatctacatattcaatttaatgggcagttgatgtaattatctcggagtggatgggatacttccttctgcgggagtccatgtttgattctgtgattagtgctcgtgaccgatggttaaagccaacaggtgtcatgtaagtggattttctgttattttatttctattctttgttgtaacattaaaatttcatgatgcatgattgttacttatgagcctatggcacttgagagcttgatgctgtgtagctatactgttaatatcttgatagcataatcttttcctccagtgccagttatagaatttcttatcaaattccatgcataaattttgatatcatgtggcacatgttactaatattgaaaacaattgggtaaagatttggttgatgttggcactgtgtgtatctaagcattacaaataacctttgtatacaataggtaccctagtcatgctcgcatgtggcttgcacccatcaagtccaatatagcagatcggaagaggaatgatttcgatggggcaatggcagactggcataacttttcggatgagatcaaaagttactatggggttgatatgggagttttaacaaaaccttttgctgaagagcaagaaaagtattacatacaggtgatttcagaactctttttttctgcaatttaatttatctttagataagttcctcagctgacagttgaacaattaacaaattgacttacagaccttttgctctgacatttcatggaactcataaaattttgtcttttgtgcacagactgctatgtggaatgacttgaatccacaacaaatcataggcactcccacaattgtcaaggagatggattgtttgacagcatctgtcagtgaaatcgaggaagtcagatcaaatgtaacgtcagttatcaatatggagcatacaaggctatgtggttttggtggatggttcgatgttcagttctcggttagttcgtacagattactgtgttgcatcatgttgaagaaactcgtatacttactcgttgcttgtttgtttttgtaactaggggagaaaagaagaccccgcacagcaagaaatcgagttgaccacagctccaagtgagcagcactgcacgcactggggacaacaggtatattactccccaatctctggcctatgatggttaaggcttcgattgtttcaaacgctaatttccgcgtaatggtctgaaactggcaggttttcattatgtcgaatcctataaatgttgaggaaggtgataatctgaatcttggtttgttaatgagccggtccaaggaaaatcaccgactaatggagattgagcttaactgtgaaataaaagaagcatctggtaaccccaaagaatctttcaagaagacttacttcatagagtgattgattgattatagagaagctttccttggggcttgctggttcttgtatcccatgtatgaaccccaaatgtaatgttttattgcttcttgccttttttttctatgtaaacgagattgttataccaattttcaatagatttttatatgggtgatataatttattatttttggtatttgattaaacatccaaaaatttcttcggtattaattttgaagagattttttttctgtgaagattgtttaacttttttgaacatttttcagtggtttagaatatttgttaaagtctaaaaaaacatttttttggtttaattaatatcgaactaaatgtttaaagatttgttttggagtaattattaatatttacgaaccaaatatttggtcgatagagttgtgttgggagagcctatgtcactaacccctttgtctgcccctctttcggagcgattcttttctcattctttcgtcggactctctgtctccttttgacggcggcaccaacgacaaagcaagcaagcagtgataacatctatctatctctccgtctaaaccaattgattaggctagatcccaattcttcgagtatcgattcttcttcaatcctttttatgtgaatattctcctaaagcagcaacctcttgggttcttcttcttctgggtaaaattctctggattctgcttttgctttgatacgattgttttgagctacttgttttttttggttcctgattgcgttaagggtcaggaggcttagtagaactaagatatgaaatcttaatctgagttatttcgatgcatagactttggattctggatctttgagtactagtcattaaaaagtcggataatttctctgtagggtacttcttagaatactgatttgatttgattttatggttaattctcagttcgtgataattcttaagacttttttagtggtatgtcttagaatcatggaattgaaatgggcaggttcgatttttgaaggtggatattgattttgaatccatatatgcgttgatggatgtggattagtttcttgttgtctttatctgtgcattggtgatagttccaaagtttatctgttggtatacacttcgttgctttgctcagttgtatttgattatgtagatgcagtaacaactttagtaacccactctcctttttctggctttgaattttattatagtaactg

SEQ ID NO: 5201 - DNA, 3000 bp, Unknown
  misc_feature (1)..( 3000): cDNA_ID_2052939_gDNA_ID_1620771_Annot_ID_167541 3000 nt of promoter + ATG
aattcatggaggggcttttatagctttttccttgaagcctttcttggactttgcaatctcttattttcttgtttaagtttttcgtcatttgattctttgtggataatatttataaattgaactcctgtgtatgtatctttgagtttctttgatggaagacggttaattacactctgatctgatgtgtggagccttaaagtctctgacttttgtttcattaataagccggatagatagtaaatgctgaagaaggtttagtggttgttaaagagcgtaaatgatcttaaagtgcttacctttttgttttcttttttgtcttttggctgtgttaggaatggcatcaagctcttgtctcaagcaagggtcagtgccaatgaacaatgtttgtgttacccctgaagcaacgtatgaggctgtggttgcagaccctaggcttttcatgacttccttggaaaggctgcactctctcttgggtactaaattcatgtaagcttctttcttcccttatcatatcttacttagtagagtaagttcagttgttatctgctctgacagaaatttgtgttcagaaagtctctatctttgagatttaagctcttatgttgacgatgaatcatgctttgtttttcacctacaaaaattttaccagttacaatgcatgagattctctgtctatattatggattcctcttctgtgtgtatagtctgactaaaagtaatgttcttttttgtgtaacgcattgttccttttgcttcttgggggtaatgtattgtaacttttacatattggatatggatgcaatactttatagcttatagctttaaccattctacatattacattggtgattgtagggttccgatcataggaggaagagatttggacttgcacaagcttttcgttgaggtaacctcacgtggcggaatcaataaggtatgtgaatgccctctcaggctctcaatgataaattaattccattctatatgtattgtctgttttctatgtctcatatagttggttttgttctaaaatcttgaaatctacattgacatttttccttggatcattttccttctttgaattgcagatacttaatgaaaggagatggaaagaagtaactgctacatttgtctttcctccaactgcaacaaacgcatcatatgttctgcgcaaatactacttctcgctgctgaacaattatgagcaaatctatttcttcagatctaatggtcagattcctccaggtttgttcataaaaacctctttaactattttaccaaattttcaaatatttttcagtttcttctctgttttgtaacacacatatcttctgtagactctatgcagagtccatctgctagaccatgctttattcagggagccattagaccttcacaagaacttcaagctctaacctttaccccacagcccaagatcaatactgcagaattcctcggaggtctcaacttttttctctctttgcttctataaatgttccaactgagaaactgtgacttataaatctgagtaaaatcctttttcctttgatgttattgtttcaggatcacttgctggatcaaatgtggttggagtgatcgatggaaaattcgaaagtggttaccttgtaactgtaacaattggatcagagcagcttaaaggagttctgtatcagcttcttcctcagaacacagtttcttatcaaactccgcaacagagtcatggtgtcctcccgaacactctgaacatttctgccaatcctcagggggttgcaggaggagtaacaaaacgccgtaggagaagaaagaaatcagagatcaaaagacgtgatcctgatcatccaaaacccaacagaagtggttataacttctttttcgcagagcagcacgcgagacttaaaccgcttcatcctggtaaggatagggatatcagcaggatgattggtgagctatggaacaagctgaatgaagacgaaaaattggtatttcacacactgatctttgaattcttatcaaactctgttacgtatatcgagtttttgtctcatgatctgtttgattttcttttatttctagatttaccaagggaaggcaatggaggacaaagagcgatacagaactgaaatggaagattacagagagaaaaaaaagaatggacagctcataagcaacgctgttccgctgcaacagagacttccggagcaaaacgtagacatggctgaagctgaccttccaattgatgaagtcgaagaagatgacgaagaaggtgattcaagcggatcctcaggcgaaagcgagccacatgatgatcagagcatagaaactgatcctgaattggaagagccatctctgaatccctcaggtccaaacctaaaccctaatccgactgagatagtggtggctcctaaggagaaaaacggcgatgttgtgatggaaacatctccattgaagaaagccgatgagccaactgtggcggtgactgctgagcagaactgaagattcttctcttgtttcttactccccgttgccagtttcgtgttccataggtaaatgttagagagaggaaagggcttcagataccttgcttctggcccaagattatgtctttttggttttttttttggtttttttggatttttcttcggaaacaaggcaagtttatggttataacattttggcataagagaattttttactttcgttattaatgggatatcctgtaaattggtgattaaaatctgaaagggccttataaacttgggcttggaaagcaaatgggccgaagaagtaatccctgtaatatgattttgaaagcggaggagggagacttaaagactttgattgattgatttataaaaggaaccctaagtttccgaactttgtccgtcgccgtctgaaaactctgtagctctctcacttcagctttccaattaaagggaacaaagctttgatttttgccgcagtcagaagcattactttgcaagaacaagtgtgtaaacaaag

SEQ ID NO: 5202 - DNA, 1878 bp, Unknown
  misc_feature (1)..( 1878): cDNA_ID_2052904_gDNA_ID_1620771_Annot_ID_167553 3000 nt of promoter + ATG
gccaaaacccatgacctaggaaactatacgcaaataaagcaaccagtaaaaaccctgtctcagatcaatgttggtgttcttccacatagtatcaaccaaagctaccacggattctgtccaaatctgagtgattatacaggtaagactctacagagatttattgcgtttaataaatatagatctaaccctaaaagcttggttcatgcggttcctcagtgaaatcagactactcaggatgcacaaatccatacgaatcgataggttaggcaaataaacctagaaacaaatcgaggtaagcaccgaatggtgtaagattaaaacctatgcatagatcaaacgaaaagtgacttactgaatccatcttcgacaaggtaattgaaggtatgaccgtcgcagttgtaggtgaacttgttgttcgaagacggaagcttctggaggcactgagcagcgattgaggtgaaattacctttgaaatcagtgaactcaacgaggatcaccgtgccgcgagctacgaaactgtagatcaacgattgttgcgccattttttctttaccttaaatctccgatccaatcgaccgtctgatcagagaattttttgggcggtcgcggaaaaaaactacagatctagaagactatgaaagaacaaaacgaggactaaagtggacatgggagaagaaaaagttgaaaagcgggcaagggtaaagttgtcatttaaggtagtcagattgggtcaaaaatagtataaaaccttgaatttaaggactaaaaaaaaacaatttcaaaacggagagatcaaacaaatgtcgagaaagttggacccgcccggatccagccaaaaagctcgtggactctgccgatggcacaaattagtaattaccaactttaggacaagttcaggtcccatggtcgaagagagtctgtctctgtcttcctcaaaatatctttttttccaaattcatcattgatcagtgattccagtattagctcagttacgaacaaaaggcttaaacataaaaacaaatgttgtaattaaccaaatttcttaattcttaatggacggggggagctcatagtcatagtatcttgttacagcaacaaaattcgaacttctaccgttatctcttgtcatctacaattgctctgcattgtttagaacctgctaattaatttgtttaacgtgttcctaaagattttgatcaacaatcaaataattgaaatttaggtagttaggttgtggttagaatagaaggttagtgaattggaatgaaagaaaaggtttgcaacattattttaatttttttggtaggaaggtttgcaacattatcaattgaacgttcttttaagtaacataacatataatttatagaaaatttaacaactcaaatatcccttacacatcgcaattttctttataaaaaatcaatatataatatatatatatatatatatatttgttttttaaaatgctcattgataaacatttcacatttgaattgaaaaacgagccaccgtggtgtaaaaacatgaagatactattattaattagacgtgaattatttaccaaaataaagtttattaaggcaattttcgactatacaaatgatgaatttttctttttatttactttttatatttaaaaattcaaaatttgaacgttaccaaagggaaaataatgtctctgttactcgcgcaaatccagcgctctcatatagtttctcttctccgatctctgcgtcctgctttctccatcgctacccctcgttcccttgtgtatttttacatcgcttactaatctctctcatcaattcgatcggatttttgtggtgttcttaggtttcgtttttttatctttctctcatctggataaaaggaagaatg

SEQ ID NO: 5203 - DNA, 3000 bp, Unknown
  misc_feature (1)..( 3000): cDNA_ID_2052911_gDNA_ID_1620771_Annot_ID_167551 3000 nt of promoter + ATG
agtccattagttgcatataagcccatcccaagttcccctgtaacaccacattcattcaaattccatcagttcactgatcaagagacttgagaaatctaatcacaactaaagactagtcgtgagattattagtcttaccaagatcctagaggtttccttctcgacggtgacctgaaacttcttgccatgagatctcgcagtctttgttggtttgccattgaatgcttctccttgatatatcatccaaagcttttgcttcaataactcaacttgctcttctattctcccacatttctgttcaacaaaattcggaatcccaagtttgtcaatttcactatctaataaaacggtaaccgagagaaacaagagaatggtctcggtcagagtttagttaccttatatagatcgatgaggacattgtctaatgactcttgagcttgtcttgaacaaagatctctaaaggattgaatagcgtcaatggcttcttcagctctgttctgttgtttcattaacaaggccatgtctttaagagcactatcaactctatctctcgctttaatcgctatccaaaacaactctatcgctgcttctgcatctttctccaccaactgaaccaaacatcaaatccaaaatctcagtaaaaatcaatataaactcgattcctttggataaagtcacacatatgtatattaaatttacctgaacatgcttcgctcggacataaggactgtctccgtgaggcaacttatggacaacgttgtacgccgccgccgacgagtcttgtctctcacctcctcttctctgaatcatcatcatcatcgcaaacttcgtgtctctgtttctaaatgaagaaaccttctttatctctcctaaatccggtaacaccttcctttctctctctaggggtgtgtgaagaaagatataattatattgtggaagaagaagaaggaacctagacagattctcgtcttggttcattatcgtcaactggatctaaaataccgcgggctggtcgtttttctaacctataaaatagtgccacgtaccctatccgtccccattattctcacacgactccgacttggccagttttttttgtttttttttcaaatctagtccgtagttgttatttgtcctcataaataacgcccatccttaactatattctgctgaatgtagttaataaccatattgttttgtaaaaaaaaagaaaaagatatttcgcccattgtttctagaaagtggttattctaatgatttgtcgataattcaaaatgtatataaaaaattgtccgatgattttttccaaattaaagtctgattttatttttttgactagtaaaatctattatgcttttattatttctctaacattttcccttatatcaaatcttatgctattcaattttttttagtttgaatttttttggccctttaaaaaaaatcaacagcatatgtcacaacctacaagtaattccataattatgtgttaaacacttaactatatcaaatcatagtacctaacttctatcttttaaaatttgttgggggaaggttatatatcacaacaattatctcgttttatttaagtgtgcattttgaagcaaagtgatgggcctacgtgttaatcaggtgaccgtacgtgtcgcgtttacttttcgctcaagacgacttggttttattttaaataacatttcggtccaatacttttttagttattcaatttggcccctttatttttgtttcgctacaaatttgtgattggaccattataaatccttagatcttgtagaaacattatactcccaagctttggtggctttgtgatatgtgccattggttgcatgaaaaaaaaaacaagaacagtgtaaaatgagtatattttaaaaaggtgtaaataggctaatggaaacatcataatgataattcattccaacgccacgccttaacatactttgttagctgttattattagtaccatctatggcccaaatgcataacatacactttcatgatcttgttgtttgtgtataaactatactagatatagtaagttgtgtgtataataataatattgatattactaaacatgatcaagtgcatatactacgttcagtaaacacaatgacacatggatagatacacatggatagagacacatggatagatacatatgtatacaaaaccaaaacggctagaaattgaaatgatagacgatgataatgcaaatttagacatttattagtgatatacacatatatctagtgtattgtagacacaaatagaaagatgatgatggacgttcagtcggttggcttttgagctaattagtagctaaatgttttcttttggcagagagctaagtaggtaaagttactgacatagttggcgatgattgaattggtttatacagttcaatacaacacgttaaatatatatatatatatatatatatatatatatatatttttttttatctcaaagtcgatcgaagaaacacaaaaaaaatatatacagtatatatgtttgtttaaagatataataattcagaacgctcatctggaccaacttctcccattgtttgtttaaagatccaatacgaactcaatttctctttaatgaaacccaaataaaaaaacttgttgaaataaaaaacaaggaaaccccacaaaagcgatccatatgccagaaatgcatcattgcctaaacccacaatacattaacactaattactctctttctccttttctcatgcctttcttctttcattttctttcaaccttaatcacacaaaccccaaacacaagttttattttgaagtactttgtctagtttgtgttcgattgagtactactacgggtgactcggatcattagtttggaccacctggcgacatcaacaagagaaaagtgttcggctttagtccggtcttgttacgtaccgtcaaggactacttgttctgacgacattattaatatatccaacacgacagacgaagatg

SEQ ID NO: 5204 - DNA, 3000 bp, Unknown
  misc_feature (1)..( 3000): cDNA_ID_2991085_gDNA_ID_1620771_Annot_ID_167550 3000 nt of promoter + ATG
tctgctttttctttacctttattactgttccccggcagcacaaaggagttatgatcacctcgtaaaggagaacaaccattacttgtgcgcaactctcttatatcttcagatggttggtatctcgatgcagcaacatgaacatgtccgttacgctgattcagatttaaaaccggatttttctctacacgaggcgcacatggatcagtggagatggatttccctttatccttctcaacaacagttctcctaaacaaagcattgcctacagaagcacgagggcgatgtccactctcagttcgtgtatcagaactttcccggttgtccccaatttcagggactggtctggctcttccgtgaagatgatgattacggtattcctctctttgatatcttaatggtgctactggagaatgtggccttctcttaacctctctatggtgtaccgatctatctggagtatcaggtatgattaccatgtcaatatcagaattctccatcctgaaacaattaaacaagaaagaaactgaagcaatgcacacatgatgttatatattagcaatagatttttctgattagagagatttaaattcgtgttttgagactttcgaaaacataaaccctaaattataacttaacacaatttccccaaaggttaagatcacaaaagtggcaatcaacaacaacaacgacaaagattgacatgccttaataatcatctaaaactgaggatcagactagtgaaaattcatgggcatttcagatacaccaaaatgagaacagatattcctctccagaaacaattatcgtagaggagaaatctatcacaaatacaaatacgaaaggacagaataaattacccgattgaatttgattcaaatgtgggaatcgaaaccctagttgttcgatgagaagcaactgcatcgaacaatctatctcctcttgctcgggtgcaacgattggacctcagattattccgggtcgggtaagggattactgggtcgggttctgggtccaatattaatgatgttggcttagacaattatattgggctaagatccaataataatgggccttttaaaaacagggcctctttttatttaaattggctttcacaatttaaaactgcaatcaaatgcttagtcaaagtttaaacagagaagttagacagaatcagaaacccaaaccaacaagacaaatagttcgtgaaagttttgattatagcaaaatccaaaacgtgcatttattcactagctctttttacaaatggttcctctattttttgccaactttactaatttaaaaaatggattttcaaaaatcaaaaaccaaaaccattctagatctacaaaaaaatcaaggccttaaagtgtcttgaattttgaattaagaacacttaatagttgaaacttatcgttgtcgcagatgattacaaaacgatcatgaatttagtcgtttttttccgctcctacgatacaaaaatgacatatagtatagctatgttttccaaattttaaaagtcaaactcttctaatttttaataattctaaatttctattcactttttaataacactaaatatagttcttatttcgacgcattacgtttcctagaaatatttaaaatttcagctgaaaataaacaaatgcaaactgatgttaacaatatgattacttaatattaggttgaaacttgaaattcatggcattgtttccatttcaacgataaatatacttttctaagtctaattattttaaatttaatacctaaaatttttcgaaatcaatatagtcacatagaacgctctcatcacgtaactttgacaaataagtataggacaacgtacttgttagggatttgtttaatagcaaaactatgaaaacaaaaacatagtacaataatcatttattgggataatcaagtcaccaattgcctcaaaaccaattattttggcggtttcttaatgatttattcgagaaaatatcctctctcttttttcctacattttggctttttctgcattcaatttttttaaaaaaaacattactcttcgttgggtatataaaacaacaattcaccaaactaattactactagtacttgttttgttttaaataatgctattttttttctgtgacttttattttcaaatctgactatttaataatttcatttactacaataattatatgaattatttattgtcgtaatattttttaacggttatcgtatctaaaatagttattcccagaatccatgtaagcttctcgaccggactttgaaccttccccattggacacagccaaaaggaaccgtgtccatcttcggttcctctccctctgaaaacttattcctttcttttcaacttcctagtcttcttacttcacatatcatctctctttgtttagatctcttcttcccacgattacaaaatcctgtccggtgggttttccccgatcggggtcggatctgattcctcggaagcaacgaatctcgaggcttctttttggttttggctttcggggaaaggctggaatcatttctctttacggagattaaacataaagttccttacttcagctgattagcttcattcgtgcttggtctgctccttcttgatctgggtttacaaacaaatttccttttttggcaaattatttctgtgtttggggtttcgaatttcgatctgctctcgggtgttttagtgattgaatttcgattcgtactgtcttatatctgttcaaagttgtcggctttactctaggcatttggggattttgcttgggttttgggttttatctccaatttttcagatttgtttactctaatcatatatcggagagttgcaattaggtttttatgaattggaggaaatttgcaatcttttgtgtttcccagttgagagggttttaggttttaagatgatggaacttgagttgtgtttctccttgtgaaagattgagtctttgtaaagcttttgtttgttatatccaacttctgagat

SEQ ID NO: 5205 - DNA, 3000 bp, Unknown
  misc_feature (1)..( 3000): cDNA_ID_2052914_gDNA_ID_1620771_Annot_ID_167549 3000 nt of promoter + ATG
acagaactctcgaaatggaaagtgatctccatgtagaaatctctcattctatgcatcgtagccacaagccgaggcagcctcctgcaccatttagcccaagccagaggctgataatgcctaacgataatcatagcgatcctctcttctctaccacaaatagcttcttgtagagcgctccatccatgctcattctgcaagctccaatcagcaccagcagccataagcatctccgcggaggtctcatcaccgagctttacagctaaatgaagtgccgtgtctcgattaaccacatcacgcctgtctataacagctgcgattgaatccgcttttgtctcttcagctacagaagctgcttcgttttgaacctcagacgggtcacgcatcttcggaagagcggataatagtttcttgagaccggcataatcccttgtgacaacagcgtgatgaacaggactgtgaccatacttggtaacatcaatggtgctgcttgccatatctcagaagttggatataacaaacaaaagctttacaaagactcaatctttcacaaggagaaacacaactcaagttccatcatcttaaaacctaaaaccctctcaactgggaaacacaaaagattgcaaatttcctccaattcataaaaacctaattgcaactctccgatatatgattagagtaaacaaatctgaaaaattggagataaaacccaaaacccaagcaaaatccccaaatgcctagagtaaagccgacaactttgaacagatataagacagtacgaatcgaaattcaatcactaaaacacccgagagcagatcgaaattcgaaaccccaaacacagaaataatttgccaaaaaaggaaatttgtttgtaaacccagatcaagaaggagcagaccaagcacgaatgaagctaatcagctgaagtaaggaactttatgtttaatctccgtaaagagaaatgattccagcctttccccgaaagccaaaaccaaaaagaagcctcgagattcgttgcttccgaggaatcagatccgaccccgatcggggaaaacccaccggacaggattttgtaatcgtgggaagaagagatctaaacaaagagagatgatatgtgaagtaagaagactaggaagttgaaaagaaaggaataagttttcagagggagaggaaccgaagatggacacggttccttttggctgtgtccaatggggaaggttcaaagtccggtcgagaagcttacatggattctgggaataactattttagatacgataaccgttaaaaaatattacgacaataaataattcatataattattgtagtaaatgaaattattaaatagtcagatttgaaaataaaagtcacagaaaaaaaatagcattatttaaaacaaaacaagtactagtagtaattagtttggtgaattgttgttttatatacccaacgaagagtaatgttttttttaaaaaaattgaatgcagaaaaagccaaaatgtaggaaaaaagagagaggatattttctcgaataaatcattaagaaaccgccaaaataattggttttgaggcaattggtgacttgattatcccaataaatgattattgtactatgtttttgttttcatagttttgctattaaacaaatccctaacaagtacgttgtcctatacttatttgtcaaagttacgtgatgagagcgttctatgtgactatattgatttcgaaaaattttaggtattaaatttaaaataattagacttagaaaagtatatttatcgttgaaatggaaacaatgccatgaatttcaagtttcaacctaatattaagtaatcatattgttaacatcagtttgcatttgtttattttcagctgaaattttaaatatttctaggaaacgtaatgcgtcgaaataagaactatatttagtgttattaaaaagtgaatagaaatttagaattattaaaaattagaagagtttgacttttaaaatttggaaaacatagctatactatatgtcatttttgtatcgtaggagcggaaaaaaacgactaaattcatgatcgttttgtaatcatctgcgacaacgataagtttcaactattaagtgttcttaattcaaaattcaagacactttaaggccttgatttttttgtagatctagaatggttttggtttttgatttttgaaaatccattttttaaattagtaaagttggcaaaaaatagaggaaccatttgtaaaaagagctagtgaataaatgcacgttttggattttgctataatcaaaactttcacgaactatttgtcttgttggtttgggtttctgattctgtctaacttctctgtttaaactttgactaagcatttgattgcagttttaaattgtgaaagccaatttaaataaaaagaggccctgtttttaaaaggcccattattattggatcttagcccaatataattgtctaagccaacatcattaatattggacccagaacccgacccagtaatcccttacccgacccggaataatctgaggtccaatcgttgcacccgagcaagaggagatagattgttcgatgcagttgcttctcatcgaacaactagggtttcgattcccacatttgaatcaaattcaatcgggtaatttattctgtcctttcgtatttgtatttgtgatagatttctcctctacgataattgtttctggagaggaatatctgttctcattttggtgtatctgaaatgcccatgaattttcactagtctgatcctcagttttagatgattattaaggcatgtcaatctttgtcgttgttgttgttgattgccacttttgtgatcttaacctttggggaaattgtgttaagttataatttagggtttatgttttcgaaagtctcaaaacacgaatttaaatctctctaatcagaaaaatctattgctaatatataacatcatgtgtgcattgcttcagtttctttcttgtttaattgtttcaggatg

SEQ ID NO: 5206 - DNA, 3000 bp, Unknown
  misc_feature (1)..( 3000): cDNA_ID_2052918_gDNA_ID_1620771_Annot_ID_167547 3000 nt of promoter + ATG
ttcaatcctccacaggctcgtgctcctgttagagcaccagcacggggtcgaggttatcgtttaggcggtgcatctgcttcactacgtacagctctgaatttcagttttccaattgatatgggcttagactcggtactctttttaactccgtttatatcctgaatgttgcctaatgttgttaagtaccgtagaatcatccttaccctttttaatgtaacagagaatggatattctggaggaattagagaatgctattggacactccattaccagtagtaatcttcttcatatggatcgtgactttactgagtatggtatcttattgatagaatttcgtcattatcttactatgattcttcaatatatgaagcttgatagttcaaccatttccggtgcagagatgattacgaattgctgctagctcttgatgaaaacaaccatcgacatggcggtgcttctgctaatcgcattaacaacttgccagagtctacagttcaagtaagctaaaggttcacttgtaaaattcagctttttcatatcgaaattttgttactaaaagcttctatttgattgcttatgtgttaatttgcagactgataattttcaagaaacttgtgttatctgtctggaaactccgaagattggagacaccatacgtcatcttccttgtttgcacaaattccacaaggatgtaaggatctttactgattcaaatgaaaaccccttattaagaacagagattcgaaaagtaaccattgtttatttattgtgcagtgcattgatccatggctaggacggagtaaatcatgtccggtttgcaaatcctcagttacttgacaaggttttcaaattcatcggagaatttgaaaactaccattttacccttccaaaccggtcgatctctggaatcattttgcgggtaagtcaaacattcttggccatcaaatttgaactcattaaacggggttttactaccgtttacgcgcgagggatgattatctgtgtatctctgtgattattttctcgggtttaaatatatctagctaagaactttttgtagattaagaaagttgatactaccacttattcactttagtttaaacatataccttttaaaatcaatttaaatgcacaaggctttgtttaatcgttttattcactttacttgcacgaagaagcaagatacaatcatattcaaagagtaaaacaaactaaagagaaacgacatacatttcagttattgttacatatataacgaattagttttcttaaatgacatgcattggattttagctcctcatcaatgcacattacggttaaacaaattctcagtgacctccgccgccaattcctccaccaatttctttaccggctcctccgccgattcctccaatggctccaccgtcaactcctttacctgctccaccgtcaaatccttttccgactcctccctcaattccttttccgattcctccctcaaatcctttgccgactcctccatcaaatccttttccggctccaccgtcaactcctttgccaactcctccatcaaatcctttcccggctccaccgtcaactcctttaccggctccaccgtcaactccttttccgaagccaccgtcaactcctttaccggctccacctccgaatcctcctccaccaaatccaccgcctattcctccaccaaagcctccaacactgcctccaatccaaccgccacctgctccaaagccgcctccaccgctgataccaccaccaccacctaagtcgccgaattcttttttaaagcccttcttgtggaggagaggatgagggtgagggtgaggaaacaagggcttctcatcaccaaactctgcttctcccatagtaaaatctgtgaccaaagcaaacaccaaaacaaacacacgcactttaccggcgattagacccattgttagtggaaacttaaaatgtttgtagttaaaatattagaagctattggaagaggatgttttgatacgaaattgcttcttgcatgagcagtatatatatagacttagagagagatcgtgatagcataagcacttttcgtcaatgtgcatggattcaacctgtacaacaactaggatataattgctgttgagtaaaaacagttaaagatgtttcaccggtcactggacaagttttatgtttcattgtctgcccaactgccatattgatctcatccaacacaaagagaaaaatatgatgcaaatatagttgaaaaattgaagaacatatgacaccaattattatatacagttccttgaattatattaatcatacattcatatcaattatattaaaatttaatttgaaggttgtccaggtttcagagggcaataactaaaaatgaaaatgtttctgcatgtctattcataatttcatattaagtgaaaactcgtatggtctaagagaaaatatttactagaaaataattctgacttgataaaagatgtagtcgctttataggttggaggacaggccatgtcaatctatggaatattgaactatctatataaaccctaaaatgtgatttcatttatttgtgagctttagctttttaggtgtcatcaatcaatgatgtaaactagaaactcatatgctatacttccaaacaaaccaataaagtttttattatgggccgctagattggtccattaacactataagatatatagtctggcccatcattagacccaattttgtattccgactttatgattttgtttggatccatcatatatatttggggtgaaagtgtaatcttattaaacatttaggggtattggtaaaaattacttgacttgttgggtaagtatcttaatattcgataagtctagaatttcgattttgattagacttgtgaaaaagtgaactcagaaattgtgctcgcccaaagtagttcggttcttgtgttcctccgtctgatcaactcttcttctccacctctaggtttctaattttccgattaggataatg

SEQ ID NO: 5207 - DNA, 3000 bp, Unknown
  misc_feature (1)..( 3000): cDNA_ID_2052922_gDNA_ID_1620771_Annot_ID_167546 3000 nt of promoter + ATG
atatcgtagtaatgcaacaatgcatagaactgtgtctgagagtctgataaaccttacttggtcattgaaatatgattctctttgcagcttttgcttggttacttgccacctgaacgttcactctggtcaactgagttgaaacaaaagagatcccaatacaagcactacaaggatgagcttctgacgagtcctgtaagtgatcctggtcttttgtttcttgccttggagttattgttagtctgttagttttgcatgctatgtctgtctaagttgatttcaagtaaccggattatcacataaaagttatcaagtgtgtattatcctagctgtttttgtgaactttgtaagtcctttttctcatctagaaagtttctgtacacaattatcttttcttgaaatgtgtttgtacctctaaatgattctgtggtagttagtcagaaatcacatggaaaatggtgaggtcaaaggggttcgacaactatgacttgaagagtgaaagccgatgcatgcttgcccgatccagaattactgacgaggaccatcctttaagcctagggaaggcgagtatctggaatacatacttccaggtactatatcttacatcctgggcaggtctttcattgtcttaatcttttagagagacctcagtgcattacttaaggacaggattaaaggttatatagtatttaatttgtccactagttccatcatcactcttttgttaatgtaggatacggagaccatagaacaaatagacagagatgtcaagcgtacacatccagacataccctttttctccggtgaatcatcgtttgcgcgttctaatcaggtaacctttttgtgttctcatcagcaaattttcacctatttttgattaatcaaagctcagtgacatttcgatttacatgtctaggaatctatgaagaatatattacttgtatttgcgaagttaaaccaaggcatcagatatgttcaagggatgaacgaaattttagcacctatcttttatgtattccgtaacgaccctgatgaagatagttcagtaagtagactctttttgtttcggtgataccctttaaccaactttcaatgataacgtacacagttttaaggtaacagtgctagtctggaccctcaataatttcaagatatgcgttcctttgaagtaaaagctcaagactgttttactaaatgatgtgtcacagagttacaaataaaaaagaaccccgtaatctattagtatgaatctgacctctctgtctaattttcttagaagattggttcgtgtatgatcttttttcttcaaccttgtttttcttcttctcagcttcaatcaatttcatattaactcttttcaaaatatgcagtcccatgctgaagcagatgcattcttttgctttgttgaattgttgagtggatttcgagacttctactgtcaacaactcgacaatagtgtggtgggaatccgatctgcaattacgaggctctcacaacttgtgaggaagcatgatgaggaactgtggcgtcatctagagatcaccacgaaagtaagacattggttttttctttctctcatgtctttttgttgtgacaacaaccatatttgtcattctactactatagtcctaatgatctgctttgtgcggaagataaattccaatgatcccctcagcttactttgtattcttgttctcctatccataacataataacagtggattggatcctctgagattgagactgacattgtatagattctttgattacaggtaaatccacagttctatgcatttaggtggatcactctcctcctaacacaagagtttagtttctttgacagtcttcacatatgggatgcactcttaagcgaccctgaaggtccgctggtaagatcgtaatatcttctccttgatgcatacccgaaatcaaatcgatagatgcagaagtcacattagtttactgttccactcatttgcttgattaaagaagacccggtctgtatcgtattgttgcaggaaagcttactggggatatgttgtgcgatgctggtactggtgaggaggaggctaatcgctggggatttcacgtcgaatatgaagttacttcaacactatccaactacaaacatcagtcatctcttgtatgtagccaataaacttcgttccaaaatgttagtataaatccttttgttggttttttctagcttttgattaaaccaacttttagttgcccccattacaatatacaaagcgtttttgttttgtttttatattttactgtttaaatggcaagacatgtttgtttgttacgttatcgttttggagattttctcggaaatcatgaatgcaaacaaaatgtggttgttacttgtcctccgatttcagtcttagaagccatatgaggttcttggagaatcattctcctcctccaaaacgtacatatgccaaaactcagagccttgaccacttgcacttccaccctgtaatgatttacacaaaagagaagcttgatattaccatttcaggcaaaaaaaagtacaagaatatttatgaccaatacggtggtaccgaaatcatctccactacagctgctggagctcgaagctccgattttggttcagttcttatcatttcggtttactgttgactttggtctttagcaggttcaaatcgaattaaatttcggttaagttccacgcaattcaagggaattttgcagcttcaaaaataagagaaacggtcacaaaacgagcaaaaattcaaaattagaaaatacgcagctcacgagtatcgtgatattaacaacaacccaattacatcattacacgtgtcgttatatacagatgggtactttcgtttataaatacacatcaaacgccttactaaaaacctagaaatagaaaaatcagatctagattcagtttttttcatcaaaaaagagcgtcttcataaacgcccttcgtcttcttccctggaaatctagtttctttcttccacgaaa

SEQ ID NO: 5208 - DNA, 3000 bp, Unknown
  misc_feature (1)..( 3000): cDNA_ID_2052925_gDNA_ID_1620771_Annot_ID_167545 3000 nt of promoter + ATG
aagacaccgcaagtctccgccatgttcacgcccagatcctccgtcgcggcgtcctcagtagccgcgtcgctgctcagctcgtatcttgctcttcgcttctcaagtccccggattatagcctctcgattttcagaaattctgaagagaggaatccttttgttttaaatgctttgatccgtggtttgacggagaatgctcgtttcgagtcttcggttcgtcatttcattctcatgttaaggcttggtgtgaaacccgatcggctaacttttccgtttgtactcaagtctaattctaaattaggttttagatggttgggtagggctcttcatgccgcgactttgaagaatttcgttgactgtgactccttcgtcaggttatcattggttgatatgtacgccaaaaccggacaattaaaacatgccttccaagtgttcgaagaaagtcctgatagaatcaaaaaggagagtattttgatatggaatgttttgattaatgggtattgtcgagccaaggatatgcatatggctacaacactttttcgatccatgcctgagagaaattcaggatcttggagtactttgatcaagggttatgttgatagcggcgagttgaacagagcaaagcagctttttgaattaatgccagagaaaaatgtggtgtcttggacaacattaattaatgggttttctcaaactggcgactatgaaactgcgatttctacctatttcgagatgctagagaagggcttaaagcctaatgaatacacaattgctgctgtgctctctgcatgttcaaaatctggtgctcttggatcaggaataagaattcatggttatattttggacaatgggattaagttggatagagccatagggacagctctcgtagacatgtatgcaaaatgtggggaacttgactgtgcggctactgtgttcagtaatatgaaccataaggatattctttcttggactgctatgatacaaggttgggcggttcatggacgctttcatcaggctatccaatgttttagacaaatgatgtattccggtaaaagattttgtccagtctaagaatttagcttattctcatttttttttaattattattcatcgagtttagttctttaagttgtggtgtgcatgcaggagagaagccagatgaggttgtgtttctcgcggttctaactgcatgcttgaactcaagcgaagttgacctgggacttaatttctttgatagcatgaggcttgactatgcaattgaacccacgctgaaacattatgtgttagtcgttgatctgctaggtagagcagggaagttgaacgaagcacatgagcttgtagaaaatatgccgataaatcctgatcttacaacatgggctgcactctatcgtgcttgcaaagcgcacaagggttatagaagggctgaaagtgtgtcacaaaatcttttggagcttgatccagagctttgtggtagttacattttcttagacaaaacacatgcgtctaaagggaacattcaagatgtagagaaaagaagattatcattgcagaagagaatcaaagaaagatcattgggatggagttatatcgaattggacggtcaactgaacaaattttcagctggtgattattctcataagctaacacaggagattggtttgaagcttgatgagatcatatcgcttgccattcagaaaggatacaatccaggagctgattggtcaattcatgacattgaagaagaagagaaggaaaatgttacgggaatccatagtgagaaactggctcttacacttgggtttctaagaactgctcctgggaccacgataaggatcattaagaaccttagaatctgcggagattgtcattctttaatgaaatatgttagtaagatcagccaaagagatattctactgagagatgcaagacagtttcatcatttcaaagatggaagatgttcatgtggtgattattggtgatatagttgatcccttcaggttagtcaacaacaatgactcaaaccaaaaaggaaaaatgcgatgttctgtaacatcccagcctgagctgcttgaagtttttgtttattcatggcgctttccggtacaaatcttgtcatgttcttgtacacaagagtagggattaggacaagctcatgatttctgagaccaggccacacaccacagctatatcaggccgaagtgattcgggttaccccacaggcctagaagtgaaagagaaggggctcaagtgggttacttgtgtttttgagatggaaaattccaattcttttttatagaaaatatgagaagtttcgtttcataagctaagattttcgtaagataagattatgattaagcaaggagatgttagtatctgtaggtgtcatgtgtattattgaagacaacaacgaaacacatggcaattgtttgcgaagcacaggtatcacatgagaacaaataccagtcgccaaggtaaattgggtccatcactgttgctgattaatcaatcttgtgtttgtatatcactttatatatatggtaatacgataaaataaatcatagttattgttgctttctgttatacgattttaactcaaattattttgttgatatccaaaaattacctcaactctttagatatatgataatactaatgtacataatccatatatttattgtagtttccaaatatatccctaatcataaaaaaaatcttacaaatgactatggatttaagtatttccaaacaaaacaaacaggggaaaattgaataaagaaaaagaaagggataaatgtgtaaatagtcgacaatattgaggctatatttaatattaatttcttcgattcttctctctctttctctctctgtgagaagaagcaaaatcacgaacttccattaatcaccgactcgcagaacctttctctcattaaatcttgtggaaacctcggaaattgaatctgcgtgagtttcaatcgcttgatcgatccatcaaaccctagag

SEQ ID NO: 5209 - DNA, 3000 bp, Unknown
  misc_feature (1)..( 3000): cDNA_ID_2052929_gDNA_ID_1620771_Annot_ID_167544 3000 nt of promoter + ATG
ccttgtctcattcttatataatgtgaaggaaagcgatttgcacacgaaaagaacagggcatactgagtttgtagataagacattggagacaatcaaacccatcagcttggaagctcctaaggttgccatggagattgatgataatgctagtggtagtggagaggctgcagaaggtacattgccatgttaatgtatatgtattgcatgagtttctgaatgtgactttaacgctatttcttatggtcactctgcagagatggttgttccagacgttgacaataacattctcgaggaacttgaagcgatgggcttccctaaagctcgtgctacccgagcactccattactctggtataaatctaacttttggttgtgggctcctattataatctttggttcacgtagttttcatatctcctctaagaattatctgaagtgtaacatggtcatatgcataacagctccaaaatttatggccactgatcacaatagggaatcagggagtagcttattgattaattgttatgctttgtgaatagcgtgtaaagcttgattgtgggcaactgagctcttgttcacgtctctcctttttgaactccggattgatatataaaactgtcatctatctcattgtgtgcaattagatcttcttctccttttctcgttatctcttttttttttgttcagatgtcatctgaatctcgaaattcttttacacactttgaaattcattccttcaggtaatgccagtcttgaggctgcagttaattgggtggtggagcatgagaatgatcctgacgtagatgaaatgccaaaggtgggtgttttgtcaattattacttttcagcagaatgtctgttctggaccgttttgtttcttgataattgcattccaaatctcggtttttagttcttatctcaaagtggttttttgcttgatgcgacaatttggaggtcaaaattttctgtatatatcaccttcaacaatcttatatcttgttatatgacatgtatgtggtcttaaaattactccattgtttccttactgttatttctatgttattgactgtttgcctaggtgccttccaactccaatgttgggcctgccaaacctgctcttacgccagaagaagtgaagctaaaagcacaagaattaaggtcgatgagtattctgttttactgtccctatttgttttcttttatagcgtgcccaatggcatatcgacactacacttttatcatgcataacctagaccatgaaaatgtctacacttcaatttatattcgttgatccatgtctcagggaacgtgcacggaagaagaaagaagaggaagaaaaacggatggaacgtgaaagagagaaggttttctgtctctgatcctttttttaaatgtgttactgttatcttaaataacttaattatgtgcttgaaacatattgtgtcattgctgaaactgtaagcattactttgttatcatcttttaacacgttagtatttggttcaggagcgaattaggattggcaaggaactcttagaagcaaagcggatggaagaagtaaacgaaagaaaacggttagtcttttctggttataatgtcaggcttatcagctgtattcttatttttgtttttcttaatcgactacttattggttgtgtgtttcagtcttatgtttttgcgtaaagctgagaaagaagaagaaaaacgggctagggaaaagatccgtcaaaagcttgaagaagacaaggtatcttcaatgcagtagatttacgtacgttatgcattacatttatatttctcaacaaaaaaaccttgaagactcatacattttaacaggctgaaagaaggcgaaaactcggattgcctccggaagatcctgcaactgcagctgcaaaaccctcagtgccagttgtggaggagaagaaggtaaacaaaaaagtatcaaaagctagttatattttatcatctcttgttatatgctttttcttatagagacatcttttttttttggcaggttacattgccaattagaccggccacaaagactgaacaaatgagagaatgcttgaggtcccttaagcaagcccacaaggtaaatacatttaacatttgtcaacccacacattctaagcaacaatgagccgaacattaatcttttggaaatcggggaaaaagggttcaaggaggatcaagtaaagtttgagtataacagtaattttgcttgtttgttcaggaggatgatgctaaagtgaagagagcgttccagactctgctgacttacatgggaaatgtcgctaagaatccagatgaggaaaaattccggaaaattagactcaccaaccaaacatttcaggtaaacaatcgggcataaaaatacgcatctagatctacttgaaggatctacactgatgatgatgatgatgatgatgggtccagtttcttacttgtcatggtttttgggatgaaaatgtaaacaggaaagggttggttcgctaagagggggcatagagttcatggagctatgtggatttgagaaaattgaaggaggagagttcttgttcttacctagagacaagatcgattcagccatcataaactcagctggaacagaactcaactccgccatcaacaaccctttctttggagttctttaaatccatgcctcttcttatgaaactaaaaaaaaattcggatatctctatgaataatactggctagtgacattctttttgttttgcttaaataagtggaaaatttggagagcagaactaaaagcttccattactgtttaatccgtcttgttgtttgcattgtaacttttaaggtaaaaaaaatgacatttccatactgctttcgtctgaaccggttcgccaattaaccggtttgatatatttagagcaatacggtttaatccggttaagataagtagccactagccaaatatataagagtcttttgcaccgcgagatctgatgactgatgagcgttttgactgaggtacg

SEQ ID NO: 5210 - DNA, 3000 bp, Unknown
  misc_feature (1)..( 3000): cDNA_ID_3076196_gDNA_ID_1620771_Annot_ID_167534 3000 nt of promoter + ATG
ttccttagtaggaggaaccgagggatcttctcctaaagcggttccaactatctggtctgaagtgagttttcctaggcagcttcattaacttctttcgaggtttgtattttagattgtgtttgatgtttcgttgcgtatatttggcaggttatgaggttttttacaaatcctcacaaacctatgatcttggcattatctagaccagacccaaagaagaacataaccactcttctgaaagcctttggcgaatgtcggcctctacgggagctagctaatctcgtaactgttaaatagctgtatttattccagagcatgaaaccaagaatcctctgtttctgaaattctttttcctgtgtgtttgcagactttgattatgggaaatcgagatgatatagatgagttgtcatctggaaacgctagcgttcttacaaccgtcttgaaactcatcgacaaatatgatctttacgggtctgtcgcatatccaaagcatcataaacagtctgatgttcctgatatataccgacttgctgcaaatacaaagggtgttttcataaatccagctttggttgagccttttggccttacactcattgaggtaaagtatgcatatgtgatatatatatatatagtccttcttactcgtttccaatcctgtttaacctaaatagtatccagaaatctattcacaaaccaaactagacaagaaattaatcaatctggtttaaccaaaattaaaaatgcaggctgcagctcacggacttccgatggtagcaacaaagaatggaggaccagttgatattcatagggttagcaacgtgtcctgaaactgaaaatcatttaaattggtaatgcttatttctttctcatggtatttaacttcaggcattgcacaacggtttgcttgtggatccacacgatcaagaagcgatagcgaatgcgttgttgaagctggtatctgagaagaatttatggcatgagtgcaggattaacggttggaagaacattcacctcttctcatggcctgagcattgccggacttaccttacacgtatagccgcgtgccgtatgagacatccgcagtggcagacagatgcggacgaagtggctgctcaagacgatgaattttcactcaacgactctcttaaagacgttcaagacatgtctctgagactctctatggatggagataaaccatcgttgaacgggtctcttgaaccgaattctgctgatccggttaaacaaatcatgagccggatgaggacacctgaaatcaagagtaaaccagaattacaggggaagaaacaaagtgataacttgggtagcaagtatccggttttgaggcgacgggaacggttggtggttttagcggttgattgctatgacaatgagggagctccggatgagaaagcaatggttccgatgattcagaatatcatcaaagccgtgcgatcggatccacagatggctaaaaactctggttttgcgatttccacttctatgccgcttgatgaattaactcgcttcttgaagtctgccaagattcaggtgagtgagttcgacacattaatatgcagcagcgggagcgaagtgtattatccaggaggggaagagggaaagcttcttccggatcctgactattcctcgcatatcgattaccgatggggcatggaagggcttaagaacacggtgtggaaactgatgaacactactgctgttggtggtgaggcaagaaacaagggctctccaagtcttattcaagaggatcaggcatctagcaattcccattgcgttgcatatatgatcaaagatcgttccaaggtaaagtttgattttcaacaactgtaccaatcattaatgcagactgcagagtatctaatcagggtttctacaggtgatgagagtagatgacttacgtcagaagttacgactaagaggccttcgttgccatccaatgtattgtcggaattcaacgagaatgcagatcgttcctcttcttgcttctcgatctcaagctctcaggtacgttaactaaaccacattttgctacggaaatgctacaaaacaaaattatatttttgaacatgtttgtttccttattatcgcgatttaattgttgcggtgaaggtacttgttcgtgcggtggaggctaaatgtggcgaacatgtacgtggtggttggagatcgtggcgatacggactatgaggaattgatatccggcacacacaagactgttatcgtcaaggggctcgtcacattgggttctgatgctcttctccggtcaacagacctccgagacgacatcgttccatcagagagtccttttatcggttttctcaaggttgattcaccggttaaggagataaccgacatttttaagcagctctcgaaagccactgcttgattccactaatatccaattctcccggttcaaccatgtagattaatttgtttatttattttctacttgttttgggacttttaagttttggtattttggccgatcgaacattaggatttaacaggcttctatacataaaataaaattttcaaatagtgaagtcgaggctattatattttttttgtaaaaattatgcaacttgtgttcccatccgagaatggttggggaaaaaaagaagataagcctaattcaaaaaacaaattgtaaaatttgaaaaatcttaactgtaaaatggcgcctataatatgggaaatatggatcacataaaataattagattttaatgttcgttcttttaaatgcaggtttaataatcaaccggtcggtttgattgcaagacccgacgccggtttgttgctggtgtgactcgcgcggctgcgacggtgattcgaagcagctataattaattaccttaattaacgaaaattcagaaatctacatctcgccagtgagaaagactccaaggagagagagctcatacagagtattagaaattctcaaatcactagagaagatctcgtcttcttcctgattttaaacgcg

SEQ ID NO: 5211 - DNA, 3000 bp, Unknown
  misc_feature (1)..( 3000): cDNA_ID_2052966_gDNA_ID_1620771_Annot_ID_167531 3000 nt of promoter + ATG
gtacctcctgatcctcctcgaccgttcttctcgtaatctgaaagagaaagaaatccgctttttcaagttaccaaaatattctgctagatttgctttgatgattatgaaaactaatccatgaatcttgtggggagctttatctttcaaatactacacgacctaaggagcaaaaagagagaatagtggggagcttactgtgcacggactttcttagctcgctcgatgtgtcttttcaaaagatccttctcagataattgctttacagcttcctcgtcctgagatcatcaaagaaaagagtggaatcaaacgtcatgtagtaaatattcaagagctgaaattagcaacagcaggaaagaatcagactaatgtcttctgttctgctcagatagaatcaatggttcttgaagacttaacacaaacctctttgtcttcatccgctgattcttcatctggatcatctggtacacttgtctctgttgttaaatccacaggtaacggttttggcaaaggtttcattataccactcctttgcggctgtcaacagagaaactgaaagttagattagtcccagatatatggttacgctcaagagattgcagatgcacatttccattgcaaagcagataacaagctttgagtatgcaattgaagatcatttaactaagattggcttctaaaaatataactatatcaagaaagaatcctctaactagcacggatgcaaataggtgagtgatcaaaagtaatttagtttccaaattcgagtaaatttggcattctgagaggttttctgaatcaaaaccccacaaaccaatatcttgaaaatacaaccgatgaatcttttatcaagcggagtcgtcaatgacactaacatcctactctaacagcagcatataaagtgcgaacctgaattccaacgtgagcaccatttttcaaccacgatcgaccaagtgaataaagagaagaagacccctcagtgattcggacctgtaaacagttgaatagtattacaatctaaacttaacagatgtcttttccaaattctcaaacaagcagtacatatgatagtaggcttacctttctccctctaacaacggcaagagccccatccttgcttctaataacaaggaagaagaaacagcaaggcaactaagtctcttgaacaagttttttttaaaataatattttcagtgaaaccaaaagaaaggtaatatcaaagtagagaaatttgatgttcacctggcctttctattcctgctagtgtctagaattgaagttgggggcggggcaacctaagtaccaaaatttacgaaaatgagaaaatgtgactggagcaagagcaataatcaaaagtaagtaggtgcaaaccaactattaagagaagaacagcttaacatttgctaagatataaaagcattttcaagtcttcctcattccacaaaagagaattttcaagaccagagtaaagcaggcacatagcaggacaaagaaccaaaatagaaagataactagatccaattactaactatcacatggtttataagaaaaccatgaaagacacgtccaacaactcacattgttgtataactagactagtcgatcaaaattctagaactacatgcattagttcgaatgagaatcactctgacaaaaatggatccaatattaaccaagatgattcttaagtcacggtacagtcagattcagttctactaagactccaatcaagaaactttggatcatctcgagcattttccccactaatctttccactacttagctagaatctaagcattaacaaatgaaacatgacaagcagaaattgaggacttcatctaagaaacctcacccgcggttgcagaaattgaggacttgctctaatgggacccaacccaacaggagaacccaatccaaggcgtggtaatggacgaatctgaggatttctctcccttataaactgctgcaacaaggattccatttgacgctgctcatatggtccaggatcgtaagtaaaactcgggcgaggagggtacccactcagattaccagccgtcacggaaggatctgcgacgaatcctcgaacaggtcgggctgaaaaccctcgacccggtagagcaaacgggtaaagaacagctgacggatcttgaatttggcgtctgaccggaatcgaatgtgcgtagaggttattactataagcagattgttgttggaacggattagggtggcgaagcggagctatgggtctgtaagtcggcggcggtagtggcggcggagcaggaggtggctgagacggcggtggtctaacagtgtttactggtgttaccggagtttccgatgcggtggatagagacggagacaccgttagagatgcggaggagttgggatcgggaattgacattccgacggcggaaggaatttgtcgattcgattttcaaaagaatttttggggaaacagtaaaaagaaaaaaaaaagtttcaaatttggtcacggtttaataatgcgcgaaccctcttactcatagggaggttttcaggttttgggccgatctgggcctgagggtattagtgtcaatttaaacacgggagagaaagagagagtaatcgccatttttctttattgggggagtgaagaaggataggattcagatgatgaagtacagatgaatgctccataaaccctactcttcttcttttacctccagcttcgattataccattccttgtttgtgaaggttcgtaacttcttcttctctctaaattatctcatggatttatgaaaagaatcgattttgtttgatttatgggttctaattagtcgaagcgcttgggtaggtttgcaatgttctagctggtcttgagcaatctctggtttagggtaccgaaatatgtttatgggaattgaaatttatcggatgagattttgtttctacagtcgtctgttcaaattcgatttcccatgtttcgtttgttttggtataggcattttagttggtaaggatg

SEQ ID NO: 5212 - DNA, 3000 bp, Unknown
  misc_feature (1)..( 3000): cDNA_ID_1013364_gDNA_ID_1620771_Annot_ID_167529 3000 nt of promoter + ATG
taattcgtcgacatattatttaccatagcctattttcataccacagtaattacaaagactattttatttcagacagaaatatcattcacagattagtcaacattaagtacaaaagtattatacaaagctttgttcgttttggtcgctgagtctggtccaaatgccaaaccagtagcgacacttacaaccaccaattgtaaactacaacgagttaggtttccaagtcgtagatcgtggtagcttcaaagccattgaggctgttgggacgaatccaagtaggcgacatcgctgcaaactgtgatttcagattctgagcagatgatttccgcattctgaagtgtgaatccgtgcattatgggcaacgggaatcccttttctaggtggtcatttgcatatggcacaaacactgtttgtataacagtccacactattggctagaagatcggaacaagataaagaaacacgtgtgaatgctaagaatgaaagaaacaaacatgcgagtgctttaaacacttgacatgatggttttacctgaagaagatgcagatggagatttccaatgttgctccatttcaaagacatggagaaatcttctaaacttacgctgcctccaaggttattgcccatgactctgagagcaccagatccccggatcatctgcagccaaggaaacagtgaatcatctattggtaaaccgacatcactgcaaatttgcttatagtaagtaactaaaacaaaagatatggagcattgtcattggaggactcaccaaggagatgcaagctacaggtattacttggtttgcatctagaacattgattactaggtctgcattaacattagctccaacgtattgctctgatatctttacaagcggaggtgaggacaaactgatgttcagattcatatcctggttcgggtatttcttgtatagttgtggaatgatgaacctccacctagcagtgtttaaaagagactgctctggtattttatccacaacccattgcacaaagtctgcctgaatatggcaagagtgaacatcctcatattagaaacaacggtggaaaacagtaatattgatgtatcggaaacatatagaacagttttatcaagagcattctttctagttggaacctaaggaattaggaaattaggaacttacattatagtacaaagctgcagcagagttaaaaacagcttcgtcaactgaaattccgagcattttagaatttccagggcagataactaaagatacagactttttgaagaaggattttaagacttgatttgtttctcctttggtgaacaagccatcaatctcaaaagtgatagatgaatttctcaatataggatcactggtgaaagtgacattaaggtcagcattatcatccactgggatttcctttggaaggctttgtaggaatgaatcaaggtctgatactccttccgtgagtttcttggcaatggtactttccacacttgacccaatttggtctttaaatgcattaaccatcctgaattgcagagaagagaatgaagtttaaaatgaaaaacaaaccaacacctgtcttgcaataagagggagtggatctatcatcaataagcaaattatttcgtacccctgataaaaccatgatgctcctccttccaactcaatggtaatgtcttccacatggcatccacattccgaaagagaaagttttaagcctccttcatcacttttcaagcctagagagagcccgatttccatgccttgaaccttaccgagaaggcgagaatcagcactcatcaaattccctttgtaaaacagatataaaaatgagcagatcacagcaacaactaaaaccaacacatggaaatggtaaacagagagcaacagtcacctctgattcccatatgcaactatgttctaagacatataacaatcacgaaacataaggatacaaaacagaacagaaatttgtgattcgcaagaaaaatcttgtctttccattgattcacaagattgagatgatcaaaactaagaattagtaaaattgatcataattacctgaacagatgcaataccctgatcagatatttcaataggaggaagccaagtactgtaagaataatgccaattcatactcaaattacaagtcgtccctgaagcgacgatgacaacacctgtctcaccaagcttaacataagatgacgcaacgtcaagctcgtatatcgtgagattcgagacaacaacatcgattcctccaaggaacgggattttcatagatttctcaattctgggaatctggagaggtataatcgacgcgatagctttgttaactagaagatttttgacgaaatcgagtccgttttgagatacgagaaccgatgtgaatgaatcggtgctctgcgtttgtgaaggcaagaagaagaaacttggtaatagaagaaagagaaagcatcgtccaacatccatggcggatattcaaagctttttttgttttggtctctctatcttcttcgatgaagaaaacaggttaatacagtgaagttgcgtaatggtttggattattgagaaatgtctaaaataaccttagtcattcgatttgcattgccttctggggtaatctgattcaaaaggaagtgtttggggtgaatacataaattgttaaaatattaatgtttctggtcaatcaaagctaaagctgaggtctatagggcaataaaagtataaatacatatgtaattgtatatactgtacatattaacgtttgatatgtatataagctcaagtggtgttaaatattctaatatgtgtctaaggacaatagttcgattaaaattggaagcttcgggggtaagaacataagttttgaaaagtatttatctttgtggtaaatcaaagctaaaattgaggtctaaagggcaaaagggtgtcataattggtctctcgcggtggcttggcgacacggaacagagaattaatcgagaatctttttcagcttgtaaccggaattc

SEQ ID NO: 5213 - DNA, 3000 bp, Unknown
  misc_feature (1)..( 3000): cDNA_ID_2991244_gDNA_ID_1620773_Annot_ID_50210 3000 nt of promoter + ATG
aaccatgtttcttgtaacaagtgtcttcaacatgaccagggcgactacagtaagtacaaactggcctctcctttttctgataggtgtctccattaagaacagattgtgaagactgattggagactgcaaacactgatgaagtcattcctggagtagtagaaatccttgcagaacgttgaatttcatcctgatcaatcatgttgaatacctcagacaaagaaggcaaagttttcttcatgagaatctgacttctaacagcatcataacaatcattgagtcccataagaaaatcaatgactctattagtctctctttcaatcagaagatcttctacagtccgtggaatagcctgaagactcgtcaattcttcccaaagagtttgtttacgagtatgatacgatgacaaatccagattgccttgacgaagagagtgaatctgttgacgcagcttgtaaagtcgagggaggctagatttgtgaaatcgagtatagagatctttccagattgcagcggctgtgggaaaatacaagatgcttgtatagatctccttcgatacactattcagaagccaagacttaaccatactgttacaacgacgccagattttgcaataaggatcatcatcatcaggttttggaatagatccatccacaaatccaagcttattcttagcttcaatgctagtagtcatggctataatccaggtaccatagctgtttccatctaacagttctggagctaagactaaaccaggatgatcggagctaacaagatgataaggactgtgactattatcaggagaatccgatacctcaaagtgacgcgatgagctgtattgagctggttgatgaatcgcagcatgaatcgaggatcctggagctcttgctgatgaaccagaagactgctcatgaatcttcgatgaagcaatgacaagtagatccggtgaactactccgacgaacactctttccatttcgtttacccatggagaatcgaaacagctaacaaatgagactggatcgcaaaggaaacgaagagaaaacgtgtagaagttcaagagaagaaaaaaaatgagaagatgaacaaactccggtgagattccagtgaaatcaaatcggaaaagtttgttacgagactgagatcgagatattttgctctgataccatattagtaaaacaatctcattctcattaattagcaaaagagtacaattgggggtttatatacaaactgatattggcctaaaccataagcctctaaaccaaaattaagattggtttatagaataccaacctgtacagactctatatgaaatctatactaaccaaactaagcttatatacaacaatctaagctatatacattaatagacgaaatttttaaacaaaacccaggattcgaacatcaaataacccatccccaacgcaacaaatattatcaaccaacttttcatttcatcaatgacactgtgaatcatataaaagagatatgatgtcggtgttgaagataacttctttattgtaagattattttgatcgaataagctgcctcaaatcttctaatttcgacaactctttatctgtgaggacactatgaacacgtttgtaaaaatccatcacttggtctctagctaccaccattttctttcttcgcatagggctggggaataatgagttcttacagtgaaaacataagtggtgaccggacgcattgaacctaacatcgtagaaaacattgaggaaatttttgtaacataataaaaagagacatgtggaaagagaaaacaaaaataaaacaaaatattgagaagaaaccaagaaaggaggaatttctttagtagagagatctaccgagattataaagaaattgaggagtagaagagatgtcagcgagctaaagtgacatcagaggaaagactttgaagtggttcctcaatactagaggtatataagaaaaagaaaaagaggcagatccaaaatgttggttttgaaagttttatagatttttaagattttgtttttgttttcatttttcaagagctaattgtcataccattaccaatcaagttttaaaatgttggttttccaagaaaatacttttgctataatctttttttttgtcatcagatattatttaggattcaacgaaccaattttgaagaaaattgttaacaaaagcgaatttttcatgccaaatagttttttattcaaaattttagacttttagttatcttataagcaagcgttataatttatttatttttttaaagaaaattttgagaaaaacaattgcgaaaaaatgtcaggagatcttcaaatgttcaaaaatacaaaaaaaaaaaaaaaaaaaaaaaaattagtgtggggtaaaataatacgtttaaattttattgacttttcatttcaatagtcaacttttagtgacttcttatttcagtcgctaactttttgttgatgttgccaaaatagtcattaaattgacccgagatcacaaattgcgggtaacggaactttgttaaaatttctgttaaatccacaagtgactggattaaaaaaaaaaagtgcaactggcctaatatgagcccaataaaaaatatctcaaaagttttatgggcttattacagatgggcttagtcagagcactatcttacccaaacaattaaaaaaacaatttacaatatgttttcgttttctacttttttcggttattttgggcaaatgatatctacagctcaacaaatcaaaaaaattcaaaaatatttcaatttattatttctcgatttttttcacaactgtattttaattgtatttttagtagaaatacttatttttccaaaaatatttgtttgtgttgatgtatatataaaaaatctgcatcagtgttttgtctacattttctcttccattagtttcgttatctttttattttctctatctatctggatattattttttcacttggggatttggagaaacctctcctctctctatctatagccatg

SEQ ID NO: 5214 - DNA, 3000 bp, Unknown
  misc_feature (1)..( 3000): cDNA_ID_1830033_gDNA_ID_1620773_Annot_ID_50213 3000 nt of promoter + ATG
acaactgatcctaaatattatttaaaaagattttttgtttttcatcgcatattaacaacattatttattggcaacaaaaatgcaatgaaattagtattttgtagcaacattttcacaactattttgcagcatgtagattgtgattttctcgttatactaagttttaagtggtgtaatataagaattgaaaattatgatgttactaatttgtgttattcttataatgatcattagctcaatttgtgttaaatatccacctgactttttattcgagtgtactgttttttttttttttctgttacaatttgagtgtagtgacgattttatatatatttttgttaaagactatctctctagattaattaaaaacttatctatactcgaagttgatatattggttctaaaacgaaaacgctcgatgtattttaagaaagtgttatgaaaaaatgatagcaacttgaacacaaaacgactgcatacatagtagatgattgattgtctaaattaatttatttccattcgaatataatttgatggtgatttgtgtgtaagaaggataggtgaatcgttgggtggaaagttaaaacgtttgaatgcatatctaattactaactagtattcgtgtcttaatacaaagatttcttatcgtttcgtttgttaggtgaagattagctaaaataattaatatgtttaatttgaattggtgtatcatttttttgtcattaaccgtgatgaaggtgatgacaatgctgcttacgtcaagcttatcggcggctctagcggtggcacaagtgggaaagaagggaaacgcaaacgcaggttggcttccgatttgcgggcaagttccaaagttttgcgatcagatcactggagctttaattgccggtttcgttgcactcgtcctctatgtactcttactcttatattctctccacgccgtcgtcgacccttttctccttcaaaaatcttgaatctacctttttttttttgagtatcgatctaattttatgtctctcatacatatatagatagtagacacataaacataaatttgctcgatgtcgatttgagacgtagttcgtgtgttgtgcttgtataatttccactgaaaagaacgttttctaaaagttcatgaccataacacgtaaagaggcgaatgaaggtaatattaatgtgggacatagtgttttgcgtgatccaaattattttagtatcgcaaaccggcctgtcttaaatggacatttgtagtaacaaaaccgaccatcagcaaattaacgttaacgttgctctaatcgtgtgtatttttctaatgcttggtgaagcacatgcgaccatttgttgtgtcagaacaaaaggaagattccacatttagaatttagattataatcccacatgcctattatttaaacatatgtatactgtaataaattagtcccagaagagcatttcatcatactgtataattaatcaaatttaaaaaacatttgtgttgaagagaagatgactagattcacttgattttttttaatactgattggtcgtttgaccagtcaggatccagactgaaatattctcaaaaggtatgaactattttaatgaaatatttgagctgagaatttgcttatgggacattctatccttctaaagaaatcattagaaaatggagaaaaagttactagaaaaagagagggaaatggggcgagagtatgaagaaagggtcccatgtgaatctaataattgaaaagcaaatatgagatttattttagggttcttgttttagcgtccaaagcggtcgcagttgccgttcagcgacttttctctgtttatgaaataaaaacgctccacttgttcttttcttctttcaacccactttgttataactattaacaaatattgcttggtccaaattttattatactgaattattttagtttttttgtatcatcatcctcaatgttagttttgaaatcctaggtcagtaagtcaataacgaaaatgacaagtttaattttgtaattggaacttacatgtcacggtctttgtttacgatcattgccacgaattgtttagatacgggctttttttttctttccgtgttgatgattatcgtttcttcttacatatcttgatcaatcactaacatttacataacctacaattttgtaatataattgcaatactcgagatcttcaaatggtgatactgttaataaaattacgaacttttaatcatcatcaaaatctatagaaaaagatacataggaccaaaacaagcctaaaacaaagagttataatttacaaataaatgcatgtattttgttacttttgttaaggattttcatatcaatgcatgcataatgcattctctttttattttatttataatgcattcttttataatattcggatccaaaattatgaattaattccagattgccataaatgtctttctttgtttatgctgacttttttcttttcttaacttatatagtaagtaaaccagaaaggtggaagatacaaagcaatttcattgcattaataaacttcaaatgtattatccaataatcaaaatttatctagtaattcacaaaaaaaaaaaaatctgtctatcattcaaaatttcaccaatttggataaatatctagaaaattttaaaatacaattcaataacactattaacatatcaatcaatatataacattgcaaaagtttacttgatcattagtatattcattttaaggttaaaagatctttaagaaaaggaaattcaaattatattgttggaaaaaaatacaaatcaaagacagcaaaaaaagtaacaaaaaaaaaaggtagaagaaactgaaacgcggaaaggaggcaaaatcttctcgtcgtcgttgtcgccgtcttcagagctacaaacgaaaaaactcgcttccgtttcgatttctccattgttattgtttcttcagtgaagcttttttcttcgagaaatttctaagatctaccacatgctact

SEQ ID NO: 5215 - DNA, 3000 bp, Unknown
  misc_feature (1)..( 3000): cDNA_ID_1830037_gDNA_ID_1620773_Annot_ID_50214 3000 nt of promoter + ATG
accattatcatggtatcagaaaaccaactattcttggtgtcagggagcatatcttcacgggatcagtctcgtcactggcgtggttcatgtctgctcaggagacaagttttgtcactcttggtcagcgtgttcttgcaaacccactgaaggtcagaatgcattatggccaccctgatgtatttgacagattctggttcttgagtcgaggcggcatcagtaaggcttccagagttataaatatcagtgaggacatctttgccgggtttaactgcacgttaagggggggaaacgtcacccaccacgagtacattcaggttgggaagggtccacaatttggattatttctaactaactatactgctacaacgtttttttaacgtttttaacgtttattaattatgcaatctacttttgttataattatgtaatttaacgttttttaatcttctaaattcaaaaaatttgagtaacctttgtctttatgcatttttcaggtcgggaagggacgggatgttggattgaatcagatatcaatgtttgaggctaaggtagccagtgggaacggagagcaggttctcagccgagatgtgtaccggctcgggcacaggcttgatttcttcagaatgttatcatttttctacacaactgtagggtttttcttcaacacaatgatggtcattcttactgtttacgctttcctctggggacgggtttatctggctctcagcggggttgagaagtccgctctagcagacagtacggacaccaacgccgcgcttggggtgatcctgaaccagcagttcatcattcagctcggtctgttcactgccctgccaatgattgttgaatggtctctcgaggagggtttccttctagcgatatggaatttcattcgaatgcagattcagctttcagctgtcttctacacattctcaatggggaccagagctcactatttcggtcgaactattctccatggtggggccaagtatagagccactggacgtggatttgttgtcgagcacaagggattcactgagaactaccgactgtatgcacgcagtcactttgtgaaggccatcgagcttgggctgatcctcatagtctacgcttcgcacagtccgattgccaaagactcgttgatttacatagccatgactatcaccagctggtttcttgtgatttcatggataatggccccatttgtgtttaacccatcaggattcgactggcttaagacagtctatgactttgaagacttcatgaactggatctggtaccaaggcagaatctcaacgaaatctgaacaaagctgggaaaaatggtggtacgaggaacaggaccacctgagaaacaccgggaaggcaggattatttgtggagatcatcttggtcctccggtttttcttcttccagtatgggattgtataccagcttaaaattgcaaacggatccaccagcctttttgtctacttgttctcatggatatacatctttgctatatttgtgctcttcctagtcatccaatacgcccgtgacaagtactcggcaaaagctcacatacggtacaggcttgtccaattcctcctgatcgtgcttgctatactggtgattgttgctttgctcgagttcacgcatttcagcttcatcgatatcttcacaagccttcttgcattcatcccaactggctggggaattctgctgatcgcacagactcaaaggaagtggctgaagaattacactattttctggaatgctgttgtctctgttgctcgcatgtatgacatattgtttgggatactcataatggttccagtagcgttcttgtcatggatgcctggattccagtcaatgcaaacgaggatattattcaatgaagcttttagcagaggacttcgcatcatgcagattgtcactgggaagaaatcaaaaggcgatgtctaagtttaaaaaacggtaaagctccttgttctcaacaccttatgttatgatcgtttaaatcctggatttcacaccaatgcgggctttaaatttgtgtaggtcttaagaagtaaatggtagttcaaatcctattggtatgtggcgaaggaatcagttggaggttagttttcccgaaacaaccgaattcgaagttttgtttcgtctaaagaaaaactcagatgctgatgatttatctttgtattttaaacaggtttttggagagtttggttggatgaggaatcgggaagttggtttgattcggttagatgggtttagggagatatttgattgtcagtgtgtgtggagggaactctgattcttgtatggtttttgttctaaaggtacagcaatttgtgtagtgaggctttgtgtatttgttctccttctctcattatagagctttagagcatttttagtttatattcagattgttatctaatgtcatctcgcagagcttttgttcacatttcacatcttttcttctccttcttagtagagatcagtttcagattagatacttgtccatattccactactctcgtctattatcggtttctgcttgtcaatttctgggtccaaaattgaaataaatttatataattggaccacaacaccactttgtcggttttgacttttctacttggatgctcctgaacttcttgctcccttttctattacaaattgggaaacaatcagtgtgaattggggaataaaaaaaaacagaattgagcaattaaagccacgtggcaagaaatcgacgagggaccaacgtgtttgtctgcaagatctaatccttttattaacaaaacggcgactgatctaacgggaaacttttaaaatcgagaaattgttaataataaattcaactacttctgggccatcatcatcaatcttgttcgtcttccttttgatcttatcaaactacagtcaaatcactcagagaaagctactaggtctctcctcgacatttgctttcaattcgatccagtaattttcttctcatcggagagagaaaaaaaaa

SEQ ID NO: 5216 - DNA, 3000 bp, Unknown
  misc_feature (1)..( 3000): cDNA_ID_1828025_gDNA_ID_1620773_Annot_ID_50219 3000 nt of promoter + ATG
attttcttttcgggacattttgaaaaataactcagatttctgttgaattttgcttctttttgtaaataatcaaaataacatgtaaaagatataatatgagataaaaattaaagtttaaaaaacattaccataactaataatttgagtaatttagaaaaaaaaaaattaccacaactattcttgatataatatgagtaaaaaacttcgaaacgagaagattgaaaatttaaattttatttttcgaattctagctaattggttctatttttttggggatatttaaaggtctatttgagacaattattcatatatttaaataatattaaaaatggaaaattttgggacatacgtaacgacatacttgttacattaagttaaacatattaaaaacaagattattatttgacagaaaaaacgggtattgtatatgacaaaaactcggatgaatacgagataagatagtttctgttctttaccggacatacctaatctttttgtttgataattttcaaaaccaacgcacagaagaacataccttcgagtcttctatattggtcaagtcttgggaatcaaacaaacgcaaaacagagttggattacataccttgctcttaacgatatatagtttatagatatgatagtatttattagctttttccatgtcgggataagactgttcatcgaaggaaagttacgaatttgaagatgtataatactccaaaccttcgaagctatgcacatcccattcaggcgccattaacatatcaaaattagcctcatgcacgtttgttttggtttcttcgtcgtcactggtatcttcgctctcatcagcttccacagattcgatttcttccatcaacttgctcaacttttcttctatcatcgtcacgtttgcacactgattgaggaccatgatgatcgactaaaccctaatcctctatctgaaatcccaaaatcctaagatgtaattctctagaccgagcgatggtatttaaattaccttattatcctagaaacatgtgaaatttaacataattgtcatccaatttggtctttcaaaaaaaaattcttttttttgctcagttaaaaaaaaaagttcaacaatatatgttccaaagacaaaaagattcacgcattttcatgattttagagttcttagaattttttgttataaaaggtttgcagacattaatttttttccccaaattagagtttttagttgaggtattagaattctttttatcaagaaaggtacttataaaaataagtatcagtgtgtgaaatccactacttcaatgttggaatgttacaccttcctcaagaaggaatttgagtaagaaagaagttgtgtaacccattattatatgatcttatcttcgcaaaacatgcctcttcaactagttgatgtagttttaagctactaaaataataaccgggtaacttaaatagtgaaaactgataacaaacttaataggatatgtaaatcacttggttattggtccatgtgttgaaattgtgtggcaatgaacccacaaacggataacaaatcatgattttcaatatctcaaatgagaagttgtgggacgatccattctagatactaaatgctgtcatcaagaaaaattatctaaccacaaacaaaaaaaattgagccaatgcatcatgaacttcttcattctactactaacaattgattttctaaattaactttacatttacattcgggagtgactcaagataatctagatcaaaattccctaaataatctaaaaatcaagaaccttaatatgagtcaaaatctcttctaataagcagaaaataagctaaaacagcacaaaaagcagcaacaacattgccttctttcaaaagaaccttaaacacaaatccgacaacttctctcgtaatcttccttccttcaaccactaaaactcttcttgatttcccaaagaaggcaagcaacaccaccaccgatatccaaatcaccatcaccgccggaaccgccaccgtcatagcagccaccatcgacatagctccaaacatcgcaccgagcaccaccgacgcgtataccgccggtaatcttgaaggagaataatctgaatttgatgacgtgtattgaagcttgtaccagttaagaactgatctcaggaggttccatgaagaagatacgagaattgcgtagacagcgatgaagagacaaacccatgtccgtcttttactcatgattgtgatgaagatatgatacgatcttggagattctgtttgatctgccattagagattggaagttcttgcttatcgatcgaatctgttttgagatttgtctgcgactgagcaaaataaaatagagcagtttatgagaatccttacactcagtcgtagcgcgtgtcgtgtacgcttctttgtgaatttgtttttgagctggcaatcgcgtggttatggttcacacgcgctttaatatatttttttttgtgaaatatgaaaaacatttggtcgaatttgtgagataatgaaatggtaattggaaagattgtgactgcattgtttttaataattaagtaaatttaaattctgtggaagtatatttaatcaataaactggaaaaacaaaagaaaagatttcgttaccataacgatttaaatttaagattttgttatacagaaaaagaaatgtagaagatttttttctaatttagaggagtcaaacaatgatatataacaaaaaaaatcacaatccggtggatttgtggggtaagtcattaatcttttactattttgtttggaaaaattagtagtcaatatcattatgactacatatatcagtgtcaaagactcaaagtaatggcttagatattttatgttaataaaaggaatatatatactgtgaaaaagacaagtttgtgtaagggatcgcatataatctcaactaatacaataaacaaagatatagccgttggcattaatcagctttggctagaccaaccagaagatcagaatcttgagaag

SEQ ID NO: 5217 - DNA, 3000 bp, Unknown
  misc_feature (1)..( 3000): cDNA_ID_3076210_gDNA_ID_1620773_Annot_ID_167609 3000 nt of promoter + ATG
caaaaaaaaaagaaaaaaaaaaaaagacaaatcccgagtcgggcgtttagtcgagatctacagacgggcgaatgtcctcagcaggcagaagtgacccagactggttaacaactcccgcctagtcagcaagggtctcgaccgatttgtgaccacccggacttaaaggagcggggtcgggaacaggagccttgagttcctctttcagctcggcgacaaaattggcaaaatttacctcggcattggcgaagtctttcagccattcttcgacctggtctttctcggtcgccaactctccaccttcctcaagtgccttgatcagttgcgcattaggccgcgcctgggataagtatataaactgatcgttgatcccatcgagaagcgagactttctgctcggcggccttaagtctggcgacgaaaacctcggaggtctcacgctttgccgtttgagaagcccgagccacttcgctatcacgaagccccctcgcctcggccagcatgcctttgaggcgaacaacctcggagtccgcccttaggttcagctcggccatcttaatggcattcgccttgttcacgaaagcctccttttcgccttcctcctttgctactttcgctgcagcagcttgggagagcgcctcatctctttctcgctcggcaacttggatccgagcatccgcttcggccaacctgttggccgcctccatgttgttcctcatggccaaatcgtacgagtgcaccattcgattcatcgaagcaacaacctagaaaacataaagaaaattacatatcggagatctagacgcgatgaatgaaaaagttgaataggcacagtgggaagccgtttcagcatacttccgcgactccagaagagtatccggaggaggaagcaaaggaccgacgcaccccctgaggaggtttgcagaggctacccggtcctcaaagatggggagttcttttcccgcctcggcactcgaggccttcttcttcttgcttttcttcttggacgatgaatcattcgtccgaacacgcttacccgcggccatgtcgctcgcaggtagcacaacaaccgcctcgggcaaaggcgcaacagcagtaggatcgacctcttgagcttcagaaggcgtcgggtcaaccggggccgcaacttcgggagcaacattccggtcttgagtcgcatcgggagaggctacccgcggcaaaatcaatcctgcattcgcgaggcgtttctcttccgccaagcgtctttctttatcttcttttttcttcgcgtacacctccctcaaagtgagcttagttgactgcatatcgacgaacaattgagttcggtggtccggagattctgaactggtaggacaggaaacgccgtgaagaagacggagggctagttcgactcgatccagagagaaatgttttgaccaatcacacttctgagctgataacgcgtgataagccgagaggaaatcgtcaggaatcgactcgagaaacttgagagtgcgttctgcaacaaaggaaaactagttagaaaaagaaacaaaatatataaatcgcgtcggacgtaaacatatcgctaactaactacaactacccaaagttccccatctcgtcagaaccgtcccgagaagatcatcgtgaacaacgtctccgagagccacgtagaagaagtgttcggtatacgaatcgtccttgctcgggaacttgtcaataatcttcttacccttagtaggagatatataataccgatccacttcggattttggaacccgcctgatctcgagatgagcgagcgtaatttcagtttcggattcataactccgaatcaaaatcccgagcaaatgtctcaagtatcgcatcgtgatctgggaaagggcaatctgatatgatgtcacatactccagaaccagcctcgggattggcagccacaagaagcaaccataaaagaacccctcatacaaggtatagaaacccgcagggggattgtcggcttgctcgtcagggctcggcacacccaaggttaaagcgccaaggccaaatcgagccctaaggtccgagagagaccgctcgatgcacaatgttgagccgggaggatctggcattatcacctttttgcttttcttcctcttcttcttctcggccttttcgaaagctttttgctcattaagacgcaggatatcttctgtctcgttcgggcctaagtaaagaaaatcctcaatcttaaccgtcggcatgaagggctcaggcacttctcgccaattggatgtctcggcttcgtcagccatcggggcaaaagacctgcgaacaagaggcggctcgggatcatcgggcaaatccagttcccgagcgatatcggcattggtatcttcccgagccgcgacgggagtcgcctgctcgggggcatccgaagaagaaacagtatactcttcagaagatgtccaaactgctctccgtttgtagatcgcgggaagatcatctgggtgatttgagtcgctagaatcgacaagagaagcgctcgggatcgacggagactgtctaggactcattctcggctcgggaacgatagacgagaagggaaacaaccagaaaacaagaatttctatcccggagaaatcaaaaataacaaaatgaacgacggagcttcgccagaaaagaaaaaacgataggaatatcaagatcagagagaaggaagcaaacttgtttattttcttcgaaaacttcaaatgaaatctcgaatgagtggcttgccatatataaagagttttcaagagcgcgttgggtccgcagcaaacattcaaaacgcgttcaagcgcgtgggctcggcagaaggaaaagatccgcgtgatcctcgggaataagcgagaaacgtttccacttctcaagaatagtcggcaacacgcgacagaagtttgaccgtccgggaagatgaagcgacagaactagaagacgaacagtcggctcgggaatccattcatgaagctcatcgtctctctgctaagtcaatgagatg

SEQ ID NO: 5218 - DNA, 3000 bp, Unknown
  misc_feature (1)..( 3000): cDNA_ID_2153903_gDNA_ID_1620773_Annot_ID_167589 3000 nt of promoter + ATG
cattatgaacaatgaagattttaacgccgatgaactcctcactttcgtcgcctataggttatgttttgtacttctgtctctctagactccatatataactcgcaaatactcttttgaattttgttttgagaagttgtgttgttttaatcccacttgcttgtaacagtgtgctgattctaggtctgaattaaatttgttgtccttctcctttatgtcttagaccatgttttttgtaaactatttttcagatcaagtattctgaaacgccttggacgtatgatgtgtcatgccgttgctctcagccaaggcggctgtgtagagataaacattgaacattttggcactgattctctcctcacctacattgctgataggttctctctctacccctatcccacatgcacacaaatatttatcgttctaacgaagtttataaagttgtacgtctacataagtgggattgattttatatctaaaacggttatgctaatttctaggtctaattctagtcaggattgaagaacaaaatatctcagttggtttagtggtaaaggatatgtttgttccttagtgccttttccttatgaggattaggagaattattttggttaattcgtatttgacatcaacgtatattgagtatggacatactgtatataggttccacccgtctctcttcttatactcgcaagcattagcacacaggttttgagttcatcgctactagtacagtttcataatgatattatatttgtatcttgaattgttcttctatctcttgatttttgtttgttaactatacttgcagatcaagtaatttgagacaccttggacttgctaagtgcgatcaaataacgggcatgggactgttcacagaagccatgaaacttccattgcttgaagacctcgagctttcatactgcttaatcaaaggaaagaatttggaagctataggcttcgcttgcctgcatttgaagacattgaagctaaactgtcaaggtttcaagttccccggctttacgtatgatcatgatgccctaggcattgctaaaagaatgcccgaactgcgatgtctccagctttttgggaacagagtatcagacgtagggttgaacgcgattttcgacggttgtcctcacctggaacacctcgatttacgtcagtgtttcaacattaatcttgtaggggatctggagaagcgttgtatggagaggatcaaagatttgagacgccccaacgattcaactgctgattacccatatgatacaagtttgctcgatctaggcatttgaaatcgttttgaagtctgtttagctggtcttgactacatcaaacaattttaattatgggattaggctcgagacggctcattttattaagcccaagaacgatggaaatatatatatatatatatatatatatattttttttggttagcatttgaaagaactaatctattttaaatagtttttaacatcgaatggtaacaatgtattaatttcggaaaagacattatatgcataaatgtgtaataagcaaagaaagaaataaaataaattgctgtcacaagaaatttcttatcaacttttacacgaattatatcatacataaaactatttcatcatgtcaaattatacacaagtcactatcccgtcagtcgtgtcataacaaggagagtaaaaaaaatatgttgttaacattaacttttagaaaaattaaatgaataattggtttaaattctaagaaccagcttttatataatagccaaaaaactagattttagcattaattcttaacatttttctattttcttctttttgaagatgtccctggaatccatgataatccgaaaaaattgatctgaatccgtatccgaaaatttagatttattctattaggtcttaaactcataaatttgaatccgaatcaaaacctgaacctgaacccaaatccgaatgttttattcgaaaactcaaaattttcgcagaaatttatctcttttaacaaacccgaatatttacccaaaaataagatggttatagaaattctcatacgtatattgttttatttagtcaaattatgtatcaataaataaataaaatatgttagacactagaactcgacttcgtgatcaacgtacgcatcaataattgaaatatgatttggtcgagtatatatgaaatttttttggcagaaatcaatagtttaactaaccgttttcgtttatgtttacatcatgtttgtttaaatttttatgtcatgtctgtttcaaattttataagttgtaataattattaagatatttaaaattaaaatatttttattttaaaaagtccaagttaagaaccttttattacagtcaaaattttaatcttttaacaaaattcttaacgtcaaaattttcacaatcaattataaaaatattcctaataataatgctcttaagagcactactatcgaaggacgtctcaatttgtattggtttggagtaatccggcgtggctacacagacgaattgtagaagaagcttcactaagagcatttccattgcataaccttttattgatgtctttaagactaaccatagtaaaaatagattaaccatgattaaaactaaagacatttgcttttttgggtgtctaaaatgtcttagggaagacatatttgacatcaaaaaaggtgaatgtctttaattttaactatggttagtctttaaaacacacactagaagttatgcaatagggatggtctaagttctttgctaggttactttaattcttggatttttgaacattgctctgtttttttttttagtcaaacaacattgctctgtttccgaaacaatccgctatgatattggcctaatgtattgtatgatcctaggcccaatgcttattgggccagtaagcaattggcacaaattgtattcgtagattttttagtgcgatgaggactagatagtaaacttgtgatctcaacaattttccgattcccacagaa

SEQ ID NO: 5219 - DNA, 3000 bp, Unknown; identical to SEQ ID NO: 5215
  misc_feature (1)..( 3000): cDNA_ID_3076247_gDNA_ID_1620773_Annot_ID_167577 3000 nt of promoter + ATG

SEQ ID NO: 5220 - DNA, 3000 bp, Unknown; identical to SEQ ID NO: 5214
  misc_feature (1)..( 3000): cDNA_ID_3076251_gDNA_ID_1620773_Annot_ID_167576 3000 nt of promoter + ATG

SEQ ID NO: 5221 - DNA, 3000 bp, Unknown; identical to SEQ ID NO: 5213
  misc_feature (1)..( 3000): cDNA_ID_2991244_gDNA_ID_1620773_Annot_ID_167572 3000 nt of promoter + ATG

SEQ ID NO: 5222 - DNA, 3000 bp, Unknown
  misc_feature (1)..( 3000): cDNA_ID_1828017_gDNA_ID_1620773_Annot_ID_50221 3000 nt of promoter + ATG
gagcacgcagatgcggttcatggcttagatgaaattcgatctcttcaacctcgtggtgcaactattgttgataccgatccacttcccgtctttctatctcaatttacaatggagaggtaccatcttcgattagtgttctctatctcaactctggcttaaagcttttcaaattagcatttgatgagacttttaaggcaacaaaaaattgtgcagtattgctacaaggtttccttatttggttgaaaagaaggtaaaagaagtacctagacgagtttcacttcttgactggaaaaacatcgaagagaattgtgacgaaccattcgctgcctcgggcttatctttcacgcctcttccggttaaatttcttttcacttttgagaaatcaaaacagtctaattcttccatgagaccttatagactcaacaatgttagttatgctttaggtgatgcatggagaggactacattgctttaggtttcctcttcggcgataaaagtaaagtggcttatatatcagacgtatcacggattccaccgagtaccgagtatggtaagagctcattatgttatgccctaatcattatacctctgtagttcacttctactaaagagaaagattgatattcttatgaatctttgattaagcagctatttccaaagctggggctggacagttagatcttcttatcctggatacaaatataccgtggaaggttcacatcatctcataacttttgtttaccgctttttcgatcttgataacctttcttgctgaccatctctttgataatagagaggaccacatcccacacacatctgttttacagaggtttgtttcaatggttctcttttttttcttcccaaagaatgcttcacttctctaaacctttttgagagtaagtttcaatattcctattctttaggctcttgagatcttaaagaggctatgtccaaagagagcgcttttaacgggtatgacacacgagtttgatcaccatgaatacaatgagatacttgcagaatggtctctaaggtatgcaatgaaacaatgttataagatttctataaatcaacatcgttgaatgctaatagagactatgttgatttctagggaaggaatccatgtacagcttgctcatgacggattacggcttccaatagacctatgagcaaattactaaagacaaatcttagaattcttgttacctatcaagaatacaaatgacaaaaatttccaaaattatatgagtagaatctatattttgatacagtaatgaaaatctctgtttctttacttgttctgggaatgattcaaaatctttaaaccaagcccttgaaacaacttctctaaatttgaaatctcattctcaatattcacttcatcttctcttgtgatcttttcatgcaacttggttagtctctgagtcccaacattcactccttctgcataatctctaagcgctcgtctcattgatccattttcgtcttgaacatctttgtatttccttttcagagatcggtatccgtcaatagatttgagtagctgttcagacaactctttgtttcttccctgtagaggcacattgttgtctcctggacctggaccatcaatatcttctttcttctccttattatgctctaccgcgcaattctgcactttcttaagtaatttctcattttgagccctaaaatcacttacaagctcctccatttcgtttaattcgtgagctttcctcgaaagctccaaagccattatctctttctccttccctaaacttgaacacatcatttgaagactctttcttgcagccatactcgcgcttaactcttttctcagtttctgaatatcttcaggatcgttctgtggtggctttgttggactcttggttagatcaggactccgtttcagatcggtgtagcatcgtctaagctcttttttcccagatgatgattgttgttgagctttctggattcgtgtctttagatcatcgagaatcgtcatcatagtgttgactctctgaactttccaatcatcgtggtgcctcgatgttgcttcgttgtgatcttgaacgagtttcagcagtagcttcacgttcgtagtgattccttaaaacagaaacaagaacacgtttaacatatttcttgccatgcaagtcacaagttgttttcttgcccaaaacggaaaatgaaacatgtcttaaatcgatctttatgagatgaatgtgattgatctaccttccaaaccagaatcttcatgagattggtgctctatggttcttgttggtgatgatgtaatagatccagaatctgaagggactaaatccggcgcagaaaatgctcggagacggctcatgttttccggttcagaaacgccgcctggagagaatcaatcagacaaaaaaatgatcaacagaggaagatgttggaaatttggacaaataacagataaaggttgttgtatttttgcaacttccatgttttgtgaggcgtaattagtggacagattatgcctttttcaactaaatttgcctgtcttacctcatttcacgctctaactttttttcctattaaaaattaacattgaatgttaaccatgtaaatgtgtgagataaaaacataatgggccttcggcccaatatatcactagaacatttgttttgttatactatgaggactaaattgtaaatttgtggagaagccgaaaggtccgaaactttactacacttcttctcatttaacttgacttgacgtttgaggtactcagaaaatggattcttcctcctcttcgcctatgaagtacgaggacaaaccgagaaactgggcggagcttctgccggaactaacggcgtccatcctccaccgtcttggcgtggttgagatacttgaaaacgctcagaaagtgtgcagaccatggcatcgcgtctgcaaagacccttcaatgtggcggaaaatcgatatgtgaatcccgaagagcctcaaaatcattgagtacgacatcatt

SEQ ID NO: 5223 - DNA, 3000 bp, Unknown
  misc_feature (1)..( 3000): cDNA_ID_1827986_gDNA_ID_1620773_Annot_ID_50231 3000 nt of promoter + ATG
tcaaaattttaaaatgttatgtaatttatttttttaatgaaaatattgaagcatatattgtaatataagatttgattcactttatttctttatttttattttctaataattgaaaagatattatttgagtcaatatctataaatttgtggttttaaatttaatttttattatagtaataggttatgtatttcattaattaggaaaagaaagaatgattgttaaaaatcatagcaattgttaagaaaaatataaatcatggagtttgcatgtattagttaaattaatattattcgctaatttgtaaaccatttaacttggtttgtctaagttatacatgtccgttaattatgtaactaatttcaattttgtgatgttttatatcactttttggattattttatataaaataacacttctatatattaaatatattttgtacttgaatatatatacttgaaatttttattaataatatgaaaataaatagttaaaagcttattaagaaaaattatttcgattttaacgattgcagatatgtggtctaatcgtcaacggaacacaaatccttccacaagaacaggtttaaatcatcccgaagtttcagctcttccctcaaaaacacctcgacctcccttcacggtgagctttgccttttgctgttctccgtgtttgatgtcccttttgccgtcgtcaaccgccaccgccacatctcatccgcctcgctcgaattaggtcagatcttcactttttggaggaaagttttaacttgggcttgggcctttgttgggtcttgtggatatttgggtggccctttaagcttgttgggctgcatgattgtttggtgcatacatgttttttgggcctgccctattgtagtgtacattattccatctgccaatcgttcgccactttgccaatctttcacctcttcacgtttcatcactcatcggttcaccggaaatttctccgggttctctttgcctatgtcggatatttcttcggtaggctcaatctgctactggtttagcactacttttgctggttcgatttctgcctaaattcggtaaagtttgctcaccggatacttctccggcgtcactatgcctgtgtttaaggccagtccaagttgtttccaatctagaaccacgtttgttggtttgaatttcaacggctcgtcagtttggtgctttgtcacctctatctcgatagcctttctttggattggtttatctgccctagtggcacaatcaatctcgcgcaacattgcatttggtgtgttttgtgttgtccaaggtgccttctctcttgtttgctttaatgttatcatggtccatggacgttgcaacgacatgtatggcctaaagattaaaactactttgatctatcctttaatctgcttatctttatttattgctttgcttttgatgcatggattgtttgcttcggctcctccttatgtagccctatctgtaattgttctctcttttgaggatgattgactatgatataaaattgtgcacaaaaaaaaaaaacatcctaccttcagaatttgattaatcttcatatccatggataatttggtatatttggaaagcaagaaacgaaaaaatatttgaaaatatggataaaaaccgttagacgtattatgtttagcagaaaaagaggcacaatcgtggtagttagctcaataccaaaaatcacggttccatgggatcggaaaaacaaattcgggtcgaaaaaatataatatgataatatttattctggttttcgttgttttgtggacggatcttggaaaggaagcgataagttttctagattagggtggttctacacatcatcaaatggagactcgccaaccatgggagctgctaatatgcgtagaagtctttctctcctctatacagaagtcgaagctctactctgggcgatgaagtgtatgattggtatcgacaacaaagaagtagcattttgtacagactgttcagacctggtgaagatagtgtcttttccaaccgaatgaccagcattttcaacttatttggaggaattccacaccgacaatgaagaattcacaagtttttcctaattttttatttctcgtactgcaaatgatatggcgtacaaattggcacaaaaatttgtattgaaccgcttcatattacttttgtaaacatttttcctcagaattggctcttctaatttctaaataaaatctgatgaaaaaaaaatagtatatggttgaaaagttcaatcaagcgttcaacatgaatataacttatgttttcttcaaaaacaagcttgatgaattcaaattgttttacaagagatggaggtttcttacgcataaaactgacatcattgttgatcctcagatattaatgatatttgcatctgacatatggtagagagaacaagagtttgtaagtacacataacttttcaactcattaaatcttttataaaattttgctattaaaaatctaattgattcgaaaattttagggatgtaaattaacaaaaagtttcaactgaaagccgcctgatttttgggacgtgatgaaacgatgtctcgtattatatgatgttcagtcccaatatcagcattcatctcgccaaagaagaaaacaattaatcaacgagcaagcaattgatgaagaaagcgatgatgactcagactctgatagtggtaacgtgccagcaacacaagttcccgagacacaagaagatgaagaagcgtatcgtgttgccgttgatgatgatgaaaccttcaaaaattctgctcctagaaaccaacaacgaattaggcctaatttgtagtcaacatgttgaagtggaattagttcacaaagatctgggcgaagcgcacaagtttatgttggttcacgaggaaatcgtagacgacaatctttaaaaaaaaacatacaagacattattgctagttatagagatttccaacgacaaagttttcaaaaacttcgttcaagagaataccgcaatg

SEQ ID NO: 5224 - DNA, 3000 bp, Unknown
  misc_feature (1)..( 3000): cDNA_ID_1827982_gDNA_ID_1620773_Annot_ID_50232 3000 nt of promoter + ATG
agagtatcaaaagtaagaacgcaagatatcatgatccggacggccgcggaatacataaacacgagtttggccagacctcttacaaagctcgtgcccgcaaacatgtaagttaatcagcttttttacttaaaaaactttgtatttcaaacaactgacttatctgttttagtgttttagtgtgagatgataggagaaagtactccagattttctcctgctcttagatgagactcatagaaaacctgatgggactttcatcgatagaaagtcggaggagatctataacgacgtgtcatcaaagattcaagaggaggagtctcacctgtgttcagacgacactacggagagcacaggttcaggcgggttatctgttcaagcaaagaacaagatctatgcacgtgtaacttatcgctttcaactcaatatagtgtcggacatatggcatcaactcaatatagttacagttttttgtgttgctttgtatttgtctgttgtggcttgaattatgtcaaactgaaatgattatcttgtgtttgtggcttggataatgtcagtgtgtgtaaactgatatgattatgttgtgaatgaagtttgcattcagtcattatgtgtaaactgatatgattatgttgtgaaagaagttcgcataatgtcattgtgttttttggcctgattatgttgtgtttttggtttgcataatgtcattgtgtttttggcctgattatgttgtgtttttggtttgcataatgtcattgtattttcagcctgatatgattatgtctggagctaaaagttttgcattatatcaatgtgtttcgactttgctttgattatgttattgtcggtttggttgtgagtttctgacaggttgctcctaagaagaaaggcaggatttatggagctggttcattacaggcagaagcgtcttcagctcatgccggtccggtgcttcctcgagatgatccagttgtgctctcgtagaagctggctgttgctgaagcccttattgcaaaccaggctaagaagatcaccagttttgatgcgtattttgactaccttgccgataaggatccagaatttgctacactgtttcgagccagatcctctacaagaactgaatcggtcaactccaatctgagacccgaggagcctaatgccgcagctgctacatctgctgggatcggacatgtggctgtcggacctgaggctgtcaaacctgaggctgttatagctgaccccaacactggatcctctccatctcatactttctaatttctgtattcagtttgacaatttatcaaaacttaagacaatcttttgtggtttcttatattgtgtacttgaatctgaaaatttcagctttcaattatgagtttagtgtttttaatcagttttcaaatttaaagcttagtaatcagatcaaattaggaaaatcattaaataaagctaattacaacagtaatctctaaatataaacagtaatcacgcttacaaaaacaacaaataagtcgctgatacgtcacaagtccattgcaaatattacgaggtatttgcgactaaacgaagggagccacgcaactccatcgaaacttttgcgaggaatgagggagccaaaataaacagtaatcacgctaaaaaaaacttcaaataagtcggttgacacatcgcaagtccatcgcaaatattgctaaggatttgcgatggaacgaacggagccccgcaactccatcgcaaaatttgcgaagaatgagcgagaccataaatttgcagctactttgctaccgaatttgtccttcgcaaattgtgagtgcttcgcgagtaagttagttcgtcgcaaaatttgcgagagaaatgctaccaatttgactttgcgacacgcgtattgcgaggaactgtggttcgtcgcaattccctcgcgattgtctgcgagggattagctacggtttcttccctcgcaaaagacgtgttttcttgtagtcttcaccatctccctcaaactctctgcaactatgtaagtgaacttttctaccaatttcaattagtctaaacattgaatagatattttgcataattgggtggaatttagagatcaataaatatatatataggtactaaatcgttgttgttctttggataatcactcattgctaacaaccaatcactatcgtcagtttaagtactatcgaataattcatgaaattaatccttcgtcgtttgtttcttctttctattttaccgtgtacaaaattatctctatagtaaaaaaaaaaaagaaaaaaaaaggctccattattagcaaacgaaagtggttattggacaggtgaaatttaatgagtatttcgaatgtagttaagctaataatcatatgttttcagattgaatctgtgttcaagagatctcattctctacttctcttgttgttttttactatataaataagttcagtcttagtaggctgtccctgggtttaatctatgagacctggtttacctgaaatgatcatttgcattttcggtagaagtggacagttttcgtgtcgtacatttttttgactgagctttatagtcttgttggtctaaattctcaagtcgttagtcttgtttgctgcaatttttaatatttaggttttatattttaggtatttaataattatctaaacaaattaatagattaatttttgtatattatgataattgatattatataaaatggattttaactaaataagtggttttgattaataatttaggtgtcttttagatttttcatttaaaaataatctttacttcgatatttattttactatgatatctattaattttttgacattacgaattttaattatattaaactatgtactaataatattattttatttgttaggacttcgtgccaagattttcgtaggtctacgactcgatccaataatcagacatactagacaacaccatcaccatcgttcgttcccgagtcaaagcagtccattgctcttccatcgatg

SEQ ID NO: 5225 - DNA, 3000 bp, Unknown
  misc_feature (1)..( 3000): cDNA_ID_1828079_gDNA_ID_1620774_Annot_ID_50235 3000 nt of promoter + ATG
caaatgaaatgactgcatggtcttctcgtggttctcgaaaatgatctctacaaaggtacggaaagtgatgttgagaacattaggttgtacagtcaatgctgtgattttggctgcaggctcgtccttgatcacattgtacttgaaaaccttctctgacatttggaagtactcagcaagcttcaaaggagtctcggtgtcaacgtgtgatacaccattgaaaccaaaccggactttaccgtcaaccacacttttagagttgacaagcttgatgctacgggtaatgttgatctttccgtaatggtatgagccttgggggttaggccttgcagcgttagaggtaaggttccacctgaaagacctgaactggttcaaagaccaagcccatccaacaggagccttgggtagctcagttgaagcctgaacgttgcttccctcataccggatcacacccacggtgctcaactccttcttgaggaacctagtcgatgcaaccatgtagtaatccttagctgcttggttagcagtcacaagaactgaaaagcactggccaacatggacatcgagagagtcatagtcgttctgaataacatgggatccttccatctccacgagcttcatcttgtggttctgaatcctgaagttaagtgtagacttgaacccaacattgcagagcctgtacttgtaagtctttccaggcttcattgtgaacaaaggctcgttctttcctccaacctttccagactttccattgatcaaaacaccgttaggcaatccaagggtgcgtccactgtcaaggaagttcttgagagcagtgtggccagctgtgtaccagtcaccgagaaggacagtgtagtcatcttcaggatcagcataaggaacgggaattaggagacggctgttgacacggagaccaccaaaaccaccagcaaagcggtggagagaagtggttgggtaatagaagtaggaaccaatctggtccttaggttggaaatggtaagtaaagttctgtccagctgggatggggcatgaagttccagccacaccatcttgccagcagttcttcctatgctgaatcccactcctgcatccacaatcccttattaatactactcatatatcacataagaatgttaacttgggtttaaaaaaagtcctagctagattggcctggtcggaccctagaaagtcggtccgcggaaaaccctttgccttgaatcccgtcaaagctggaccggatgggaaaagtccgataaaagattaaccgcggaccaactatggcttgagcacaaataattgactggctcaagcttaagaatgaggatcacagaccggactaccccatgacaacaagctttttaacagatgatcataatataaataaagaatgttgattagtaccaggtcaagaggaaaggttcgtctaggtggttgaagacattgatgacgacgttgttgttagaggttgagttaaggttaggaccagggaattgaccgttgatgagaatcaccttttgaggaacaccgagaggtgaggcagttccgtaagtcacgttccatgtatggaagaagtaaggatcaccggcgttcacgatcgccaccgtagagacgaggcagaccaacaccgtcaataacctcccctccattttttttttaatctctttttctagaggaaaaagagaattgtttttgtttctgtgttacgtataattaaccctttcctacaaaaaaaaaaggaaagcaaaactagtttttgctcttaatgaatcctttgtgatttgaagtatttatttagggtaaaacataacttcttctataaggtaacgtcaccaatttttacgcttcatctctaattcattttctatataagaaaaatggtgacaacaaatagatttctacctgtatctctttatggttttaagattccagaactttgaatgaatacaactcacatcgtattctaatattggaaatgtcactaaagatgttaatatgtggtttctacgtcaaaagaatgtttcccgaaaataaatgtcatgacaaaactatgaccaaataaaaagtatctctaaactcgataaatgaatttctcacgtcataagaattagctttgacatgctaacccaatatagaaatagttgtgataattatattttgcgatggagtattctaattctgagattattctttgtctcgatagcttggtttatttgtagtaatttttagtctaaaatttccgtactttctcatgtcaaatttaataagtcactcaattgtataactattttcgagtgcatataattgaaaattgcatcatctttaaacgcttaaactttattgcatacgcaatggtatcactttaaacgtttttatctgttatttctttttattattctacatatctcatgttttcatgtttgcaaaagaagttgttataatggacgagtcagaaatatttatagaaaaactgaaacgtcattaatcttccaagcccatcattttatttttattctatcatttgactatcgtgctactataagtcatttgatgtacaagtcaattatttgatatgagatcaaatcataaccaaattggtttatataagaaaaaataaagtttagtcgttcgagttagtatcatgaatcatgtataatatatgactagactcaacaactattctccaaaattagcaaaattctcaaaaaaaacttagaaattttttttttagaaaaaaagtttcaccaaaaatagcgagaggtcaaattgaatattcctaatatggacgacaggaagagcgtgatgaaagggacctaaagaaacgagaaaaatcaggaaactgtttattcgattaagctataaaatgtcatttaacatttgaagaaaaaaatcgaaattcaaacaaaaaaaaacacataataaaacaaaaagaaaaaaaaaacattttttccaacacttgaaaagaaaaatcataaactttactaataataaagtttactattaatg

SEQ ID NO: 5226 - DNA, 3000 bp, Unknown
  misc_feature (1)..( 3000): cDNA_ID_1828065_gDNA_ID_1620774_Annot_ID_50239 3000 nt of promoter + ATG
gtgaatatcttgccaacatagtctcacccggaaagacctttcgcagattcttcctcagaattcgacacatgagaattcatcatcaccagaatctcactggtcaagatattcttactccaaaattttagagcatgtatgctttccatagtgagaatttccgtcgtatctttcttattcgatgcatgcatcaacactgcaccaataacatatgactctgatattactcgttgggctggaaacattcaccacaatcttatcagtcagttttaaccttaaaaactcgataaatcaagaacacttgaatcggaaagcaaaaaaaaaaacagaactagaagaaactttcatgtattgttgtttgttttatcaaactcaaatcataatttgaatgtcttttgaatctgaattttgtggaactaaaacgttttagactttgatgcaactagaaaatataacaatgcatgcaaaacacttttacaagtttggtccctccatttgaacaactagaacaaaacttttaaagaaactctagaacacatttgattaatactaacaagcgtgggaagtaagaaactaatttgaggcatttgtacataccatattgtaataactccttagtgttgttatttgtctcactgcctgggattgttgttggtgaggaacagtgttgataatggcccattattaatgggtcgcaacttgcaagacatatgggtcttcactattaagactctgcaacattaaatacatttctcgtggggttcatcctaatatgcatattggtgtatgtatctgtgcctgcatgatttaatgaccagcaaaaaacagtaatggtcaaagtaaataacatgatgggagaaggtgaaaaaagagtttaaacctcggaagagttaatactggtaaaactctgggtctttcttcaacgttctcaattattacaactttacaagtactacaaacattttcgataaagacaacaatacacacacttcttcaagttatgtaacaatccacatttgaaagcaaaccttacaatatgtaacacatcaacgattttcacactataaatataaaactaaacttaccttcaatgtgttaacaaggacaggatccgagttctgatttgaagaaacatctgaagacaataactgtaaacagaagagagtactaagtaaaggagcagtagaaatcacagtagccaatgttcatgacatctaaatattagcaagaaagatgctcttaacgccagttgatttagataaattgaatagtcaactcataatgatacataaactcttacctctctgccaatgaacacgagtgcaacatcaacaggttgctgaagttttttctccgagcactaaacaatggagacaataaaatagatatgagaatgaaaccattgcattgtgtaaaaatatttgcttgcggactcaacgcgaacataccagaaaattagaccaacctcctagagtgaaaacagagtctactagatcctttgcagacatgacttgataatttacatccgtttcaccattagcatacctacaatttcatcaatgtggacatcaatataagcacaattccaacaaaagttctcaaactcttacaccaaaaccagagtacaataaaatttggtaaatttactcacataagccttgaaaatggtgaaaacaaggatcaacaaaaagataaaaagaggcaggcctaactggagatgcggagaccagaggaaagcaggaactgtggaaggtgaagctaatccaaaatccacgagagacgcaaactcaagaactaccaacaactacgccagtagagcagaggtaaaacgtcaccgtttgctataatttacccacaaaaccgatgtaggagaaccggtctgcgtttaacggttggattagctaagagaaccggtctgataatctcttgttaacggtctttgtagaggatgtgaactttatctaagtgtgttcaaaggcttcatattttgagactttatattttgattttcaacttggatacactagctagatgaaaacaatgatgatcctcttctctgccttttacgtgcgctttattattctgtgctagatgcaaagaacaatatcccctagcaatgaatcttttttaggatatacataagacagtacgtattgataataattaatggcaagcttcatcaaacagcaatgaagaaggtactcatccaatgcaaatcttgtcatccttgtatcgtcctttgtaggtgaatcatcattaggctgcagaacactgttttcacagagagcgtgttcagtttgatggactaaaactgaccttatattatatatcaagctcaatctgctggtctcacgaaaaactcgtctctctattgtacttaaacccttaccactaaatcccctgaatgtcttttactatttcttaactcttgaactactggaattcaatttgagctcatttcttattaccatgttcatttggagatacgatagagttagtttatcaactaaacaagatcacacgattgatcaactaaacaagaaatataaaaccaaaaagacaaagaaaaagagttgagatcggaaagaaggagaacgacgatcaagcctcacgatatttatgttccttcgagacctttggtataagcgaatcacatcttgtgcggcagaaatattgtaaatagtctgaatttcaaaataaattactatatatatatcacaatacatgtcggtctggtttagtaaagagaaccggtcgctgaatctggttcagctaaaagaaccggtctggtgtgtcagataagggccaattgggccattaacacattacggcccatataaatttaaattaacaaaccatgaaccgtcgtcggctcatcggaccagtgtggtatcaccggcacttgtaatcagagagactcactctcgagtttcgtcctctctacttcccgctcaaaatccttcggattcagccattgaaacaaccttgagaagagtttgaaag

SEQ ID NO: 5227 - DNA, 3000 bp, Unknown
  misc_feature (1)..( 3000): cDNA_ID_1828057_gDNA_ID_1620774_Annot_ID_50242 3000 nt of promoter + ATG
tcaaactgtgaatccagtcatggaagctgagatcaaatgtcccttttgtcaaagtgggtttgttgaagaaatggaagatgacgacgatcatgattcttctgatccggctgatgttagagcaaacaactctctttgggcgcctatcttgatggaacttatgaatgatcctgtgcgtcgtaggagaaaccagagtgttgagtctgttgaagataatcaaaacgaggtacagaccgagaacaatgaagacgatggagaaaatgatttggattggcagcttcaagagattctcaggagaaggagaagacattccgctgctgttttgcagttgcttcaggggatacgagcagggttgtctgtagaatctgagagtactggtaatggaggtaataatccgggacgggtgatcttgatcaatacctccaatcagactatcacggttcaaaactctgctgatatggattctgtacctgctggttctttaggtgactatttcattggtcctggatttgaaatgttgcttcaacgtctagctgagaatgatcccaacagatatggaacacctcctgctaaaaaagaagctgtcgaggctttggctactgtgaaaatcgaagagactctgcaatgttcggtttgtttagatgattttgagattggaactgaggcaaagctgatgccctgtacgcacaagtttcatagtgactgcttgttaccatggcttgagcttcacagttcatgcccggtttgcagatatcagttacctgcagatgaagccaagactgattcagtaacaacaacgagcgataacaatggaagcagtagtgcttctgctacaaccagccatggagctgagaacagcgatggaaaccggcgccaagaagaagaagaagaagaagaagaggaggaggaggaggagaacgagaacaatgacggaagcggattctcgatcccgtggccgtttagcaccttgttctcctcgtcgcaagatagcaatgcaccaacggattctagttaagacatgttccctgagcaacataagctttttggtgtgatcatgaaatctcggttctacctaaatctgatcttttgtctgtacataagtttctcagatttggttgaatgctacatctttggaaaacaaatatctttcagtttgtgtttttttaattgtttttgagcaaatcttttgccggattctgtaagtcgcttgtgtgttttttgttgtcaaccaaagccacttttgcaacttagtttgttaaattaatgccttaatggtaaaataacaagattggtggctgtagtacgaattgtgttggtaataaattataaatttaaacataaaaagtaatttaacattcatcacctttgttgtatgaaatggaattgtataatattgtatgcctaattacttagaccgactcgtttaatatgtcgtcatccaaaacaaaatatgatgtcttttactaaacttaatgaagtgatgctttttccttgtgttaatccatgattgcattaccatgtaatcttttgtttacgcgtaaacattaattagaatttataaaagctagagttcacatgtgtaaaatgcgaccaaagttaccaactttatgcgctattaacgaaccttttgacattaacgaacttaactttgatatagtatatatactaatatattaacgtttcaccaaatctccttgtatatatataagtattgtagtatcaacttattacattatctctcagattagtcataatccaaaagaagaagtaatgaatcgtcaggttttatccctaatcactttgattattctcttggtctccgcgtacaacacgactatgggccgaactctgccgagtaagtgaccgtctttgatcatacaaatacaatcacgcataaacaaaactcatattcagttcttaatctctttttttattattattataaattaaggggaaggaaatggagcacaacaatttgataatctaaaagctggtgtcagacgaagtgaatcggcacgtactcgtcagaaaggacccggacactgatgagtgatgatctctaacaagttttagttggcaccttcatgcaataattgataatctactgctttgtaataagtccgtcgttgtggcgattcatagtctctactcgattcatatttgtgaacgtgtcttgagttatagtcttacatatagatccaacaaaaaaacgtatgctaacacattctgtaatagaacacgtggcagacaaagagtggacggttccctaaaattccagtaaagaccgtaacattaaaatctaataagctgaattcccataattaccctcatccgacaaagagaggcaagggtagtttaggaaagtatatagaggtaataacgtgtccttaagctccacagatccaaagcgcagatcacaaatctcatccccagagagagaacccagagagcgatattgaaaatcaaaactctctcctttatatataatcccaatttacaaatctctttccctctctaaaaatttcttatctttgtataaaaagccttctcctttttcaaatcattcaccttcctttcgccttttcgggggaatttcttccaatctgttgggtttacgaaaccctagatttcgaaattccggattgctaactagcgaaaggtctgattttgtttcgtaccctttgttcctaatggattcaattccacggattttatctgaattgagtttcttcgtagttgcttgttacgaattggatctcatgttctgaagttgtgtgtttcatagcttttcgttgtttgattgtgaaacaatgtttctagatttcaattatcaaaactggtttttagataaccagatttggtcaatgaaattgtaaagcttgaaaacaattttgtttcgtggatgcttgttggtttggatcgacatgagtttctgttttgccctatttaagacgagatttatagctgatgtgtgtgtgtttacgttgattcttatgttagaga

SEQ ID NO: 5228 - DNA, 3000 bp, Unknown
  misc_feature (1)..( 3000): cDNA_ID_2992626_gDNA_ID_1620774_Annot_ID_50243 3000 nt of promoter + ATG
tattttcttataagcaactcgtgtccagactatttagcctctcttttaccttttgccctacttagtcatttggtaatcactccagggagcttacggagagaatgcatctcttgtttatccgcagggatacgggtatgctgcctttccttactcaccagcaacaagccctgctccacaacttggtggtgatggacagttgtatggtgctcagcagtaccagtatccttttcctctcacagccagtagtgggcctttcgcttcgtctgttcctgcctctactcagagcaagctctctacaaacaaagcagccaactctgcatctgctggtatccctaaaggaatgaatggatcagctcctgttaaaccattgaatcagagtgcactgtatggaaacagtgctcttggaggtggtcttgctgctggttatcaggaccccaggtatagctatgatgggttttacactcctgtgtcatggcacgatggctctaacttctcagatgtgcagaggtctgtttctggcagtggagttgcatcctcatattctaaggctaacaacaatgtacctgcgactaggaatcaaaactctagctccaattcgcattacacggtatgatatggaagtcagttttgtatgataagtcttcttctctatctgaatccctgtatctgatagcctcattctattcttggcagagtatgtaccagcctgcatccatgacaggttatgcagctcagggttactacgacagagtgtctccaaacaagtcatatggtcagtatggtagcacggtgaggtctggtatgggttatggttcttctggatatggttcaagaacaaatgaaagaggatggctcaatacagacaacaaatatagaagccggggaaggggtaacagttacttctatggaaatgagaacattgatggcttgaatgaactaaacaggggccctagagccaagggcacgaaggccacagaagaggttagctcagaggaggtgaaaaagcagacgtttgatgaatcaaatactgaggagactgtaacatgcgttcttccagatagagaagagtgcaacagagacgattttccagttgagtataaagatgctaagttctttatcatcaagtcgtacagtgaagatgatgtgcataagagcatcaaatataatgtatgggctagcaccccaaatggaaacaagaagcttgatgctgcatatcaagaggctcagcagaaatctagtggctgccctgtgtttctcttcttctcggtttgtacctaattcttagtttatttcatattgtgtattcgttttgtttcccgatgctgagtatataccccaattgtctccaggtcaacgcgagtggacaatttattggccttgcggaaatgaaaggaccagttgatttcaacaaaaatattgagtactggcaacaggataaatggactggctcatttcccctcaagtggcatattctgaaggatgttcccaacagtttgcttaagcatattactctagagtacaatgagaataaacctgttactaacagtagagacacacaagaggtaagtgtttatatcttctcgatctatatgtttctgatctaccagcaatattttccacttttcaatgttcaaactctttccatgtgatcatgtatgtaggttaagttggagcagggtttgaaggttgtaaagattttcaaggagcataacagcaagacatgcattttggatgatttctcgttctacgaggctcgacaaaagactattttggagaagaaagctaagcagcaacaatcccagaagcaggcaagagaagaaaacggttaattccatagatataagcagatgcatttacatttgtcctctctactctctagtattgaaatgcacccatatatctttaacaggtctgggaaggaaaaaccaatgatgagaaaccaggaactgttgattctaccatgtaaaatgcgtataaagatccctgcatacggtgggaagatgaagaagtagtgaaagataaaatcagggttgggtttgttttcgttttagcttagacagattttcatttttctttggtttctggttcggacatgactctgttgagtcttttcttaatttcttctagattttgctttcaatctgaaaatttagtatcttctttccttctccatttctcctctgtttccaagttttcaaaacctaaaaggctgattggacaaggataacacatccaattaaaatgttatgtttttgttaatactctataaacctttgtagttagaccattaatttttgtgtgaaactcgcataaaatgagttagttgcaacttgcaagagaaagatatcgattcgtgtcggatccacagtgacaggagtatcggagcttgagtcacggagctaggagggtatggacggaaactaggaaatcgttgaatctatatgcataatttcttaaaatatgaacaatgagtttatatatgttaacaaccatattaatttatacaggttttactacatcatttaaagtatgagggtaaatgagtatattttagacaattacaatttttgtaagaatcatctgcatttaaattcatctgattttattattattttggatgagtatgagtttggcaaaccatatggctaaaacatctagatgatgtctttgcatttcaatatggatttcttttaggctttagccttttgggccctaatgtaacaccaagtctgcgacaccatccaaaaaattaccgcgaaaaaaaaaaaaacttgcgagagagatattgattcgtgtcggatttgacgtggcaggagtatctatcatctatctcgtaattacgtgattaacttagaatctgtttctttcttcacccaccaaaagtagcaaacctttgccacctaaaaatcttaccagttgggtgaaagttgccaaaatagagcttgcttttgtcgcaatcctatatttttcagattgattgttggtgggtttgtgtaaatg

SEQ ID NO: 5229 - DNA, 3000 bp, Unknown
  misc_feature (1)..( 3000): cDNA_ID_1828053_gDNA_ID_1620774_Annot_ID_50244 3000 nt of promoter + ATG
caactccaccagagagctttgcaattctctcattgagtttctccttctcgtaatcttgctccgcttgctgcacaaaccaattaccattgcaatgtaactacactatccacaaaaagtaaaagaggtcccatatatgctatactcttttactatacctcaataagatttttaatctgtgtaacacgctttttcactgcatcctgtgtgcttccatcacccactatggtcgaggtctcctttgtgaggacaacctttgaagcattaccaagaacctcttttccagctttgtcaagtgaaagaccaacttcctcacggatcacagttgctgcaagcgaagatagaaaattaggacaagataaaaactacaaatatatgcgtaaacatagggctcatcaatgcagacagaacttacctccagttagaatggcaatatcatcaaggtattggctcttgcgctctccaaaccctggagctctgagagctgctatcttcagtgtacctctaagcttgtttacaacaagagtcgctaaagcttcttgttcaatgtcttcagcaataattaatattgggtatccgcctctaattgcatcctccaaaacaccaacaagatcccttgcattggtaattttcttgtcaacgagaagtaactgcaatcataccaaaacattaaagatcgttgttatactcatatataaatatctttagtggctaaatagtctgccaacaaaattcatcttctactcagattcaagaaacatctaccttgcaattgtcgaactcgacggacattttctcgctgtctgtcacaaagtaaggagagatataaccacggtcaaattgcattccttctacgacgtagaggttgttctcggcacttttaccctcctcaagggtcaccacacctttcctgcccactttgctcattgcttcagcaatcatatttccaatttcgtcgttgttacccgcactaacagctgcaacatctgcaagttcactgtcttcaacctacatcgacatgacttacattcagaaccttttgaaaaagactcttaacatattaaaagaaagagagttctataaatttgaaacctccttagacattttcttgagctcggtaaccaaagcctttgctgtcttctcaatacctctggtgatcaaaacagggtttgcaccagcagctaccacctgaataagataatcttaaaattagtacaaaagtttttgaagtttcacatagagaaagctgaaagaagaatgttacacagaccttgacaccctcagcgataaaaccttgtgcaagaacaacagatgttgttgtaccgtcaccagccaagtcattggttttggcagccgcttgcctcacaagcttagcgccaatgttctcaaccgggtcttccaactcaacctacaggagaaagtttgaaactctaagactcagttgaatgagaacaaaaatcattatcagaggggtaataattccatacctctcttgcaacagtcacaccatcattaacaattcgtggtgatccatacttgctctcaagaacaacatttcgtcctttgggtccaagtgtaacaccaacaagatctgcgagcttgttgacaccagcctagtacaacacaaaattagaaaccacagaaaatgtaaacctttagctccggtttgggaatgaagtttccattaactttttttaaaaaagatacttacttgaagtctcctaatggtagtcccatctttgttgaaatgtaattcctttgctgcgcacacaattgcagaactggatcttctgggtctaggacacacactttgtctccttccaaatgagcttgaagacaacttgctgataagtttcttatcagatttgtgaccattcggagcaaccattgaaccaatagaagatgtggcagtgaaagttgacgccattttatccacttcaaagacagacaaaattcagcacttagataagatttcaaagatataaaaaagactcttcttttcatctatatacggttaacacaatcaatataacagaaagaaacaacaacccagtaagctaaagtaataaattttcacaacaaaccagaagaaaggcgacaccttcgaaagcagagctcaataagaacacaattgacaatctgaagaaacactaatccataaattttattacaaaacacccaaaatcatggaagtaatgaactaatacaagttttcaaaagcttacaacaaattcttatccaaacaaaacatacacacataaactgtggcactaaaaaatgcagaggataaactattccaagagtaaggattaagaaactaacagaagtagagagatgacgaaggaggttttatcaccggaagtttttggtttccggataagaaaaggggagctgaagcaaggaaaggaagtaggtttatctccttactctcgcttggaaggtgcttttaacgttcccttacctctttcaagctttgagttaatcttggccgttggattcaactcttcggatcctggatcagatttatattgggcctatttgggcctttattcttgctccttaattcctaacaatggaattggaatcagtgatatttattttaaaaattgattttttcccgattaattgcgaaattttcgaggaaataatatttatagtattattttgtgagatatttcgtagtgactagtataatattaatgtggctggaataaaggaagtattttaaaaaaaaaacgatggagaaaaaggtaaacaaaaataatagaaaaatataaaaaagggatcttggaggtatttgaatcaaatcgaggtgaacgaacaaaaccacttttgcctcttcctcttcttctctcttctcttgcggctacgattcaatctcttaaaccctagattccttctgagttcttttttgctctgatatttgtgtttgtctcaaactcttattgttcaatatccgacaaggatctattatcagtcttcgctgccaactctgttctcatg

SEQ ID NO: 5230 - DNA, 3000 bp, Unknown
  misc_feature (1)..( 3000): cDNA_ID_3076276_gDNA_ID_1620774_Annot_ID_167642 3000 nt of promoter + ATG
acgaggaatgacgtgtgggatggagaagatcttgaaggagtgcctgaagaacctgatgaagatatcgagccatttgtgaggattgatgtggagacaattcatcatttcagtcatgaacattatctgaagctccaagaaaagaaaaccatttgcgagaaagacaagtattgtgttgcatgcacgattccaattataatctctcggagattttatggttgtatggagtgtgattttgtactcgacgaagcatgtgcttctcttcctcgcaaaaaatacctcccaatacataaacacccacttaccctccaccccttcccgattggtgggatctccaggttcgattttaatacagttgctgccaaagacatattcaaatgtaaagcttgctaccgattaagttgtggtttcgtgtacaaatgcggtgaggaatattgtgagtttcaaatagacgtcagatgcgcttcccttccagatcctttaattcatggctgtcatccacatgatctcttcttcaacttgacccatggttattgcattgggtgtagaccacgaaccgacttgaccaaggcacgtatgctcagctcacatgggccgggcctttgttcatcctatgcagtagaatgtattaagtgcgacgactcctttttgggtatgacatgtgctagttttccttgtgaggcctactacaagcacgataggcatctactcacactttgctacggtgacgaaaaagatacaacaagtggtcaatattggtgtgagatatgtgaatcagaattaaatgcagatgactggttttatacatgtgactcttgtatgatcactttacatatcgattgtttacttggaaaagatatgtacatgaagcccggccatatattcgaaataggtgatgatggtgatgaagttgaaattgttcacaatgatggtaactctcggctgatttgctctgaatgtaatcttcattgtgcacaggcttgggcattcaagatgatacgtggatacaaatggtattgcactcttaattgtatgggaaaaggtcttggccttggacgtctcaattgaaggtagccaagacattgtgatcagcgcatcttatgtgtttcagggctttcgtcgaatacacgtttcttagggtttaatcttttggtgttaaattttatttttgttttcttttttttcttttgtgttgatgaaaatgaaaatgataaaattctgttctcgttttggttttggagtctatcaagatcactttgctgttattatatctttaggtgttatataagtagagtccttatagagacgttgtcattcattcttgctttttccacaccacatactttactatagtccaagtcatggcggatgtgataaagttgtgggagacatttgtgagggagagtcggatagattctcgaaattaacgggagaagttaatgtaacgtataacagttctcaactatgtgataagtacacaaaaaattattcatattggttgactattatgatcatatatcaactaaattaaacagctgtaaatgtacacaaatagccacgaagtagtgaggctaatgcagggatcaagttttgtctactttaaaaaacaataataataatccgattgtttaatcatctatatatccaaatgaatcggtttcttatacaactgtttgtcttattaaaacaatcctcattagttagcagctctgattatggtttaatgcatgctattgataaaaaaaaatataaattcacctttttttttttgtagacatttttaaaaaattcaccttatgatggcttgagtttacatttttttttctttgtcgtacttgagtttacattttacaaattaaaattttcgttaatttcctctatggtcaagaagaaaaggtaaaaaaaaaaaagactaagatatttataaattttgcatcaaggaagtgctgtagaaaataagaattccttttgtggaaaaaaattgcaaactttttttaatctatatattgtcgtttttttttcttctttggctttctatatattttttgtttttttttttgtattccaacttaaaaagttgtttatcagttaggctaattctaatattggctagtttattgtataaacataaaaaggaaagttttggtctttgttttattttagtgttagtctttgtttttctttttttgaggcgttggtctttgtctttcgtctatatatgatttactaagaaaacaacatgttcttaattaactgcacagctggacctagattgtcacattctattaagaaagtaattagaaaaaaaaagaggagagttagtcttattaaccgctagttgattaattagatatagtagctaacaaatgcttgtggttcttctggcttaacaaaatttaataataaccaatcatttataattcttaaagttcctttaattatgtaggattcataatcgtgcttaggttatggctggctcgaagcctgaactagttttttattcactacagctggactaaggtcatcatctccattggtgagatatttcaaaagtttctaaaaaaaaaaaaatgatattttattatgatttagcttctgtccaattataaacacacatatacacatagtctctcaatcattactctaaagtttttctgcagaaaaactattctcaatctctcttctatctctcacctactttattattattttatattttttagttaatgagaaactatatgagagactactgatagagatgctaagagagatagatagagagagagaacaagagacttgaatagttgactttatacattggaactggtctttaactctgggcagatgttataaaaggacatatttgggagcagacagatgtatgagctaaaacctgatttttactatctgatttgcttcttctttcattccaaagaaacccgatatggaaccacaccctctttattttgtgccacctccttatttaactagaactaaacctcc

SEQ ID NO: 5231 - DNA, 3000 bp, Unknown
  misc_feature (1)..( 3000): cDNA_ID_1807133_gDNA_ID_1620774_Annot_ID_167639 3000 nt of promoter + ATG
agtactcatcgaagcttatcaccgtttcatgcagaatttgactttttgctatgggcaatagatgcatgatctctattagcaatacttctggtacttttgcttcagattgttcagacctaatttctatcattgacaaccaagacgattagccgacattcgcagcggaattggcttcctatcgatctttagtttgtttttttcttcttttcatattagatttcttcttcgtagttttactgttcgagatgattgtttagctaaaaaagctcgggatcgaaaaagtcttttctcccatgaaagcacatcggttcctgaatggctttctctagcggagagtttattaccgattacttaaataaaatagtgtttgtgggggggaaaaaaaattagtctcctacatttattgaaatttctttacttaattagatcgccaaatttatgaacttgtttaggtcaataatttcgatggtaaaaactaaaatcataagacaaaagaaactcaaacctttttatatgatttaacttatagaataacttgttacatatgatatgtttgtatgaaagaaagaaaagagaaccgagaaaaataagagaatgaaaagatgaaagaacagagaacaatttcaaagatatcttatatagtagagaagttaatggataacttggttttattaaaatgtcgaatgcaacatttctaatattctagttaggctgcctatgtgtttaacttcatgcctttcatgacatttcatctcagtacttggagtttactattcaagcttcgtttgcaaacgcacattcaaaacatcataagatttctcgaagatactacacagtagccatacataaaacaattcgttctacaaaccagatcgaataacatgtgtgaaatagattcatctgcagtacctttttaacgcggctagctatcaggaaacagagtgcttcacttgtatataaaaaaaagaggttcaagcagaaatacaaggcatcgtaaaacccgatatggtctaaaagatataactaagcaagtttgcatatgtcctcgtactcaatggacttgatgactcttccatcatagacacctttctcgatctgcactttagcacagaacttctctgtatccacacccaacaaccttgcattcgaaccacgatatgccccattcactatcttcaccatccctccaatttgtggaagcacagtctctagctccttttgatcaactctcaacacatgtttagaatcaagcattttgatctccccaacataattatcaatcactttcttcacaacacctttttgcttataataccctttctctgccaaagccttactcatcaccttcacaatgatcccttcgaacaaccagtaatctttccgattcatcctctccttcttcttctcttcctccttcatcaactcatccaaagctgatctcctctccttctcgctcctcccggagtccccacttctcttcctcttctcccctctctcaaccttgtcattctcttcatccccaaacaaaagtttcgagctttcccctctctctttacccgtagcaacctgtttaacacctccaccaagagcaaatccaaccttgaccccactcttcaacctcaagtcttcatctttcttcctctcatcatcaccatcatccacaacttcatcattaccactggtttcaccttcaccaccaccaccattcaatttctcagcagctctctcaatctgtctctgaatctccctctcttgcttctcctcctcagctaaatcactcttaactctcttattcttcaacctctccttaaacaaagtctcagaatctctatctatataagtaataaaccaacctttaggagtttcttcaaccttacacttaccagttttcccaagatgcttgataaactccgtcaacgtcgcccactccgtcgaattcatgtgaacatgatgtctatcgttaatatactcattgtagacaacagtggcagcgatacgagagaaacggtggctccgcctcatcagatcgagaaacgtctgctcgaattcttcagagtaaccatcgacaacacgagtcggattctgcccaaaaacttgcatctgcctctggtgagattcgctcatacaatgacacttgaatccattctcgtctcggcattgtttctgacacatctgacaataccatcgaagcttttgaagtcctttggctttaattcgattcgcaatcgcctttggggttagaaaatcgttcttacccatcgaatcttcttgggtttgtcgaacaaaattaaggtgttgggaattgaaatctagggtttctcaggtaacaaccactgatcgagaatgatgaagattcaatcggcgaagattagctaatatattgattgatgataaaccgaaactcataccaaatataattgtttatcctgaataccgaatacgacccatcaattaaagcccatacaatactgggcctataagaaaagaaatgtaaattgtggggaaaaaaaaaggtaaatttacaactttataatatatgcctcaaataattttaacagcttgtttggtcttatatcttgtgatctttgactttcagtctttcacaatggaaattattgaatcttgcatttttattgaattaatttcctatttgtaacagaatactattattagagatatattgattgagaatcgtaaaagataatgtagttgtgtgacaagtgagattcaagaaaagtcaactatatacaacgagagtagcaaaaaagaaataaattcaaatgatttggaaaattgaagaggggaccaattcttgggggtaaggagtagactcgtcgccagagctgactttgaaaacttgacttggtctcattcttctcatctactgcaaaaaccacaatcagtatataacaacaacacatgagtgacttaattctcatagaccaatacagagatacaaagcaatagaacaacaagaacaagaaaacagagaaaaaaaca

SEQ ID NO: 5232 - DNA, 3000 bp, Unknown
  misc_feature (1)..( 3000): cDNA_ID_1025895_gDNA_ID_1620774_Annot_ID_167635 3000 nt of promoter + ATG
tgtatggctactgtgtagtatcttcgagaaatcttatgatgttttgaatgtgcgtttgcaaacgaagcttgaatagtaaactccaagtactgagatgaaatgtcatgaaaggcatgaagttaaacacataggcagcctaactagaatattagaaatgttgcattcgacattttaataaaaccaagttatccattaacttctctactatataagatatctttgaaattgttctctgttctttcatcttttcattctcttatttttctcggttctcttttctttctttcatacaaacatatcatatgtaacaagttattctataagttaaatcatataaaaaggtttgagtttcttttgtcttatgattttagtttttaccatcgaaattattgacctaaacaagttcataaatttggcgatctaattaagtaaagaaatttcaataaatgtaggagactaattttttttcccccccacaaacactattttatttaagtaatcggtaataaactctccgctagagaaagccattcaggaaccgatgtgctttcatgggagaaaagactttttcgatcccgagcttttttagctaaacaatcatctcgaacagtaaaactacgaagaagaaatctaatatgaaaagaagaaaaaaacaaactaaagatcgataggaagccaattccgctgcgaatgtcggctaatcgtcttggttgtcaatgatagaaattaggtctgaacaatctgaagcaaaagtaccagaagtattgctaatagagatcatgcatctattgcccatagcaaaaagtcaaattctgcatgaaacggtgataagcttcgatgagtactcttgatgccaagatggaggagtaagtcttgtccaacaaggactcatccaacatgccaagtagcatcaagttgacattcagggagctgggttagcgggatttgagaagaacttaggggaggaattgagcgtatgggtgcatcttctgctagagttgcttgtttccaaacatctgcctcttgaagagccaaagttaaagtttcaacaagaggttttctaaagttctagaagcgatttctactttttcagatataccaaagtatccatggaaagagttccaacacttcttctccgattccaaattcccggccacgccaaaaaagaaatcgaaattatagaaaagggactttctaggaaaaatattctgtgaggtaggaatatgcgataatgctcaaatctgtctcgagggtggacaatgaaactggagatggttgatagtctcttctgtttaatctgcatcgggggcaacctttatatgtacccttgtgacgatatgtcaatctttgacaagtggctaaacaaccagagatacattgccacgcgaaatgcataagtttccgcgtagttttaagcttccatacttgtgcttgaagtgctgaaacacctggtccctgaaaaggggggtcacaagtaggacgagacatgtcacgtgcggcccaatatcctgacttaacagtacaattaccggatttagtataagaccagctataaccatcactcaagtagataccgtttggacgaatctctgaaatgaggtgaaatatcaacggggtcgatcaatgcttggagacggtctagtttccacaaattttgtgttttggtcgattaaacatttacatagagtaggggatctcttatgttaagaatgctcgtcgcggaccgcacaaggatggtgggaatccatggatcttctcatacacgggtcagcattcccgaacctatggtcctccgaagtcccgagacaagaagaggtttggcagctatgatgcttctccatccaacagacggacgatttgaggctcctatatgtaatggatcactatatcgaaagtatctccccctcaagaccctactcaagagagagtttggtacccagataagacgctaccgttatttagctaaaagagctagattaaattcttctagcgttctaaagtcaagatcgccctcaaagtgtggattacaaagcttatctcatacaatccagtggataccattactattttcattagttttttaccagaaatttgcaataacactattcaactttgagcaaatagccttaaaaaatagaatgcacaacataacatatgtcggaagggcttgtgctatagattttataagaacctctttaccttctttggacaagaatttggctgaccaagtattaagtcttgaaacttatctctcacaaataagaaaatttgggtttaaaataggaaaaaacttgggttttaggtaggagaaaacttgaccaagtatcgaccactgttctcataataaatgtaggagactgcaaacaacaaaaacagtggcaactaattaattgggcaggactaggaggcaaatccacaagtctttaaaaagcaattcctttaggtaggcactgaaaaagcaaacctttttttttttcttctttccggttggtccactgttatataaagcttggttggttcttgacttggttgtcaaaatcctaaatcccaaataaacaaacagagaaaaaagggagaaatatttaacaacagtaggagtctacaagtccacggcttgatcaatttgttcttcatctatttccttattctcagggaaatccagggtttttgaattcgtactctctctctcgttgtccctctcaaatcagaaaagtatctgccttttttaaaattcattccccttcgatctttgctttttcatcgctgattgttcttaaaaggaatctctactttttcaataagcattaacattgtccgtttcctcatctttggttcttcgattctcttaaagaggattttatacttgattctgttgaagccctttttctggggttttgtctgcgtttgtttccttcttctaatccagaattaaaactagctctctgcgctcaaagttttaagttttattcaaagaggtgtaagcaaattctccaattgatg

SEQ ID NO: 5233 - DNA, 3000 bp, Unknown
  misc_feature (1)..( 3000): cDNA_ID_2993779_gDNA_ID_1620774_Annot_ID_167632 3000 nt of promoter + ATG
catttggggtgctagcccatacattatatttgatgctcttatgcacatcatcttcactgtacgacttgatgataaagaacttagcatctttatactcaactggaaaatcgtctctgttgcactcttctctatctggaagaacgcatgttacagtctcctcagtatttgattcatcaaacgtctgctttttcacctcctctgagctaacctcttctgtggccttcgtgcccttggctctagggcccctgtttagttcattcaagccatcaatgttctcatttccatagaagtaactgttaccccttccccggcttctatatttgttgtctgtattgagccatcctctttcatttgttcttgaaccatatccagaagaaccataacccataccagacctcaccgtgctaccatactgaccatatgacttgtttggagacactctgtcgtagtaaccctgagctgcataacctgtcatggatgcaggctggtacatactctgccaagaatagaatgaggctatcagatacagggattcagatagagaagaagacttatcatacaaaactgacttccatatcataccgtgtaatgcgaattggagctagagttttgattcctagtcgcaggtacattgttgttagccttagaatatgaggatgcaactccactgccagaaacagacctctgcacatctgagaagttagagccatcgtgccatgacacaggagtgtaaaacccatcatagctatacctggggtcctgataaccagcagcaagaccacctccaagagcactgtttccatacagtgcactctgattcaatggtttaacaggagctgatccattcattcctttagggataccagcagatgcagagttggctgctttgtttgtagagagcttgctctgagtagaggcaggaacagacgaagcgaaaggcccactactggctgtgagaggaaaaggatactggtactgctgagcaccatacaactgtccatcaccaccaagttgtggagcagggcttgttgctggtgagtaaggaaaggcagcatacccgtatccctgcggataaacaagagatgcattctctccgtaagctccctggagtgattaccaaatgactaagtagggcaaaaggtaaaagagaggctaaatagtctggacacgagttgcttataagaaaatattaacgcacgtactgatgtcatatcaacactctcggaattggtataacctgtgtagtcactcccataacctgaaagattatacaaacggttgtgttatagatattacaataattctagacagtagaaggctgaagatatataaatgaaacttaattatcaccataatagtagggctgctgatacacattaggaacatagaaaacagaaggatccaaggcatcactgggtagcataggtgacaaagatcgatcaaaagaaggaacttgaccattcgaatccatagctccatactggtaaacacccgtctgcaaagataatgatgctatgagaactctgcttggagtaacaaaatgtgcagagacattaaaagatgtaactttaccttcttagtaggctcagggatctccaaagtcctagactttgaatctaaagacagtttcttcaatacatcagcagcttctgaaaaaacaatgtaagtgaaggaaacaaataggtttctatcttcagcaagactaaaaaattgatttttctaatcaatttattcactttgctagctacaggaacagtcaaattcatcgagctaaaacaaacagaacaaatggaaatgacatcatttcactatatgaatcgaattacgatgaagcaactagattcatgaacgtagatcacaaaagaaatgaaggagaaaagaaacaaaggcaaaggatacgatcagcaggaggagcaacagtagacatgagaacagagttggcagcgaagactgataatagatccttgtcggatattgaacaataagagtttgagacaaacacaaatatcagagcaaaaaagaactcagaaggaatctagggtttaagagattgaatcgtagccgcaagagaagagagaagaagaggaagaggcaaaagtggttttgttcgttcacctcgatttgattcaaatacctccaagatcccttttttatatttttctattatttttgtttacctttttctccatcgttttttttttaaaatacttcctttattccagccacattaatattatactagtcactacgaaatatctcacaaaataatactataaatattatttcctcgaaaatttcgcaattaatcgggaaaaaatcaatttttaaaataaatatcactgattccaattccattgttaggaattaaggagcaagaataaaggcccaaataggcccaatataaatctgatccaggatccgaagagttgaatccaacggccaagattaactcaaagcttgaaagaggtaagggaacgttaaaagcaccttccaagcgagagtaaggagataaacctacttcctttccttgcttcagctccccttttcttatccggaaaccaaaaacttccggtgataaaacctccttcgtcatctctctacttctgttagtttcttaatccttactcttggaatagtttatcctctgcattttttagtgccacagtttatgtgtgtatgttttgtttggataagaatttgttgtaagcttttgaaaacttgtattagttcattacttccatgattttgggtgttttgtaataaaatttatggattagtgtttcttcagattgtcaattgtgttcttattgagctctgctttcgaaggtgtcgcctttcttctggtttgttgtgaaaatttattactttagcttactgggttgttgtttctttctgttatattgattgtgttaaccgtatatagatgaaaagaagagtcttttttatatctttgaaatcttatctaagtgctgaattttgtctgtctttgaagtggataaa

SEQ ID NO: 5234 - DNA, 3000 bp, Unknown; identical to SEQ ID NO: 5228
  misc_feature (1)..( 3000): cDNA_ID_2992626_gDNA_ID_1620774_Annot_ID_167630 3000 nt of promoter + ATG

SEQ ID NO: 5235 - DNA, 3000 bp, Unknown; identical to SEQ ID NO: 5227
  misc_feature (1)..( 3000): cDNA_ID_1828057_gDNA_ID_1620774_Annot_ID_167629 3000 nt of promoter + ATG

SEQ ID NO: 5236 - DNA, 3000 bp, Unknown; identical to SEQ ID NO: 5225
  misc_feature (1)..( 3000): cDNA_ID_1828079_gDNA_ID_1620774_Annot_ID_167617 3000 nt of promoter + ATG

SEQ ID NO: 5237 - DNA, 3000 bp, Unknown; identical to SEQ ID NO: 5233
  misc_feature (1)..( 3000): cDNA_ID_2993779_gDNA_ID_1620774_Annot_ID_50245 3000 nt of promoter + ATG

SEQ ID NO: 5238 - DNA, 3000 bp, Unknown; identical to SEQ ID NO: 5231
  misc_feature (1)..( 3000): cDNA_ID_1807133_gDNA_ID_1620774_Annot_ID_50248 3000 nt of promoter + ATG

SEQ ID NO: 5239 - DNA, 3000 bp, Unknown
  misc_feature (1)..( 3000): cDNA_ID_1828046_gDNA_ID_1620774_Annot_ID_50249 3000 nt of promoter + ATG
tagttgtgtgacaagtgagattcaagaaaagtcaactatatacaacgagagtagcaaaaaagaaataaattcaaatgatttggaaaattgaagaggggaccaattcttgggggtaaggagtagactcgtcgccagagctgactttgaaaacttgacttggtctcattcttctcatctactgcaaaaaccacaatcagtatataacaacaacacatgagtgacttaattctcatagaccaatacagagatacaaagcaatagaacaacaagaacaagaaaacagagaaaaaaacaatggctgccttgtcggataagttagcggatgcttaccagaacgcaaggccgagatatccgatcgattggttcacgaaacttgctgctcgaaccggtcagcacaaatcagcttgggatgttggtactggcaacggtcaagcagctattggtgtaagcttcttccatcttgttccaaaagtttccactttcttatgtactctgcttcacttagatctctcaaacgatgtcgttttaatccctctagaagaacacaattatggatttattagctttagttgagaggagagaagaagatgaatggcttctttctaatgagtttatgatttaattagagcatagatttatctcaatcgatactattaacgtctaatgttagtgatgattatgaatgaagtaccaattattaacattttcacattttgagaacatgatttctcttgttttattttgagaaaataaaagttactaatctacctcatttataattattaaacaaaaaatttgtttggttcaaatttgtaatggtatttgtcattgtactattcacctaaaatgttaatcaacatttaccatggtttaatttaattgcagcttgcagagtatttcgagaaagttacagcaaccgacataaacgaagcacagttaaaacgagcggtaaaacacgaaagaatcagttaccatcacactcccacaacaatgtccgaagaccaaatggttgctctagtcggcggagataactccgttgatctaatcgtggcagcacaagccgttcactacttcgatctcgcaccattctacaacgtagcaaaacgtgttcttcgcaaagaaggaggattaatcgcagtttttgtctacaacgacataatcatctctcctgaagttgattccatcatgaaacgtcttgtggactccacgttcccgtttagaactcctgtaatgaatcttgctttcgacggttataaaacgttgccgtttccgtttgaaagtatagggatgggatcagaagggaagcctataatgcttgacattcctcataagctatcgcttaaagggtttatcggtttcttgagatcgtggcagcccgcaatgaaagctaaagaacgtggagttgagcttgtgactgaagatttgatctccaaatttgaagatgcttggggtgatgatgatgatgttaaagatattttctacaaagctcatatgattgttggaaaactttcggtaaataattcatttacttaattaatatctatatagttttggtataaatgaatcattcgttatttatatataatgcaggcttcagatatagagcggcatcgaaagagatttgatacgaactgcgtagttacaacactaaaggatcataacaactcggctgttattgcttcaggtttgttttctgaaatcttttcattgtttttatctccaatttaaacaatgtcaatcgaattaaccaaattgggttgtgttgtgttgttaaattatagtgactgctgctgcatttgctggagtggcggcttactgtgcttactctgcaaggaagaacagttagatcctttgaaggacaaagaaacggttttctgaatctagtgaatgaaatcttttttattttacatgttgacatgttgtcatgtatttatttatgtcattgatatgagatggttaagtaatatctaaagatttaagagtcacccaacactcttacattcatgactcaaggggataaaataaaagtacaagcatccacataataaagaaaatagattctcacaagtgttcttttgtttttcgctgagtacgcgcataaatagatgctcacacgttcttgggttttaagaaattatatattaagcccaacttgtacggctcaaaactctgtaatatagtcaaggacatgatcaatttcttataattagcatatgggcaacttacatctgggccatttgttgatacgtttcgcctaataccaaaacaactctaaactcaaattaaaagtcaaacctatgattagaatttagaagccttttgaaatttgatctaacgagtgaccaaaatttttagtgcttctaaattaaatctaggatttatgttacagagacttgattattggaggtaagttcaacggagatctccaaacattggtaaaattgtttgtcgtggtctcgtatattagggaatatagtaccttttatgaatggcatagatttttgtattgcgccattttatggaatatacgtacttttaaaatatactagatgagtacccgcactacgtgcgggtttatgtattactatttacaaattattttatataatgtctgttcatataaaataaagttgaatgcatcggttttaaaacataaatatgatttgtaattgtttttgaaaagtccaactatattagttcatctgaaaaacgaatgtgcttgagttgttttttattgttatcctagattctcagtttttttttaaaatttatatatccctatttttttgttatatgtttagattgtgagacggtgaaattttagaaaatatatttcttaaactaaaaatataacatgactttattaaccatgtctctgtatcttcaatctaatcatgtaggtgaattttaaaaaattattacaaatttgagttaaatagataacaaaatgtgaagttggaaagattggcgagtaagattccgaaaaagaagacgaagggg

SEQ ID NO: 5240 - DNA, 3000 bp, Unknown
  misc_feature (1)..( 3000): cDNA_ID_1829979_gDNA_ID_1620775_Annot_ID_50254 3000 nt of promoter + ATG
atatttgcaagaccattataactacttaactgacagtgtttgaaattggaaataacttttttttttcttttaaaaaacaaaattggaaataacaaaattggagaaggaaatattaaaccatataatatttgctatgtacaaatattatttataaaatattttatgtttttattatctcaatgatggtgaacatatgtcagatttttacattctgtcatatataattgtttttacaaaaccataggttaaaaaaaaccaatttttttcaacttcatgcttcttaggttaggctattaggttcttccttcaaaaatatttgcgggaagttgctctcaaatataggattgaagcatttttcatattcatgagtggatgaatccaaaaggtttcgagcctctagaggttttctgcatgttttcgttgggttgtcccatccgatgttcccattggtttattatactgtttttcttaaagttttgttaaattttattatgttctctccttgatttcttatattattagtgtaagtatcttccatatttagtatcgaggaatatattatctattttttttttggaaaaatttaaactgttttgtagatgaatatatcaaactatgttaaattttatgtattttccatatatgctaaaaaaaaattctcgtgcaaactgaattttatttaagaatttaagtctttacaaaaaaaggttttttagccacattagctgattttctgaatttgcttgaaactacgtgaacattgaagaagctacgtgatgtgctacactattacaattacggtttgtgaatataaagataattgattcaaattttgaaacccaaaaatctatatttagaagtaaactggcaatgttcgaacagaatagtcatgccgttgaccgctataaaaaaattttaaacagaatataattacatgtatattaagaagttcaaaaagaagctatttgattcatcttttttttaatatatttttaaaccaaaatattgatagaacaatagggaaaagctcgagtttaaatatgacctcgtgaatttgttttttgttgtgtttttgaattattgttaaattatattcaaaaaaagaaaaaaatgttttacagcttaatgaatacgatttcaaaaacaaattctaacaacacaattggaacttaagctcgtcttgtagcaaaccaaacttgaagatcctcttcatacttatggattcccctataccccgaattgtacttaaacgatttctcacatttttgtcgatcatcttgatctggtggttatggttgttcaccgtgtcttcttgcattcctctctctccaaattgagtgtaccgtattttgaaagatatataggagaatgtaaacttttgttttctcatgtacattatgttaaacttaaatatatattccatttatttttagtataaagtttttcaacaaaatcttgatgtaacaacatgagtactttagaatagatgaaaataaaactagcttataaaatacaaaatgtaaaaataatctaaaaatgatgtaaaacacaaaatataaaatacaaaacgtaaaaatgagacatcaatatattgttctgtgaactttatatatagattagttacaaataatctattgtaaatattttaagatagacaataaattaatactttttagtaaaacatacaactagttaataatctaacgaccaatataaatcaactgccaaaacaaaatatatgaaattatattttctcaaaagttaattggttgtcttaaaatgaagatgttgactctgagtctatgatattagtcaaaatgcattttaacttttatgtacattccttgtatactaaaatgtctaaaaacacggtattgaatttcatttattccgtattataaaaaattacaaaaaagcccttcaaaatatatggaaacaaaattgtaaaataactgtaaaaagtaaaattatggttttgagataccaatatatttttgtatgaaattttatccaaacaataaataaatattgtatttatttgttttaaaattatatatgatggaaaatgaatcaatatttgttgaaagttggcaaatggtagaaacctaacggctaagagaatacgacgacgcaaatgaactgttttgactaattttaggaaaaagataaaacggttctctttaacaaatttgtcgcgtttgaatacgacatcgttaaaaactatgttaaacattatatatatatactaaaaagttcaaaaaactataaaattttagttttctcatcctttttatctttaaattatcaatgatttgttgttgatagaccaataatagctcacactaaagtaatttaaattttgaacacacttaacctattatctgcacctaaactattttattctataagtagaatgctcgttccaacacctcatattgttcaaaatgctcgttcatttttagatcgtaattgtctaattattaatttataaaaattgacagctttccttttaaaaacaaaacaatacaggtttgactacaaatacacattttcgaacagatagatagagagagaaaaagaaacacaataaaacgcgcgtaaaaaggaaggctaatttagtctttttcgtcgtaactcccataacgagacaaaacaatcttaagtgttccctctcatcgtaaaagcttttctccttccttctatgtacagctgtaatggcaatatcgtaaataactcgtaacagaaagggcaattattgtcaacatttataatttaatttctcccaacttctcaaattccaccatttttcttcatcctctcctccataattgattttccttttttttgtttttccttcttgcaactaaaataaataaatttttagaaaccaaaaaaaaaattgtagagagagaaaaaaaaaactcagaggagagaaagagaagacgacgaagacgaccattttttttttttttgtcaagagagaagacggagacaacaatg

SEQ ID NO: 5241 - DNA, 3000 bp, Unknown
  misc_feature (1)..( 3000): cDNA_ID_1828151_gDNA_ID_1620775_Annot_ID_50256 3000 nt of promoter + ATG
gcagggaaatctaacgtctttacagttgtgaatcctccatctaccaccagattatgcccatttacatactttgaatcatcggaagcgagatacaccgctgcattagctacatcggttggttcacaaacctctccatttaacactcctgtactctgcactatctggatcagccttgagtcatcaacaccggggtaaatctgtcgcatctcatccatcacgaatgatgttgtgatcgcaaaaggagaaatgcagttgacccggatcctgtgcttgcatagttctgaagctgttgatcttacaattccgataacagcggattttgagacgctgtaagtatgttgggctaaaccgcccatcatccccgtgacactccctgcacaaatgatggatccagagttacgcgggatcatcacacgagcagcatgtttgattcctgccatgactccacggacatttgtgttgattacctgcagaacataagaaaaataagatcagataaaaccaaatgctccacacatttgttctttcacatgttcttatggatcattaccttgtcgaaaacattgagatcaagatcaacgatactaggaggcgttttgcagggaataccagcattgttgtacataatgtcgagctttgtatggagcgagacagcgaagtcaactgcgttagcaatgtctgattctttggtcacatcgcatgggaagtaagcacaactgggaccgagttcttgctcggtttctcgcccaatctgcggttggatatcggcaatgataactttggctccatgactgatgaattttccggctgttgctttgccaatcccacttgctcctccagtgatgagtgctactttaccttctagcttcctataacataacaactatagattaggtattagtatttggtaagactctcatatttgacatttcttagctggtggaaagagtaaaagctttctaacttcaagataagatttgtggaagaagacaaatcagagaaaccaacttgtaatagcaaattactttgtatatccctgtcattcacatataaacagaatacatatggcctttatcccaacttacaatgaatatttttattcagattttgagattaagatggtacttgccttgaagttgaatgagatgatgaggatgaggatattcccttgataaggaagttcttgctcacattcttgaataatgcgttttttctatttcatacatagaaaagaaaagttagaacaaaagagaggtcattgttaaatctgcagaaatggatcagaagtatatatagagaaggagcttgacccaatctgaaacatgtttgtgctagctatattgctccgagatatatatatagatcggtctttgtcgtttcctaacttataatttctcgtctttgaagagaatggtccctgtgtttgcgtcttatatagatatagagggaacataaaggtgtggtctttagagagggagagagaatctaatggggcggtgattgaacctgaagcatactagcatgcaagtgtttgtaaaaaaggcttgatccctttatcttttgctaatgaagacaaaaaaaggaacataaaagttcataagcatgtgttgatttcttcccaaaacaagattgtataatagccatataggctgaggttattgttgaactacatattttaattaatatattttttcttttggggtcataaatcattaatataaatctaaaatatgttatatcatggtattttattgcaatattaatatcattgaaaatttgaaatcaaagaaaggcctttcttttgttaaaagaagaaaaccttttaaaaaacctctattgcttgtggcatgcatgtgtgggtgtgcttattatgagctgtctactaatgaataatatttacgttttcaattcttatgttatacaacgtacctaccaataccatcttcataacccgacagaaagctaacaattaacattatgatatatattattcagtagacaaatgatatattatacagaaacattgcatacgaccaatttgatatctaatggtgttgattccaccaactaagatctatccttttgttggcatattaactttttatacaacatattacatattttcaaattggattagattatgacacgcatcaaatctagccaagaaaataaaacaaagattttcaacttagaatttcaaaatccaaagtaatgaaatgtgttcttagaacaagtgactcatatatcaacaattacaaaggtacacaatcctaataccatgtgttgctggtaaatctaaattaattaatatcgtaaagtaatgttataaaattacagttaaatattttaagtaagcaagttcacattcatgggatggaaaagaaaaccaaagtgttaccaatctttgacatgtcgataaattgtaacattcttaaatgttcatttgaccaaattctcaaagattcttcaccaaatcgcacacaaagagtagaaaaatagcaaagcatttatgaggtgtcgaataagtagtttggtttccttctagaagacataatatataatctttttttttcctgcaacataggtgaagaagattaaagggataagaacatagtggaaatactgagaagaaaatgaggtaagaattttcaagtcccaaaaaacaaaagataatagaggggcattccgagaattgaactcgggacctctcgcaccctaagcgagaatcataccactagaccaaatgccctatttgatgtatcgtttgacataattaaatatatatagtaactaaaatatcgtttcacggaactgagcttttcaaaaccattcgacacagctctgtactcgtctctctcccgccaatcacctcgactaaagcaccaatggaacctctagggtttcttctctgattccaaccgtatacgaatcgggagcttctagcgattccatttcttcttggacagcattgaaattcgagtttcgatggtcaatcttatg

SEQ ID NO: 5242 - DNA, 3000 bp, Unknown
  misc_feature (1)..( 3000): cDNA_ID_1828147_gDNA_ID_1620775_Annot_ID_50257 3000 nt of promoter + ATG
atatacttacactgttaaaattgataaaaaggaggctagaactataaccttcttctgctgcttgactgtttcatcatccagattctggctgaataagactcgaacatgtgccaagtttcttcgtttccttaagtctttccacacgaagtcacctattttaccaggtcctccaaggctcgtagtaagctccttctgaaggaataacctggggaaatctttattgcaagggctttcatgacttccgtcatatattttccttggagaagcatgatatgcaacattcaagtcaatgactcctgattggcaagaagaggcttgtcttgtcccacttaacgatcctcgtaagctgcttgacaaagtgttggtttcacttctgtctttaactaaactagcaccccaagatctcctaggtgggacgtgatgtctttgcataagacgtgatcttttggctctgggatgcctccattcacataagttgagaagacatgttttaacagagacgttagctctggttctctcttcattggtgaattttctcttcttcttagagtttctttccctgtgtggagcagcactaaacagaccattcaatttgtctctttcaggttcaccctcaatggtatcattgttccttctagaaagattactaacttgatccctcatttctgatacactcccaggaattgggtctgattcacaagcttcttctgtagtacagggagcatacactaaagcactcattgcttcagcagcaatttgagtgttaataccaatgtcaataaagtcttcctcgggttccaagggctcctttggcgccttatcctccaactgagcatccttctgtgagataaacataatgccctcactcaaacccgatgcttgttccatcttgagatgctttgcagaactgttcttcataactctttgtgtgggatgacttgagacttttctaatatcacacggatccctagatcgtttcttcactccaaaatcatcacctgcaacctgatcttctcttatcttggagcatgtaatacttgcacgagtgactggagaggttttagggtcactcacatcacactgatcactactccaatcaaagacactcattttcctggttggacttctgctcataattcttttggccagagattgacatccttttgcacctgatacaggagatgacttccttctgcaactattaaccgggagatcaactggagacaaatttagatctttgtccatcaaaaagtggtcaacaaaaccaagggcatctgcttgtgttgactctcctggttcttgagaatccaaaaaatcaagccctggaccatggctactagcagtaatccgcaatgaaccttggaaaccggtcactgtatcacaatttgattcttgcttgccttgaagaaagagatgtagtaagatttatctgagttaatacaaagaagaagatagaggcaacataacaacacaaggatatgtttacctgtttgacattcgtgatcatttgatccatcagactccaaaagtatatctccagctttcgggcttagctccggcaaacacatcggctcaccagcagcgacacttccatcttcatcatcactatcatccaccaccacttggtcgagaccgtaacattcctggttcagtgattcctcgtcaccacaatttccgttatctactagctccgtatcgtcgtagagcacttgaaatggggtttcaagtaacgagctattaagtactaatgcttcatcaatcgcctctgtatcttcaatttccccacatcccaaaatccgattaacctcaaaccctaagagaatccagaaatgaaattggtactacgaatctatcacctcaaaaatctacaattatcagcaagaaaaagaaaatgtaaatgaatcgtaatctcaaaactcactatgatccgaagaagctgaaggagactgcaaatcggaggcgaaatcttcggtttccataagattgaccatcgaaactcgaatttcaatgctgtccaagaagaaatggaatcgctagaagctcccgattcgtatacggttggaatcagagaagaaaccctagaggttccattggtgctttagtcgaggtgattggcgggagagagacgagtacagagctgtgtcgaatggttttgaaaagctcagttccgtgaaacgatattttagttactatatatatttaattatgtcaaacgatacatcaaatagggcatttggtctagtggtatgattctcgcttagggtgcgagaggtcccgagttcaattctcggaatgcccctctattatcttttgttttttgggacttgaaaattcttacctcattttcttctcagtatttccactatgttcttatccctttaatcttcttcacctatgttgcaggaaaaaaaaagattatatattatgtcttctagaaggaaaccaaactacttattcgacacctcataaatgctttgctatttttctactctttgtgtgcgatttggtgaagaatctttgagaatttggtcaaatgaacatttaagaatgttacaatttatcgacatgtcaaagattggtaacactttggttttcttttccatcccatgaatgtgaacttgcttacttaaaatatttaactgtaattttataacattactttacgatattaattaatttagatttaccagcaacacatggtattaggattgtgtacctttgtaattgttgatatatgagtcacttgttctaagaacacatttcattactttggattttgaaattctaagttgaaaatctttgttttattttcttggctagatttgatgcgtgtcataatctaatccaatttgaaaatatgtaatatgttgtataaaaagttaatatgccaacaaaaggatagatcttagttggtggaatcaacaccattagatatcaaattggtcgtatgcaatgtttctgtataatatatcatttgtctactgaataatatatatcata

SEQ ID NO: 5243 - DNA, 3000 bp, Unknown
  misc_feature (1)..( 3000): cDNA_ID_1828143_gDNA_ID_1620775_Annot_ID_50258 3000 nt of promoter + ATG
gtcctaaggtgaaaagtgactgtaaatctgtttatgaaactgatcaagacaaaagaatatcatttcttctaattgaattcacagcaggtgaaatcataagtcacaggagaacaaaggttcaagaggctgttgttttcagttttgcagaagaaacacaagtagtaaacaggatgagaaagctgtttgcagaagatggttttcaacaagccattgttgaagtttattgtgattctaagagtgagtctactctggtcaagatcatagtatgcttaagaagattaaagggggttgataccagcaggcaagtcataggagaaatgattgcagagttggtattcaaggttgttaggagtgaaaaagcttatcaagctgagaatatcactaaagtgacaacagggagaatgcttcaagcagataaggagcttttcaaagtatcacaatcctgagaagatctcagggaccaagatggaactcaaggaatctagaaaggtgaagtaaaggattcgacactacggcaaggtggagttttgtgaggttttgcctaaagtgtctaagagtatctaacccaagtagaaggtttcagccaaaaggaacaaaatcatgtctttatttaatttccagatgtaactcttctgaagaaagtggtgtcatggatcttcggctgttgattctaaggcactcttaatgtttgtttatatgtccataaatgttagtgagatcatattcttataaatgttattgcttccatcattttgtaggatggtttggtttttgatgatgatgatgatgatcaagaatttgacattatcaaggattttggttgttgataacaatgatgatgtttgtttggtattgaatctctggttgaatcataatgcagaggtttagaaaaactctcaagtggaaggtgttaactagggtctatgtaatgtggaagtcttatgttatctttgtttcccttttatgagtcatgagtaaatacagttttccttctaccaattctcatattatccgtctttctcctaaacagcaggatgtattggatagacaaactaaagagaaaaaattaacaacaaaactcaatccaaaatgtttagaaattttcaagaataatgaaccaagatgttttgagactcaaaaccaaagttaattacttgccgtaacacgaatcgtgttaaatatggatcatgaaattttctaaacttagattggtggacttacataatctgtttcttagattgcctgagttctaagctttaagtagtttccggaaagcctgtgactctgtgagtacaattccgtttatagtgctatttttatttgtttacaaaactatataatcgatttcatgtttgtaaaacctgaaaactccctttattaatataaagaaaatgagatgctcctagtctaagaactaatctaagaaacaaccaataatgatgttcttaaagagatacaaaagaaaaggaaaaaccctgaaaacactcacatgcacatgaaagtatgaaatgaaaccctattatggattcttgaagacttcctgcaagatccttttactcagcgtaccctttacaggaaacctagtggaatcaatagcgaagcaaatctcccgagtctttttgtgcctaaacatccaaatagtgagaaaatcaacatgtttctcgagcttataactcttcacgaaattcttccatcccgacgtcaaaacaggtgtgcccttaatccatatcttcaacaccatcttatgattctctccgtttggtccatacaccgaaacattaagccctttagtcccaagtttctctgtttttcccagagcatccatcatctttttcaccggctccttccctaacatgagcctgtattggttgtccttcacgtcgctatccatcaactgctttcacattggtttgctgcaagctcccatagcatctggatcacggacaatacttctcggaggattacttttcggcctagtgtctcccaaccgcgcatgcactctagggtttcttcggaattgtctacctcagcgacttttctcttcttacccttattttcatttgtttgcatacacgattttacttccaaatcatcctcacatacggattcttcatcatattcttcttcttcgtcttcttcttcttcttcttgatcaaagaaaacagggtttggtagtcgtaacaatactgacacagcctcaagttcgtctggagttacatcatccatctcctcaatctcttgttcgttagatcatgtacataggtgatatttatagaatatcacaagtccaaaaattatttttatattgataaaataattagaatgaccttgatcaatatcagtccagtgatgtttttgatataagtatcatctgacgtgacatcctcagattggtcgcatttgcgaaaagaaagaaaaatatatatatatatatatatattaaacaaacattataaataatattaaaattttcttaatgacttttatgaatatcacctatgaaagaagaaactgtttattttccttgatatagtttagtttttccattcttcaaacggttgcatagtttagttttttcattttatttttttcatcaatagtttagtttttccatgtatatctcaattatgaattaattcaatatatagtccaagtactaagactatgtccatcagtgtttctaatgggcttcttatctgaaatcctaaagaataaaagcccaaaattaaagaaaaacccaacaaaattattaggatcgatcctaattttaggttttttagaagtgtttagaaactcaaacgtggttgcttctaaggatgaaaatttaggcaaaacaaaaaaaaatcatgctccgcgtgtttttctttcctcttctcctatctcttttctttggttactctaacgacgaaatcaggcgatttgaatcgatttgataagaaactatggtgtatcgatcatgaaattgggagacagtctctttgctccaatctctttctcatg

SEQ ID NO: 5244 - DNA, 3000 bp, Unknown
  misc_feature (1)..( 3000): cDNA_ID_3076311_gDNA_ID_1620775_Annot_ID_167680 3000 nt of promoter + ATG
gtgaaccttgtattggtatacaaagatgtgaagagaggaggcacagaggcattgtgaacagtaacagtctctgtgaaattggaaagaaagtaagaaatcgcataaggcatctcgtcggatcctatgaatttacccgaaattccggatttccagtatctcattgatcttttccaaatgatgaactgtttgtcttcttcttgatccatctgaaaggtgaaatttccatgtgatggatcgttgaagcttctccatgatgataaagtcatattctcatccatcctcatccctgggagaaatgtatcagtaggattctgaaaactctgccaaaccacatttgcttcatttccatcactaatcaacacaagattaccattatccatcagctttaccattctctccgcagatactgaggaaggtttaacaccggtgtcccaatacactcttccctttgaatcaataacttcaagattcccatctttagagatggtgaaaatgcaggaacggtcaagaaccggagattcacgatttgcaacccagacaacagtcagtggatgtaaattgtaaaaccaaatccctaagtaccttctttcgtcggagcttccattaggagtgaagaagccaagctcaaatctctgaccagctgaaacaagagtctctccatggctgtcattgatcaatgttgaacctttgaacaatgttttggagtcttgaactgcaacaaaacaatctaatcgacgaatatgcagcaaaaacatatagaagaagacagaaagaatcattctctgaccagtactagcttttttttactcatctgatatctccattatttctgcttaagaactcaactcaaaacgtgtctaacgaaaaaagaaaaagtttgcctcaacgtcaacgaaagacccacctgaaaagtaaatatgtggaacgcagctaatcatgtgttttaagatgtttccaagaaaaagcagaacaagtctcacttgagcatctgaaccaaaagccatgaaagtagtagatactatttacactctcttagccactgtatgtagatacacatgtgaccaattcacgcactttgtgtcaactttttccgcgatggatctctaaatagttcaaaaagatccaacattttttgaataatacgtacttttagagtattttttgacaatgagagagacataggggtacctaaacgtgaattactggaaaaaggggacaatgatgttgaagaagtcaatcttttgtccttattggtgctttcgaagaagtggagattgaccctgcaaacattgttaaccaacttttttccgaaattattgtgagattcgaggagttttgacaaatgtaggacttttgtcgttcaaaagaaatgttttcatctaaaacgcgtaaacctgtaaaaggcagcttcagctctgattaaacaaagagacttgcaacaatgtcactatgagacattactgtttaaaaatagattcagaaacactaatcagttttcacactaaaacaactttgtcttctgccttgtttgtttattcctctggatgtttcatagatatacctttaacagggtatagcagtttcaagttcatagatgaaaccctttcgctcacaaatattgttttaaagccttctttatgagagttggattggttcaccacatagattctctaactcctcttccaggagtttatgcaactttgcttcagttcgccgatatatccacgcattagcatcacggtcccagtcaaatctagaagggccactgcaccgagacaaaaggaagaatgaagattacattaatgtgaatctaagatgtggaagcacaaagtcaagagcaacaacactatacagtcataaacagtttcatttctccaaatatcatgagtacaaaaatcagaagagagagcagaacatgataatccagatgcgaaattcaatctaggcgcctaaagttagcaactttcaaaaggcaagaaagaatctttacctcacaggtgaagacatccagatttgtcgatttggagtttgcttattcagtacataagtgcctaaagatccaagcttaagggtaagaacttcattctgttggaaacagccaaaaggactgactataataagtacacatagatttccagaaatatgaacaagatcttaaattgcttaaaagagtttaatccttaccccataatctatgtcgaaaccatcaatctgaacattatcaccataatcctgaacatgaatcatgcaagtagaacatagtgtaagctattgcaatctcaagtaaaacgaagaaccctagagagaaaaaggttccagcttcaaatacctcaattttctcaagaaggtgattaattgtgaagttggctaatttgtgaaactcttcctcctgcaaaaccgaactgtttttttcttccactttgttcatattctcatgaaattaacgattcagatacaataaaggagatcaaaatggagaatattaaagtacctgtaatcgacagaagcaggaccttgagaagagaagcttctggtagtcaaagaatcatggcggattcgagatcctattctccagaaggaatccaacggttctatggaatcttgaatcagattgcttgaaactcttacgccattgctacggagaagagttggagacagcttgagaaacctcggcaatttccgtagaagaaaccttgaagctgtagccatggcggttctgtcacaagaaacattcgacgcctctcttcttcttattccttcgttgtccaatttaggcccacaataaggcccaaatttagatttacccggttcacgtatttcccatgttccggtttactgaaaccggtatggttctcaagagatttgtcatttgtgtgcgaagaagagttttcttctcctctcataagaaaaaaccagaattttgaagaaggagaaagaaaaaaatctgggtttttgggagctgattaggttttgttccttcaatctctgggaattttcgct

SEQ ID NO: 5245 - DNA, 3000 bp, Unknown
  misc_feature (1)..( 3000): cDNA_ID_1387356_gDNA_ID_1620775_Annot_ID_167676 3000 nt of promoter + ATG
acggcgatcaaactcaatcttcttcttattcggttagggctcgtttcgagaaaatgataagaactgctcaagataaagtctgtgaagccattgaagcagtcgaagaaggtcctaaattcaaggaagatgtttggtctcgacccggtggaggtggtggaatcagtcgtattttgcaagacggaaatgtatgggagaaagctggagttaatgtctctgtgatttatggtgttatgcctcctgaagcttatagagctgctaaagctgccacgtctgagcaaaaacctggtccgattccgttctttgccgctggaaccagctcggtgagttctctctctctctctctatcagtcgacattgctgttgatatggtctctgagttctttgattgagcttgatcctacattctaggttttgcatcctcagaacccttttgctccgactctgcatttcaattaccgctatttcgagaccgatgctccaaagggtaagaccttaatcctctttgagaagtgtaaagttccaattttttggttggatgaagcatttgatttcatcacttgtagatgttcctggagctccgaggcaatggtggttcggtggtgggactgacttcacacctgcttacatctttgaagaagacgtcaagcactttcattcggtcgttaaacctgatccattgttctgaaagtttgaagctttgtgattatggagatgctgattgaaatatctttctttgtgtaggtttaaaagcaagcctgcgataaatttgatccgtcgttctacccttggtttaagaaatggtgtgatgactacttttacattaaggtctgcagttcctttaacgctattctgattgtttggtgagatcttagcactttgtggaactaaaagaccttagttttagagtcatgtatgtgcaagaatagatttagagcctcaaggttttgtttaggttgatacagtgataagttgtcgcctaggatttgaaaacactaaaaactttacggtcttgcctgcagcaccgtgatgagaggcgagggcttggagggatattttttgatgatttgaatgactatgatcaagagatgcttctgtcattcgccactggtagtgaccaagatataacttgtgacattttgttttaagaaacttcctagttgacttatttgaatactgagatgaattttgcagaatgtgcaagctcagtgataccagcttctatacccatagtagagaaacgtaaagacacaccatttaacgagcaacacaaggcatggcaacagctgcgaaggggcagatatgttgaattcaacttcgtaattggatactactagctttgtttttctttctgtataaatatctcttgaaacctcgtctcatgttttgttgctgatggtaaaaataaaggtgtatgaccgcggaacaacatttggtctgaagactggaggacgaatagagagtatccttgtctctcttccgctatctgcgagatgagaatatgaccatgtaaagtttcttgattcaagaaactaaatcttgtttcatcttagctaatgaaacttaactactgatggtgtttgtctcttgttgcggatgcagaaacctgaagaaggaactgaggaatggaaactattagatgcttgtatcaatccaaaagagtggctttagttaattaattgtggttatttccccaattagctcttttattagttttgtctttaaaagccttaaaagagtaaagagtctaatgaaaagtgagtgagataaagaaattgtaatttggcgtcatctcatcatgagtcactgacaaacaaagatcatgatggttgatgatggagtatatagtaccaatcgtgatgatgatgataaaagtaattaacttttaattttttttactgacacagtaaaaataagagccgttggctcaaatagccgagcctctcggtgcacgcacgcatgccacttgctcggtaactgttcactagacagaacacaacaacactcaaatagagtgataacattgaatctgatgatttggtttagtataaaaatcgtttccaagtttcaacgagtgggacttgtgttaggttaaacaatttcggattaagtaaacgtcactgtctcatttgtcttgatacaagaaacgcccgtgatattttttcttcgatgtcgtccaatggggacaaagaaacaatttagtccccggatatacacacacacacacaaataatacatgggtgttgttattatggcttaccttacacaacacaacttgccaatgtttttaaatttactaaaaaccaaagccagaagatattttattgccacaaattgacgtcacacctgcccatatctaatccatgtctgcaacacaaaaaacaaaaaattgaattcccccaaaaagtgaggagagagatgtaaagactgtgtaccaattcaatatctttttgagcagagtaaaaaaaaaagtttaaaaatttgagcttctgacacaaaaggagccaaatgtaatagctggatccaatccaatgcaatgaaaacatcttagctgtaaaatggtccaatctctctcttttctttctacattattacttccacagaatcaatttatctctcgaaaagcaataaagtctctatatttgtgctcaaagatagacagagaagcataaatacttgtcctctgtgtagtacaaaagtggagccccactgagtgatgccctcacagtaacggctacatttttcttttatctctctgtctctctcttcttttgagtgattttttatgaagatgggttcttttgtccacttattactgtcctgaatcacacgtcgaatcctacgtggcatctctctccattgtatgccagctcactctcactcactcactcacctcccgcctttataaagccttacctctctctcttgtctccttcattgagtcaagtgctcgagactgtagagtgaagtttgatttatttagagagataagttaaaaaaaaa

SEQ ID NO: 5246 - DNA, 3000 bp, Unknown
  misc_feature (1)..( 3000): cDNA_ID_2053079_gDNA_ID_1620775_Annot_ID_167675 3000 nt of promoter + ATG
tttaggtttatatgtcgttcgtccaggctctgtatggtggaggagggtggccactgtcggtattcctttcacctgatttaaagccgttgatgggtggaacctactttcctccaaatgacaattatggacgaccaggattcaaaactctccttaagtaagtaaaccctttttctcttattgtacaaaagcattctaggcttgtaatggtgcaataaaaaatagagtatgtatgtagaaacaaacgctcttggcgaagactatagttgattcgtttatgttctccatgttttctttgggtttggttcaggaaggtgaaagatgcgtggaacagtaagagggatactctagtgaagagtggtacatatgctatcgaagaactctctaaagctttatctgcaagtactggagccgataaattgtcagatgggatttctcgggaggctgtgagtacatgtgcaaaacaagtatgattcgactcgcggactctagaaaaatatatatgattgatacatcaacatgaaaaggtcttctaacagtgagtgtttgtgttaaagctttctcggagctatgattcggaattcggtgggtttggatctgcaccaaagttcccgaggcctgtcgagatccagctgatgctttatcattacaaaaagttgaaggaatcggggaaaactagtgaggctgatgaagagaaaagtatggttttattcagcttgcaaggcatggcaaatggagggatgcatgatcacattggaggcgggtttcatagatacagtgtcgatgaatgttggcatggtaaaacttcaaacagtatcctgtagtatcaaggtgatgaaaaatattttgagattgacgcattttttgctatttgtctggtgcagttccacattttgagaaaatgctgtatgatcaagggcaactagctaatgtgtacctcgacggttttagcattaccaaggacgttatgtattcttatgtggcaagagacatccttgattatcttagaagagacatgattgcacctgaaggtggaatattctcagctgaagatgccgatagctttgagttcgagggggcaaagagaaagaaagaaggagctttctatatatggacaagcgatgaggttcttttctctgatatatgatatattcatgagctgactctggtttccctctgcatactgacatttgttttgcgtgtgtgtttggtttcaagattgatgaagtcctcggggagaatgctgatcttttcaaggagcattattatgttaagaaatcaggtaactgcgatctttcgagcaggagtgacccgcacaatgaatttgctgggaagaacgtgctgatcgaaagaaatgagacgtctgctatggcatcaaagtttagcctctctgttgagaagtatcaggagatattaggtgaatgccgaagaaagcttttcgatgtcagattgaagcgacctaagccgcatctagatgataaggtaatactcttcttggaattctcatgttgtcttctctactgtttcttcagatttgttaaccatttaagatttctttcatagataatcgtgtcttggaacggtcttgttatctcgtctttcgcaagagcttccaagattcttaaggctgagcctgaaagcaccaaatattatttccctgtggtgaatagtcaggtaatgaatgctacaccctttcctttaatttcttctttgaccgttttgtaattagaagactcatttttcagccagaggattacatagaggttgcagagaaagcagctttgtttatcagaggaaatctctatgatgagcagtctcgcagattacaacacagttacagacaggggccatccaaagctcctgccttcttagacgattatgctttcttgatctctggtttactcgatctttacgagaatggaggtgggatcgaatggcttaagtgggcgattaaacttcaagaaacacaggcaagtgagatctttactagctcgatttgttaaagttcttgattttggctaaaaaagttaaaaacattttaggatgagttatatctggaccgagaaggaggagcatacttcaatactgaaggacaagacccatcggttcttcttcgtgtaaaagaagatcatgatggtgcagaaccttcagggaactctgtttctgctatcaatcttgtgaggttagcttccatagtcgccggagaaaaagctgaatcctacctcaacacggcacatcgtctcctggtaaacaaacaaacaactaatcccatttgctattcatagaaagagattattgagtctctttgttgttgtttttgcaggcagtctttgagttgaggttaagagaactggcggtggctgtgccattaatgtgctgctccgcagatatgatctctgttccgtcgaggaaacaagttgtattggttggttctaagtcttccccagagcttaccaacatgctttctgcagcacattcagtctatgatcctaataaaacggtaagagcttaaaaaattatccaaatttctagattcaagatttgtgacttttggtggttttactgagcaggtgattcacatagatccctctagttctgatgaaatcgagttttgggaagagcataacagtaatgtagctgagatggctaagaagaacagaaactcagagaaagtggtggctcttgtttgtcaacacttcacttgcagtcctcctgtctttgactcttcttctctcactcgcttgctttccaagtaaacaaagatcattccatgtttaatagttgcttgtactgtaaggaacagatcaacgttgttctctctgttacagtcttacagagtagataaataaagaagagaactaaaccgagtatgaggttttttggttgaactaaaccggaaataaccgggtttggtttggttaaaaaaacagagctttgacgattccttatcatcttctatcttcagcaaaaaggtgaaaacttggattcgatcgatcgctgaaa

SEQ ID NO: 5247 - DNA, 3000 bp, Unknown
  misc_feature (1)..( 3000): cDNA_ID_3076323_gDNA_ID_1620775_Annot_ID_167674 3000 nt of promoter + ATG
cttcaagtttggagatctgctcacaagacgctctaaatccgagattttaacctcagaatctaaacaagagaagtcaagagagaccaaagaagttgaactctctggaaaatagctaagccaatctcctcctaaatcttcaacaatacactctcgtagttccaacactctcaagttcctatattgaaaatcagacaacaacaaaaaacaaaccaaagctacttactactatgagatataacttgcagccaaagaaaagattgtttttgtatttggttggaaccgaacctgcaagtagctgcaatagcagcgataccatcagtagagaaaccttcacaagaagtcaacacaaggactttaaaatccttaaacgaagcagcaattttctctaagcactcatcagtcaccaccatcctcttcattctgatctcttcaagagacgaacttttcgccgccatagcttcaatccacggccaagcataaccaccccaaccatcaggaacgagattatagtcagcgaagtgtggcttccccttcaaagtcaaagatctcatctccgggaaccgtcgtgtaaccgcagcaggactgaccgcgtaacagtttccgacaaagactcgcttcctagtcttccgttctgtctcaaaccatgacttgcagaccagagaaacagagttccggtcctcgttggaatcaatgaaggagaggatatgttccaacaccttaggtgggaatcggagacccatcagaaacagagtgagagagagagaggggggaagaaatgaagaaaaaggtttgagattttgattcgatatgagtgtgatctaaatcgaaagattgaagcttttgatatatataaacagagcaagtggaagacaagaaagagtatgacaagacaagagaatcgaaggagacagtgtccatgtgagaccattaataaagttgagcttgcacccatgtgagcctactgtgtatagctcactaatataattagtttccttaatcataattagtttactctgtgatccatcacatgtaagtctgtgtgagaactcgtggatctaatcatttatggtattacccagttcacacatgatgtcagattcgttaattagtattttacttatgcttcagtttcaaagtaaaaatatattttatctttggtaccaaatatcaattcatattgttaccaatcaaatgttacaactgaatctcttcaaacaatcaacgtttttggacgtgaaaaacatttttatgattaaagcttcgaatggcaactcattatcaaaacggtacagtttatacagttttgacaattatcatttacaaaaagaatttcaaaaacgttacaatttttttttattttcaatttttttatacagtttttttttacagttttgcattattctataacagtttaccgcgtcagttaacaacttatcgctctagctaacagctaaagttttgttaccaatcagactcttaaatcttaagaaatggagtaatccatctcagtgcataagtgtcacaaaatgatcgagactcgttggttacaaactctttatcacatttgaagaagcttaacttaagttgttttgattttcgagaaaccgatagagtaacaaagaagttaacatcccaattaattatgttcctaagctttattttcttagtgtcggattggttagattttctcatagacgctattccgctaaaaaactatgactctacacaattacacaagatgtgggttagtaaaaatttgaagtctgaaaaaaaaacagaaaattcagattcaagagccatcttcttgtcttatctacacgtgtcacatactgaactcctccaacaagagaaagatgtgtccgaagctccctcgctcgaatggcgaatcctctacaccttgagttcgtttagccaatctcaacaaacgctaaagaacgacgtcgttttgttgatcgtaattctaaaaaatcaatcagcaatgctgatgaaaagtcttcacttgttgtcttcctcaatcctcctccaccgctttgcttctcgcagcattgcatctttgtctactctacccagaagaagaaatatcgtccgtatacataacccttcgttttctagccctttcccgccgattctctctagacccatttcctcaggcaaggtcttagccatggcggaagagtcttcttcttcttcgacctcgtcaacatctcagaaacataccaaccgtttagccgctgaacacagtccttatcttcttcaacacgcgcataatccggtgattactctcttttataaaagtattcgtctttagataaaattgataagagaagaacacctctcgtttcaattagggagctttcttgcaatttgctaagtcacaactggtttagattgtagctaaccggttcttagtctaaaagtttggaactttttttattttttagattgatttcatggtttatgtcaaaaaggttgattggtacccatggggagaagaagcttttgaagaagcaaggaagagagacgtgcccatcttcttatcaagttgtttactttatcctcttttgatcgttttaattactgcttgattagattccattaatgacttttagtttgtgaaactaatttggttccttttgttttcaaaatctcttttatatggaatcttgaagttggatacagtacctgtcactggtgagactttcaattgttttcttggatttgagtttgacttcttctttttactgaattggaggattaagagaatgaatgacagattcaaagactctggatctgttagtatcattactcttctctcctcataggtgtaactctaatgaaggatttaaggattttataaattgaaagtggaaagaagtcttatagcctaagaactaagtgttattgtttgaaatgttaggagtagagaagcagataatcttatattcctattttgaaatgtatgtttaagtaacagttaactcttttgtcaggtgccatgtc

SEQ ID NO: 5248 - DNA, 3000 bp, Unknown
  misc_feature (1)..( 3000): cDNA_ID_1808799_gDNA_ID_1620775_Annot_ID_167671 3000 nt of promoter + ATG
ttgtttctacatacatactctattttttattgcaccattacaagcctagaatgcttttgtacaataagagaaaaagggtttacttacttaaggagagttttgaatcctggtcgtccataattgtcatttggaggaaagtaggttccacccatcaacggctttaaatcaggtgaaaggaataccgacagtggccaccctcctccaccatacagagcctggacgaacgacatataaacctaaaagtgccagtaaaaagaatcgtaagtccatgaatatagtcaaggctactttctctagtagacactgatccagctagaacaaattctacacaagtctactatggtttctaaggttttgcatctcttactagagttaccgaagacacaaatattcgccaacaaagtaaaagaagctattaatatgacccacaacatgattgagccaaaaagaaaagatatttctgaaactaagcattcagagaaataaatgaaaatttgagttttgagcaatttattcaagacatcaaagagtgcagaaagtagtttaccttgtcgacatcaggccgctcttctcgatcaacctgttgcatagacatgttactaacatgtttcaacagtaaccagttcaaagacagtgctttaaaatgtttttccgtgttaaacgctaaccttgatactaacgaatgaattgttcaagagttttgccacttcttcatcttcaaatgactcaacttccatgacatggcacctgacaaaagagttaactgttacttaaacatacatttcaaaataggaatataagattatctgcttctctactcctaacatttcaaacaataacacttagttcttaggctataagacttctttccactttcaatttataaaatccttaaatccttcattagagttacacctatgaggagagaagagtaatgatactaacagatccagagtctttgaatctgtcattcattctcttaatcctccaattcagtaaaaagaagaagtcaaactcaaatccaagaaaacaattgaaagtctcaccagtgacaggtactgtatccaacttcaagattccatataaaagagattttgaaaacaaaaggaaccaaattagtttcacaaactaaaagtcattaatggaatctaatcaagcagtaattaaaacgatcaaaagaggataaagtaaacaacttgataagaagatgggcacgtctctcttccttgcttcttcaaaagcttcttctccccatgggtaccaatcaacctttttgacataaaccatgaaatcaatctaaaaaataaaaaaagttccaaacttttagactaagaaccggttagctacaatctaaaccagttgtgacttagcaaattgcaagaaagctccctaattgaaacgagaggtgttcttctcttatcaattttatctaaagacgaatacttttataaaagagagtaatcaccggattatgcgcgtgttgaagaagataaggactgtgttcagcggctaaacggttggtatgtttctgagatgttgacgaggtcgaagaagaagaagactcttccgccatggctaagaccttgcctgaggaaatgggtctagagagaatcggcgggaaagggctagaaaacgaagggttatgtatacggacgatatttcttcttctgggtagagtagacaaagatgcaatgctgcgagaagcaaagcggtggaggaggattgaggaagacaacaagtgaagacttttcatcagcattgctgattgattttttagaattacgatcaacaaaacgacgtcgttctttagcgtttgttgagattggctaaacgaactcaaggtgtagaggattcgccattcgagcgagggagcttcggacacatctttctcttgttggaggagttcagtatgtgacacgtgtagataagacaagaagatggctcttgaatctgaattttctgtttttttttcagacttcaaatttttactaacccacatcttgtgtaattgtgtagagtcatagttttttagcggaatagcgtctatgagaaaatctaaccaatccgacactaagaaaataaagcttaggaacataattaattgggatgttaacttctttgttactctatcggtttctcgaaaatcaaaacaacttaagttaagcttcttcaaatgtgataaagagtttgtaaccaacgagtctcgatcattttgtgacacttatgcactgagatggattactccatttcttaagatttaagagtctgattggtaacaaaactttagctgttagctagagcgataagttgttaactgacgcggtaaactgttatagaataatgcaaaactgtaaaaaaaaactgtataaaaaaattgaaaataaaaaaaaattgtaacgtttttgaaattctttttgtaaatgataattgtcaaaactgtataaactgtaccgttttgataatgagttgccattcgaagctttaatcataaaaatgtttttcacgtccaaaaacgttgattgtttgaagagattcagttgtaacatttgattggtaacaatatgaattgatatttggtaccaaagataaaatatatttttactttgaaactgaagcataagtaaaatactaattaacgaatctgacatcatgtgtgaactgggtaataccataaatgattagatccacgagttctcacacagacttacatgtgatggatcacagagtaaactaattatgattaaggaaactaattatattagtgagctatacacagtaggctcacatgggtgcaagctcaactttattaatggtctcacatggacactgtctccttcgattctcttgtcttgtcatactctttcttgtcttccacttgctctgtttatatatatcaaaagcttcaatctttcgatttagatcacactcatatcgaatcaaaatctcaaacctttttcttcatttcttcccccctctctctctctcactctgtttctgatg

SEQ ID NO: 5249 - DNA, 3000 bp, Unknown
  misc_feature (1)..( 3000): cDNA_ID_1009489_gDNA_ID_1620775_Annot_ID_167670 3000 nt of promoter + ATG
catgaagcttcttataacacctgcagggcacgaatttgcaggtctgattcttatcatgatgttcttttcagcttttcatcatgtttgagatgcacttctcagcttgtaagaacctctcttgtctattcttactttttacctctgacacacactggtttctcttctactttgaagcttagactgttctgctgtcaagacttgacttcttctgcatactccacaactttcagtccagattctttgtgagtattgatttgtcagttgtcactgacctcggatcaaaacttggcatatacatgtatgatataggaattatttctagtcattaacgttttcgaaaatacacacataaaacaaagcagtatttttacagacttaaaataattattttatcgattaaaaagttgattttttttttaataatataaatggaaaacctaagtataaaaggaattgatttgctagaaagaaggaaaaaaacaaaccctaaaaatatatagattcttcagcaaggtaagatagagagaacgtgagagatcgatcatggcgaattcaacaggtaaaccgacaagttcaacacaagaagatgaagaagctacctcggctacagaaatattagcacaattgatgcaagatattatagatcgtgaagaggatatagatgatgaagacgatatagatgacgaggttatagatgatgaagactatgaggttgcgtcccttccattattacaagaaagccaagctaatcaaaagcagtctagggagagggaagaagaaactgaaaaaaatcaacctaagaggtttaagaaacagaacatgatgaaaataaatatccatgacttttcagaagaaactctgaggttaattgaggtatggtacgaagctgaactcgatccacaagatatattcggcgataatgaggtgacgaggctattcagcagaccgataaagaagcagttgatgtcgagcgatgtcgataaagatcaatgcatgctcatgttatcgaaggagcaagtgaaggagaagatgcttccttttctagaagattcagagaatccggtaaaggggattgatgtttcggtgtatggaccagacgggaaagttcaacagatggagttcaagatgtggaatggggataaaacacctgtgttaacttcagggtggaagcagtttgtggaagattatggtctttcgatgacttgtgattttgtcactgtttggatgtttaggcacataaagactcgaaagctttgctttgctattcactacgttaaattttctttaagagattaatttatcgagtgggatgatcttgaagactgctttcttgaatccaaattaggatttttgaggtttttgtttctttctttttctgtgttaactagtggaactaccagggtattaactagggtttgcttccctattcggtctacaaggatcttgaagactgctttcttgaatccaaattagggtttttgaggtttttgcttctttctttttcctgcgtttttgttaccaggatattaattaggatttgcttcgctattcggtctacaatgatcttaaacatagataattgatatttgataaggtaccaaaatgatggatcatatatggtcgtcactggtcagagaatatatgcacattatatggtcgtagctccaacgtttaatttgatctaaactatgtatgtatcaaggttataaaatattgcaccacacaagctttttacttacaatgtgaaatcaatgtaaaaaccgttctatacacatattaatctcacaattacagcgactaaacaatacaaaaatcacaagcaagattccaagagggaaaaaaactggagaaacaaagaataagacaaaaccaaacaaccaacacaagaagaagcaaaatcagttgtaagaagaagaagagagccaagggtggttaagtgcctcgagagctgttggacgtctcaaaggattgatctcaagtagagtccttacaaaatctaagaacaattcatcactaacttgtagttgttcttccaagcttgattcttctgtgattatgtattcaatctcattgctctcctaaatcaagaataatgcgtcacattcaagcaataactctcaagtatttttggttatattaagaaaaattacctcgtttaagtggtagagatcatactctttggtgaagtatttatgtgtctcttgacctttctttagcatctctgtttcgataggacctaaaactgcaacaatcctagccaatatcatcgctactgcttcgtttggaaacagaacctgatacacacatacatatatacacattgatacatttgtgttactagtttctttgatatgtgggataaaacatacagataagacttttgatggaatctagacagtacctcaccagagcagagttctgctacaatacacccaagagaccacaaatcgatcttttcgtcatatggaagcccgagaatcacttcaggagctctataagaccgtgattgtacatacaagcacaagttatcagagcggaaacaactacttccaagatcgatgatttttaccgcgcatcttttgtaactctttatcagtatattgcttgattaaaaaaaatgccctttttccaacttaaaactgcatcgttcgttaaaacttaaaacttaggaatgggattttagtaaccaaacatcatgcaatagccacaaaaagatgtccgtgggcttattgggcaagcccaatatcatgaattctgatatgcagatcctaaaactattgcggtgcttttcataatgtatctaactctacggtggttctctgtgaaaaagatgaaactataagggtataataacaatttaaaataaggtcggcgattcccacttcagacttcagagtgtcgcctccaatttcaattagggttcctactttcttctcctttctcgtaacttgatcaaatctgcttactgtggagttatacaccttgaagagtctcgcgata

SEQ ID NO: 5250 - DNA, 3000 bp, Unknown
  misc_feature (1)..( 3000): cDNA_ID_2053094_gDNA_ID_1620775_Annot_ID_167669 3000 nt of promoter + ATG
actgcgagaactgagggtgtttccatctgagccagatcttgatgcaaccaacatacctctgacggaacaaggcctggtctttgtgtctaaaggctgtcgaaagcttgagtctgttctctacttctgtgtccagttcacaaacgcagctttgtttaccatagcaagaaaacgtccgaatctcaagtgcttccgtctctgtgtgatagagccatttgctcctgattacaaaacaaatgagccacttgataaaggattcaaagccatagctgagggatgcagggatcttcgacggctctccgtctctggtcttctctctgacaaggccttcaaatacattgggaaacatgccaagaaggttaggatgctatcaatagcatttgctggggacagtgatttgatgcttcatcacttgttgtcgggctgtgagagtttaaagaagcttgagatacgagactgcccttttggagacactgcactactggagcacgctgccaagctagagaccatgcgatccctttggatgtcatcttgctttgtaagttttggtgcttgcaagcttctaagtcagaaaatgccaaggctcaatgtcgaagtcattgatgaacatcctccagagtcaagacctgagagctctccagttgagaggatatacatatacagaacagtcgcaggaccgagaatggatacgcctgaatttgtgtggacgatacacaagaatcctgagaatggagtttcacatctagccataaagtaaacttgctgcttcagtcatattttcctttccatcttcagtttttgcagacattgttgtgggagagattcaccttccatttgttccctttcatattgtttttactaagatattagaatatcagtgatagaagcatttcatagcttgtactctgttaaacaaacaaaaccttgtgtttggaataaaattatcattttataagatttatagtaaaagaagtttgtaaagaaacatctaaaatcatgagctaaacggtaaggcctagcaaaaaactacatatgttgccgcaaagcatctctcaaagtataagcagtagtgtaacataatatctccgggaagaaaaaggtcagtatctgagtgacaacaaggtttctgctttgagcctccgcaacaccagcaacttctcctcactgggttcttcatctgcactgtatcaacccgcacaagttaggcgatttcgttgattccggcagatttcttgatggattcaagaagatgctcaattctgtatttcattacaggctgaccatgtcgagtcttcctcaacattttcccctttgcttctttcctcctagattcagcctcttctttcgcttccttcttcgcctgaaacattgcctctctctccttccttactctctccatctcttctcttgtctgcttgtacaaatcctctacaccaattctcttattagatttacccttccgcttatcatcatcatcatcatcacctaccttactagtctctccagtctcattcttatcaggaatgttctgctgcttcaacgacttcctaaacttgctcacatactttgcattcttgtagaactctttttgcttttctgaaagtgagcacaaaagaacactcattcaatcttacttcaagcctaatctgattagaaaacacaaactgtgaaactatacaccattaaaggaactccaaatagttctcttctgatgcctaacaccaaaggaaacataatcaataaccacatcgtagcattcttaacatcagcctgatcttaaatcttaatatagttcctcctaatcatcgagtactagcttaagtttgaagcaagaggatgagaagttacaatcaaaaaggaaactttttttcaagttgggtggagagaagcagggtaacatagtcaataaccacatcgtagcatcctcaacatcagcctaatcttattatagttcctcctaatcctcgagtactagcttaagcctaatctgattagaaaacacaaactgtgaaactatacaccattaaaggaactccaaatagttctcttctgatgcctaacaccaaaggaaacataatcaataaccacatcgaagcattcttattcttaacatcagcctaatcttaaatcttaatatagttcctcctaatcatcgagtactagcttacgttcgaagcaagaggatgagaagttacaatcaaaaaggaaactttttttcaagttgggtagagagaagcagggtaaacatagtcaataatcacatcgtagcattcttaacatcagcctaatcttaaatcttgatatagttcctcctaatcctcgagtactagcttaagttcgaagcaagaggatgacaagttacaatcaaaaaggaaactttttttcaagttgggtagagagaagaatctcttactgatcaaagaagggttatagcgattattttccgatttcatgttggcaaaagtttggagagaaagaccaccgcctcctaatctcctcatgttcttcctcttcttcgtctccgccgatttggatttatcagtctcatgatcagcattttgatagaatttcttcattatcgcgagactcttcaaggtgtataactccacagtaagcagatttgatcaagttacgagaaaggagaagaaagtaggaaccctaattgaaattggaggcgacactctgaagtctgaagtgggaatcgccgaccttattttaaattgttattatacccttatagtttcatctttttcacagagaaccaccgtagagttagatacattatgaaaagcaccgcaatagttttaggatctgcatatcagaattcatgatattgggcttgcccaataagcccacggacatctttttgtggctattgcatgatgtttggttactaaaatcccattcctaagttttaagttttaacgaacgatgcagttttaagttggaaaaagggcattttttttaatcaagcaatatactgataaagagttacaaaagatg

SEQ ID NO: 5251 - DNA, 3000 bp, Unknown
  misc_feature (1)..( 3000): cDNA_ID_1411691_gDNA_ID_1620775_Annot_ID_167663 3000 nt of promoter + ATG
ttggtgaattttctcttcttcttagagtttctttccctgtgtggagcagcactaaacagaccattcaatttgtctctttcaggttcaccctcaatggtatcattgttccttctagaaagattactaacttgatccctcatttctgatacactcccaggaattgggtctgattcacaagcttcttctgtagtacagggagcatacactaaagcactcattgcttcagcagcaatttgagtgttaataccaatgtcaataaagtcttcctcgggttccaagggctcctttggcgccttatcctccaactgagcatccttctgtgagataaacataatgccctcactcaaacccgatgcttgttccatcttgagatgctttgcagaactgttcttcataactctttgtgtgggatgacttgagacttttctaatatcacacggatccctagatcgtttcttcactccaaaatcatcacctgcaacctgatcttctcttatcttggagcatgtaatacttgcacgagtgactggagaggttttagggtcactcacatcacactgatcactactccaatcaaagacactcattttcctggttggacttctgctcataattcttttggccagagattgacatccttttgcacctgatacaggagatgacttccttctgcaactattaaccgggagatcaactggagacaaatttagatctttgtccatcaaaaagtggtcaacaaaaccaagggcatctgcttgtgttgactctcctggttcttgagaatccaaaaaatcaagccctggaccatggctactagcagtaatccgcaatgaaccttggaaaccggtcactgtatcacaatttgattcttgcttgccttgaagaaagagatgtagtaagatttatctgagttaatacaaagaagaagatagaggcaacataacaacacaaggatatgtttacctgtttgacattcgtgatcatttgatccatcagactccaaaagtatatctccagctttcgggcttagctccggcaaacacatcggctcaccagcagcgacacttccatcttcatcatcactatcatccaccaccacttggtcgagaccgtaacattcctggttcagtgattcctcgtcaccacaatttccgttatctactagctccgtatcgtcgtagagcacttgaaatggggtttcaagtaacgagctattaagtactaatgcttcatcaatcgcctctgtatcttcaatttccccacatcccaaaatccgattaacctcaaaccctaagagaatccagaaatgaaattggtactacgaatctatcacctcaaaaatctacaattatcagcaagaaaaagaaaatgtaaatgaatcgtaatctcaaaactcactatgatccgaagaagctgaaggagactgcaaatcggaggcgaaatcttcggtttccataagattgaccatcgaaactcgaatttcaatgctgtccaagaagaaatggaatcgctagaagctcccgattcgtatacggttggaatcagagaagaaaccctagaggttccattggtgctttagtcgaggtgattggcgggagagagacgagtacagagctgtgtcgaatggttttgaaaagctcagttccgtgaaacgatattttagttactatatatatttaattatgtcaaacgatacatcaaatagggcatttggtctagtggtatgattctcgcttagggtgcgagaggtcccgagttcaattctcggaatgcccctctattatcttttgttttttgggacttgaaaattcttacctcattttcttctcagtatttccactatgttcttatccctttaatcttcttcacctatgttgcaggaaaaaaaaagattatatattatgtcttctagaaggaaaccaaactacttattcgacacctcataaatgctttgctatttttctactctttgtgtgcgatttggtgaagaatctttgagaatttggtcaaatgaacatttaagaatgttacaatttatcgacatgtcaaagattggtaacactttggttttcttttccatcccatgaatgtgaacttgcttacttaaaatatttaactgtaattttataacattactttacgatattaattaatttagatttaccagcaacacatggtattaggattgtgtacctttgtaattgttgatatatgagtcacttgttctaagaacacatttcattactttggattttgaaattctaagttgaaaatctttgttttattttcttggctagatttgatgcgtgtcataatctaatccaatttgaaaatatgtaatatgttgtataaaaagttaatatgccaacaaaaggatagatcttagttggtggaatcaacaccattagatatcaaattggtcgtatgcaatgtttctgtataatatatcatttgtctactgaataatatatatcataatgttaattgttagctttctgtcgggttatgaagatggtattggtaggtacgttgtataacataagaattgaaaacgtaaatattattcattagtagacagctcataataagcacacccacacatgcatgccacaagcaatagaggttttttaaaaggttttcttcttttaacaaaagaaaggcctttctttgatttcaaattttcaatgatattaatattgcaataaaataccatgatataacatattttagatttatattaatgatttatgaccccaaaagaaaaaatatattaattaaaatatgtagttcaacaataacctcagcctatatggctattatacaatcttgttttgggaagaaatcaacacatgcttatgaacttttatgttcctttttttgtcttcattagcaaaagataaagggatcaagccttttttacaaacacttgcatgctagtatgcttcaggttcaatcaccgccccattagattctctctccctctctaaagaccacaccttt

SEQ ID NO: 5252 - DNA, 3000 bp, Unknown; identical to SEQ ID NO: 5249
  misc_feature (1)..( 3000): cDNA_ID_1009489_gDNA_ID_1620775_Annot_ID_50261 3000 nt of promoter + ATG

SEQ ID NO: 5253 - DNA, 3000 bp, Unknown; identical to SEQ ID NO: 5248
  misc_feature (1)..( 3000): cDNA_ID_1808799_gDNA_ID_1620775_Annot_ID_50262 3000 nt of promoter + ATG

SEQ ID NO: 5254 - DNA, 3000 bp, Unknown
  misc_feature (1)..( 3000): cDNA_ID_1828131_gDNA_ID_1620775_Annot_ID_50263 3000 nt of promoter + ATG
aatgtctgcaaaaactgaagatggaaaggaaaatatgactgaagcagcaagtttactttatggctagatgtgaaactccattctcaggattcttgtgtatcgtccacacaaattcaggcgtatccattctcggtcctgcgactgttctgtatatgtatatcctctcaactggagagctctcaggtcttgactctggaggatgttcatcaatgacttcgacattgagccttggcattttctgacttagaagcttgcaagcaccaaaacttacaaagcaagatgacatccaaagggatcgcatggtctctagcttggcagcgtgctccagtagtgcagtgtctccaaaagggcagtctcgtatctcaagcttctttaaactctcacagcccgacaacaagtgatgaagcatcaaatcactgtccccagcaaatgctattgatagcatcctaaccttcttggcatgtttcccaatgtatttgaaggccttgtcagagagaagaccagagacggagagccgtcgaagatccctgcatccctcagctatggctttgaatcctttatcaagtggctcatttgttttgtaatcaggagcaaatggctctatcacacagagacggaagcacttgagattcggacgttttcttgctatggtaaacaaagctgcgtttgtgaactggacacagaagtagagaacagactcaagctttcgacagcctttagacacaaagaccaggccttgttccgtcagaggtatgttggttgcatcaagatctggctcagatggaaacaccctcagttctcgcagttccttgcaatatgaggcaacagcttcaagacctttgtcctcaatcaagtccatcacctaccaaaaaatgtctcactagtaagaaccaacataaatgggatactcactcaaagagtcttgaaaaatgtaaaatactcacccatagcttctgcagtttcgagcatcgcctaagaagctcaacaagatcaggcattcggacagtagcgtagctcaagttcaacgaggtaagaccaggacagacagaataaagagctggaagatattcagggaggacatcccagagaccagataagctctgaagttgcttacagtttgaaaaagcttctgataactttgaaaacgcttcaggtttcaattgagctgcgaaagaacctgtgccgagctcagtcagttgtggagcacaacgaagtaagctaacgagtccatctagagtcacagctggattcaacttcaaagacttcaagtttggagatctgctcacaagacgctctaaatccgagattttaacctcagaatctaaacaagagaagtcaagagagaccaaagaagttgaactctctggaaaatagctaagccaatctcctcctaaatcttcaacaatacactctcgtagttccaacactctcaagttcctatattgaaaatcagacaacaacaaaaaacaaaccaaagctacttactactatgagatataacttgcagccaaagaaaagattgtttttgtatttggttggaaccgaacctgcaagtagctgcaatagcagcgataccatcagtagagaaaccttcacaagaagtcaacacaaggactttaaaatccttaaacgaagcagcaattttctctaagcactcatcagtcaccaccatcctcttcattctgatctcttcaagagacgaacttttcgccgccatagcttcaatccacggccaagcataaccaccccaaccatcaggaacgagattatagtcagcgaagtgtggcttccccttcaaagtcaaagatctcatctccgggaaccgtcgtgtaaccgcagcaggactgaccgcgtaacagtttccgacaaagactcgcttcctagtcttccgttctgtctcaaaccatgacttgcagaccagagaaacagagttccggtcctcgttggaatcaatgaaggagaggatatgttccaacaccttaggtgggaatcggagacccatcagaaacagagtgagagagagagaggggggaagaaatgaagaaaaaggtttgagattttgattcgatatgagtgtgatctaaatcgaaagattgaagcttttgatatatataaacagagcaagtggaagacaagaaagagtatgacaagacaagagaatcgaaggagacagtgtccatgtgagaccattaataaagttgagcttgcacccatgtgagcctactgtgtatagctcactaatataattagtttccttaatcataattagtttactctgtgatccatcacatgtaagtctgtgtgagaactcgtggatctaatcatttatggtattacccagttcacacatgatgtcagattcgttaattagtattttacttatgcttcagtttcaaagtaaaaatatattttatctttggtaccaaatatcaattcatattgttaccaatcaaatgttacaactgaatctcttcaaacaatcaacgtttttggacgtgaaaaacatttttatgattaaagcttcgaatggcaactcattatcaaaacggtacagtttatacagttttgacaattatcatttacaaaaagaatttcaaaaacgttacaatttttttttattttcaatttttttatacagtttttttttacagttttgcattattctataacagtttaccgcgtcagttaacaacttatcgctctagctaacagctaaagttttgttaccaatcagactcttaaatcttaagaaatggagtaatccatctcagtgcataagtgtcacaaaatgatcgagactcgttggttacaaactctttatcacatttgaagaagcttaacttaagttgttttgattttcgagaaaccgatagagtaacaaagaagttaacatcccaattaattatgttcctaagctttattttcttagtgtcggattggttagattttctcatagacgctattccgctaaaaaactatgactctacacaattacacaag

SEQ ID NO: 5255 - DNA, 3000 bp, Unknown; identical to SEQ ID NO: 5245
  misc_feature (1)..( 3000): cDNA_ID_1387356_gDNA_ID_1620775_Annot_ID_50264 3000 nt of promoter + ATG

SEQ ID NO: 5256 - DNA, 3000 bp, Unknown
  misc_feature (1)..( 3000): cDNA_ID_1828129_gDNA_ID_1620775_Annot_ID_50265 3000 nt of promoter + ATG
tagagagtatccttgtctctcttccgctatctgcgagatgagaatatgaccatgtaaagtttcttgattcaagaaactaaatcttgtttcatcttagctaatgaaacttaactactgatggtgtttgtctcttgttgcggatgcagaaacctgaagaaggaactgaggaatggaaactattagatgcttgtatcaatccaaaagagtggctttagttaattaattgtggttatttccccaattagctcttttattagttttgtctttaaaagccttaaaagagtaaagagtctaatgaaaagtgagtgagataaagaaattgtaatttggcgtcatctcatcatgagtcactgacaaacaaagatcatgatggttgatgatggagtatatagtaccaatcgtgatgatgatgataaaagtaattaacttttaattttttttactgacacagtaaaaataagagccgttggctcaaatagccgagcctctcggtgcacgcacgcatgccacttgctcggtaactgttcactagacagaacacaacaacactcaaatagagtgataacattgaatctgatgatttggtttagtataaaaatcgtttccaagtttcaacgagtgggacttgtgttaggttaaacaatttcggattaagtaaacgtcactgtctcatttgtcttgatacaagaaacgcccgtgatattttttcttcgatgtcgtccaatggggacaaagaaacaatttagtccccggatatacacacacacacacaaataatacatgggtgttgttattatggcttaccttacacaacacaacttgccaatgtttttaaatttactaaaaaccaaagccagaagatattttattgccacaaattgacgtcacacctgcccatatctaatccatgtctgcaacacaaaaaacaaaaaattgaattcccccaaaaagtgaggagagagatgtaaagactgtgtaccaattcaatatctttttgagcagagtaaaaaaaaaagtttaaaaatttgagcttctgacacaaaaggagccaaatgtaatagctggatccaatccaatgcaatgaaaacatcttagctgtaaaatggtccaatctctctcttttctttctacattattacttccacagaatcaatttatctctcgaaaagcaataaagtctctatatttgtgctcaaagatagacagagaagcataaatacttgtcctctgtgtagtacaaaagtggagccccactgagtgatgccctcacagtaacggctacatttttcttttatctctctgtctctctcttcttttgagtgattttttatgaagatgggttcttttgtccacttattactgtcctgaatcacacgtcgaatcctacgtggcatctctctccattgtatgccagctcactctcactcactcactcacctcccgcctttataaagccttacctctctctcttgtctccttcattgagtcaagtgctcgagactgtagagtgaagtttgatttatttagagagataagttaaaaaaaaaatggtcggtatggatttgttcaaatgtgtaatgatgataatggtgttggttgtctcttgtggtgaagctgtttctggagctaagttcgatgagctttatcggtcaagctgggctatggatcattgtgtcaacgaaggcgaagtcacaaaactcaagcttgacaattactctggtaagtagatgaagacaaacccatctctgtttagtttcctctgtttttggtgccatctctgttttgtttcctctgtttttgtgggttcattataattgaatatgtttttattgaatttttcaggagctgggtttgaatcaagaagcaaatacttgtttggtaaagtctctatccagattaagcttgttgagggtgattcagcaggaacagtcactgctttctacgtacggaacaaaacccatctcttcttgttctgtttttaatcccctatttgattattatgtctcaaatattgaaatgtgacaatgtttgttctaatacagatgtcttcagatggtccgaaccacaacgaattcgattttgagttcttagggaacactaccggcgagccttacatagtccagaccaatatctacgtgaacggagttggaaacagagaacaaagactcaacctttggttcgatcccaccactgagtttcacacttactcaatcctctggagtaaacgcagtgttgtgtaagctctcttatacaaacaaagtctcttcctttatttgattattgaagacccattttaatgatgtcttcattgcaaatacagattcatggtagacgaaacaccgattcgagttcagaagaatcttgaagagaaaggtatcccatttgctaaagatcaagcaatgggtgtttacagctccatttggaatgcagatgattgggctacacaaggaggtcttgttaaaactgattggagtcacgctcctttcgttgcttcttacaaagaattccaaatcgatgcatgtgagattccaacaactactgatctaagcaagtgtaatggagaccagaagttttggtgggatgaaccaactgtctctgagcttagccttcatcagaatcatcagcttatttgggttcgagctaatcatatgatttatgattattgttttgatgctactaggtttcctgttactcctcttgagtgccaacatcatcgtcatttgtagtttagagattagtcaagaataaaaatggatcaagagaacacatgtggttactctttgatgattctgttttaatgtataaataatcaatcttctattgattttggtgaagtttttaagttcggattttaactgaatatgcgaaatttatggaaacaaactcaacgcacttatcgttaatgacttttaagggtttgttttgattgaatgtttcaaaccctaattacgaaccttaggaaacaaaatagcaaaaaactcgattaagatacttttaaca

SEQ ID NO: 5257 - DNA, 3000 bp, Unknown
  misc_feature (1)..( 3000): cDNA_ID_1828125_gDNA_ID_1620775_Annot_ID_50266 3000 nt of promoter + ATG
accttctatggcagaaccaacctgaaacttgcttctcagttaatccaacttcctctgctaacttgcccttcatttcttcagtcggatacttatgctctgtagaaaaaccaaatcacacctgtaaagcatatacaacttggtataaaggaacatatgcaaacaacaaagccataatttaccattgtagaaattctcaagcgccataacttgcataggagtcttaagcttccgttttttgctgttttctgtagaagctttatcgccatcagcggtcgcttcgcctgaatctatcgaaaatagcacataaaaatcaaaaacataagaagataatagtgaaacacggacaccattcaataaccaagagatgcaaagccctgaccaaaatcaatttcattttacaatcatgctttgtgtatttagaaatgttgctagtaattccgaaattcaggtaaaacatctacacaagcttcacataaaagggtttaatttcagaattatggctctttctctcatcagccaaatacttctaaacccaatcaaaacgaacgaaaactttggaattccttagcttgaataattagtagtaccataaaacaaaccaaaaaaggcttaaaatttccaatgccattgatgaatttcgctaattaaaactacaaaaactgggagttgcattgtaattcgacgaactcgggatcattaaaaactattctctcacgtaaactcgcaggaagacagagattgaaatagaggaaaaaacgaatttcacctgagtgcatagcgaaaattcccagagattgaaggaacaaaacctaatcagctcccaaaaacccagatttttttctttctccttcttcaaaattctggttttttcttatgagaggagaagaaaactcttcttcgcacacaaatgacaaatctcttgagaaccataccggtttcagtaaaccggaacatgggaaatacgtgaaccgggtaaatctaaatttgggccttattgtgggcctaaattggacaacgaaggaataagaagaagagaggcgtcgaatgtttcttgtgacagaaccgccatggctacagcttcaaggtttcttctacggaaattgccgaggtttctcaagctgtctccaactcttctccgtagcaatggcgtaagagtttcaagcaatctgattcaagattccatagaaccgttggattccttctggagaataggatctcgaatccgccatgattctttgactaccagaagcttctcttctcaaggtcctgcttctgtcgattacaggtactttaatattctccattttgatctcctttattgtatctgaatcgttaatttcatgagaatatgaacaaagtggaagaaaaaaacagttcggttttgcaggaggaagagtttcacaaattagccaacttcacaattaatcaccttcttgagaaaattgaggtatttgaagctggaacctttttctctctagggttcttcgttttacttgagattgcaatagcttacactatgttctacttgcatgattcatgttcaggattatggtgataatgttcagattgatggtttcgacatagattatggggtaaggattaaactcttttaagcaatttaagatcttgttcatatttctggaaatctatgtgtacttattatagtcagtccttttggctgtttccaacagaatgaagttcttacccttaagcttggatctttaggcacttatgtactgaataagcaaactccaaatcgacaaatctggatgtcttcacctgtgaggtaaagattctttcttgccttttgaaagttgctaactttaggcgcctagattgaatttcgcatctggattatcatgttctgctctctcttctgatttttgtactcatgatatttggagaaatgaaactgtttatgactgtatagtgttgttgctcttgactttgtgcttccacatcttagattcacattaatgtaatcttcattcttccttttgtctcggtgcagtggcccttctagatttgactgggaccgtgatgctaatgcgtggatatatcggcgaactgaagcaaagttgcataaactcctggaagaggagttagagaatctatgtggtgaaccaatccaactctcataaagaaggctttaaaacaatatttgtgagcgaaagggtttcatctatgaacttgaaactgctataccctgttaaaggtatatctatgaaacatccagaggaataaacaaacaaggcagaagacaaagttgttttagtgtgaaaactgattagtgtttctgaatctatttttaaacagtaatgtctcatagtgacattgttgcaagtctctttgtttaatcagagctgaagctgccttttacaggtttacgcgttttagatgaaaacatttcttttgaacgacaaaagtcctacatttgtcaaaactcctcgaatctcacaataatttcggaaaaaagttggttaacaatgtttgcagggtcaatctccacttcttcgaaagcaccaataaggacaaaagattgacttcttcaacatcattgtcccctttttccagtaattcacgtttaggtacccctatgtctctctcattgtcaaaaaatactctaaaagtacgtattattcaaaaaatgttggatctttttgaactatttagagatccatcgcggaaaaagttgacacaaagtgcgtgaattggtcacatgtgtatctacatacagtggctaagagagtgtaaatagtatctactactttcatggcttttggttcagatgctcaagtgagacttgttctgctttttcttggaaacatcttaaaacacatgattagctgcgttccacatatttacttttcaggtgggtctttcgttgacgttgaggcaaactttttcttttttcgttagacacgttttgagttgagttcttaagcagaaataatggagatatcagatgagtaaaaaaaagctagtactggtcagagaatg

SEQ ID NO: 5258 - DNA, 3000 bp, Unknown
  misc_feature (1)..( 3000): cDNA_ID_2993386_gDNA_ID_1620775_Annot_ID_50268 3000 nt of promoter + ATG
ccctaagtaccttctttcgtcggagcttccattaggagtgaagaagccaagctcaaatctctgaccagctgaaacaagagtctctccatggctgtcattgatcaatgttgaacctttgaacaatgttttggagtcttgaactgcaacaaaacaatctaatcgacgaatatgcagcaaaaacatatagaagaagacagaaagaatcattctctgaccagtactagcttttttttactcatctgatatctccattatttctgcttaagaactcaactcaaaacgtgtctaacgaaaaaagaaaaagtttgcctcaacgtcaacgaaagacccacctgaaaagtaaatatgtggaacgcagctaatcatgtgttttaagatgtttccaagaaaaagcagaacaagtctcacttgagcatctgaaccaaaagccatgaaagtagtagatactatttacactctcttagccactgtatgtagatacacatgtgaccaattcacgcactttgtgtcaactttttccgcgatggatctctaaatagttcaaaaagatccaacattttttgaataatacgtacttttagagtattttttgacaatgagagagacataggggtacctaaacgtgaattactggaaaaaggggacaatgatgttgaagaagtcaatcttttgtccttattggtgctttcgaagaagtggagattgaccctgcaaacattgttaaccaacttttttccgaaattattgtgagattcgaggagttttgacaaatgtaggacttttgtcgttcaaaagaaatgttttcatctaaaacgcgtaaacctgtaaaaggcagcttcagctctgattaaacaaagagacttgcaacaatgtcactatgagacattactgtttaaaaatagattcagaaacactaatcagttttcacactaaaacaactttgtcttctgccttgtttgtttattcctctggatgtttcatagatatacctttaacagggtatagcagtttcaagttcatagatgaaaccctttcgctcacaaatattgttttaaagccttctttatgagagttggattggttcaccacatagattctctaactcctcttccaggagtttatgcaactttgcttcagttcgccgatatatccacgcattagcatcacggtcccagtcaaatctagaagggccactgcaccgagacaaaaggaagaatgaagattacattaatgtgaatctaagatgtggaagcacaaagtcaagagcaacaacactatacagtcataaacagtttcatttctccaaatatcatgagtacaaaaatcagaagagagagcagaacatgataatccagatgcgaaattcaatctaggcgcctaaagttagcaactttcaaaaggcaagaaagaatctttacctcacaggtgaagacatccagatttgtcgatttggagtttgcttattcagtacataagtgcctaaagatccaagcttaagggtaagaacttcattctgttggaaacagccaaaaggactgactataataagtacacatagatttccagaaatatgaacaagatcttaaattgcttaaaagagtttaatccttaccccataatctatgtcgaaaccatcaatctgaacattatcaccataatcctgaacatgaatcatgcaagtagaacatagtgtaagctattgcaatctcaagtaaaacgaagaaccctagagagaaaaaggttccagcttcaaatacctcaattttctcaagaaggtgattaattgtgaagttggctaatttgtgaaactcttcctcctgcaaaaccgaactgtttttttcttccactttgttcatattctcatgaaattaacgattcagatacaataaaggagatcaaaatggagaatattaaagtacctgtaatcgacagaagcaggaccttgagaagagaagcttctggtagtcaaagaatcatggcggattcgagatcctattctccagaaggaatccaacggttctatggaatcttgaatcagattgcttgaaactcttacgccattgctacggagaagagttggagacagcttgagaaacctcggcaatttccgtagaagaaaccttgaagctgtagccatggcggttctgtcacaagaaacattcgacgcctctcttcttcttattccttcgttgtccaatttaggcccacaataaggcccaaatttagatttacccggttcacgtatttcccatgttccggtttactgaaaccggtatggttctcaagagatttgtcatttgtgtgcgaagaagagttttcttctcctctcataagaaaaaaccagaattttgaagaaggagaaagaaaaaaatctgggtttttgggagctgattaggttttgttccttcaatctctgggaattttcgctatgcactcaggtgaaattcgttttttcctctatttcaatctctgtcttcctgcgagtttacgtgagagaatagtttttaatgatcccgagttcgtcgaattacaatgcaactcccagtttttgtagttttaattagcgaaattcatcaatggcattggaaattttaagccttttttggtttgttttatggtactactaattattcaagctaaggaattccaaagttttcgttcgttttgattgggtttagaagtatttggctgatgagagaaagagccataattctgaaattaaacccttttatgtgaagcttgtgtagatgttttacctgaatttcggaattactagcaacatttctaaatacacaaagcatgattgtaaaatgaaattgattttggtcagggctttgcatctcttggttattgaatggtgtccgtgtttcactattatcttcttatgtttttgatttttatgtgctattttcgatagattcaggcgaagcgaccgctgatggcgataaagcttctacagaaaacagcaaaaaacggaagcttaagactcctatgcaagtt

SEQ ID NO: 5259 - DNA, 3000 bp, Unknown
  misc_feature (1)..( 3000): cDNA_ID_2053058_gDNA_ID_1620775_Annot_ID_50269 3000 nt of promoter + ATG
atggttggaatggagcctggtctaagagataagaaaagttttggggaaccaagactgaaatccccttctaccagtttctataattctgtacctcgccacaaatcgtttaaagagacattcaaaggttcaccacgggaaatccctgtaactaacagcaagaagggttggataagttccaaaagttgggctgaagggtcgagaaaccatctggttgccaacgtccaaaatctttctggaagcaatattgaaaccaatcagtctcatgattatgataataatatatctaatggcggacgcaagacgggatatctcactaaatcttcgaagctgttacctccgagtagaagcagatcccctgagtcaatggatagaggtccatcttctgggatggtaaagatttgtctaatacttccatgtctacatgttcctttcttgcccttttatggaaatatgacttgtgttttgtgtgatatcttcttttaaaggcaggaatatatcacggggagaggaatcaaatgaaaatgcagagagagaaattgcattcgactgatgaaccaccggtgagtttgatggttaactatcttaaaaatatagatattgatgtatattttaacaaagtttagaggctctatcaagttcgtgttctgacctttaacgaatgttaataggttgccaaacgagtgaaacatgggtatattcagcaagtatatgcaccaaaatcatcatcatacagcgagattcttgaacgaaaaagccagataaatcggttagtaaccaaccattgtgtaatgcatttattgtcccaaagagatatcaaatcggcttattggatcatactgttatgtttgtaggtctggtgtggaactgccttctagtttaagcggggacgatgagactgacgaatctagctcgtcaatggattaagtaaagaaaggtacaaaggaagattaggaaattccggtttgtatagatatatgatgaaaccggtttaggatgtgaaaatgttgcatcgtgtaattggtaaaagttagagctctcttcattttggtaactaaacggtccccaaagagatacagtgagccagtaatgagcctttttttgtttaaatttgctcctaaaccgttaccggtttgaccgaattgagtatgtaaatcccagtgattacaaaataaccaaagtaaggcccatttattaataaagctcaaattaggcccaaaatattatgatagtccggtttagtcgtaaaaggcggttcggaaatgtgtgactaggagatttcgtcacatgagaaaaaatcagagccgttgactagttttcgtagaaagtatgtggtacaattttgattcggccaaaaaaggtttttttctttttcttttagggttagcgttgctttgcctcaaactcaaattttgaagataatttttttggtttctctgctactgatttcgaatctttacgcttaatcaattattcatctggattttcaaatccaatccttttcctccctggtaagaatctctcttcttcttcttcttctctctcacgacgattccactgttctccgattctgtgttagttcctgcgatattttccatcacttgttcgtgtttcgttattacgggtttgtgttttgtgaacttgttgacctttgtgtctccgtaatttcgtccaacggttgatgtttttgattgctgattagatttttgtcggtaggtattgaaaaagatgatctttatggattttgttttctgtttcttctttcctttttgtaatctgacttgcaagctttttgctttttttgtcggtcggtgttaaaaattgttccttttctcttgttcaattgtttcctcaggtgaccaagtaattggggattaacaaagggactggggctttattaagctcgaaacaattgttcttcactctggccgcttctgcaaagtcgtgtgcttctcgcacctctgcgcaggtgtggggtggccttgaagtggtgacttcactctgtcttccaaggatttctctagcttctatcatttggaggctccgtcgtgtttctgagggtcttacccttgattacggctaacatttactacgcccactataccacctcttaagcttttataagaactttttattcgtgcaaaaacttaacttggatcttaattgtttctagtttagttgtggttgtaaagtaaagaaccgtttttttgtggtttggttttgcttttttagtttccgttggtgatgtagttcgatgttattaagtttgacacaatggtcaggttttcatgcttcaacgctcacatccaccgccatagacctaaggtaacttgaaccatcattgcctcttgtgtctttagaacgatagttttacattctctgtccaagactcctttgtccaataagagaatgctaatttgtttctatgttctggtgatgcagaaatctgttgaaggattttcagaacgagtgatcaaagaagatgggtctaaatcaaaaggattgagctcaattatatttgggagaaacattgcttctgttagtgaaaacagcaagccagccgctgttgagcgtgtctggaaatctgaggaaattaagcccagtggcattcttgagcatggtattgggacgcaccaggtactgcatctcaagaaaagtcaatctcatggaaatgaactatacttggatgggcgggatgccacagagaatggaacagacgatgcatcagatcggattacttctccgaattctcttgaacaacagagtggtattcacgaggcaggcagcagcaagcgtgtagatgaaagtcctaatctgtatcagcaaggtcctcgagcttctgtttctgcttaccagggttcaaatcaagcactctgtgggtctattttctcggttggagatcttcatcatactgataaagacagccgtcaactcgatgatacctccttatatggtgaacagatggacaactcaaacagtcaaacacctcatgattcacctttg

SEQ ID NO: 5260 - DNA, 2251 bp, Unknown
  misc_feature (1)..( 2251): cDNA_ID_2992383_gDNA_ID_1620775_Annot_ID_167707 3000 nt of promoter + ATG
tatatgtgcttgtgttcttcatccacctcctgttagagtctatagaatctagaatctacatgctgatatcacctaatcctgtcaagtatttgcaggcacaaattagcttagatgaacactctgaacaaacattcaaacgctcaagactaatttttgaagagagattcttggaaaaaaggaacacttggcaaacctcgcttgagtgagaactggagttcgtttcctctgatgcttgcgcctcagctttttcgttcgagtaacttccagaattcgaaatgaaaatcaggcaaccgatattagcaacacaaaacttctcttcatgatagccacaaagctaatatgtgcaacactttcaaatacattggataaaaaagattgaagttgaagaaggctcacgttgataatatagtgacccatatgagttcaatacaatctacccaaagaagcctttggtctacagggattacaccgtatgtaaccaagtgtgccaatggccagagtttccagcctgcctgcatagacaaaatcatgacataacctttagataaaatcaacagactaactttaagctttatatatgatcacgaagacacagggcaaggagagttaattacagtgagcattggcaaaaatgttgtcttgatttcgctgaaaatgtcagctggagattggaaacgcaagagccctaaaactgtaaagtagatactgttccaaattgcagaccatacggtttgatcaaatgcgacttttgcagggactacccaccattcttgaaaaggaaagagagccttgtacaaagaaaagattttagctttcagcccgttgttaatacaacatatcttgacagagcaaagattgatttttacctcacagaattggtagtaatagtgagacagtgaaccatggagtgtgaatccaacaagacctgatctaagaacacgagttcgatcaaactcaaacagcggttttccttcgtaacactgcataaagttacagccaaaatggtcagagagaactcaaattaagaagctttttagagtatttttagtttcttacttgtgcaatccaatctcctaaagaatacacaattccactaatcgccattttcgccaaaacagggtttgttttgagaatttgttcatacgcaaaccaattatgttcaggtgcatacctaagtatctcgtagagagtccaaccctaagaagaacaacaacaatcgtgatatcaatttcagtataatcccataaaggagcaagctttgcagagatagaagaaccaatcaatcacaagagagataaagaaaaccctaagcttacttgccaatagtcatgatcaatggttaaaagcttagtaaccgcaacggtaccggcggcgagaactatagctgcgttgatacctcgactcatcagccgatctgtatcttctactttatcttctgatagttcttcctctgccttgaaattgtcatttttaacatcgattgcttctctgtcttcaatgatcgatttaacgatcaagtttcttctctctgtaatcaatcgtttctgattcttaaaagggttgattcggggtaatgggcctgcggttttaatccgtgaagaaaccttcccggagacgatgatggtggtgggacaacaacagagagctgccatggacttgcacttctcaaaggaagatactttttctcttctcgttggctctctcacagccaaaggagaggtttttagacttagagaacaaaaaagaagcagcagactttggtgaccaaacggtaggaactgagccgaaccgagtttcggttaaattaaaaccaataaccggtgggttttaatttggttaaaaaccggtttgcacaatctcaaaaccgaagccgaaaacaaaggtcctaccgagatttgaactcgggttactggattcagagtccaatgtcctgaccactagaccataggaccagttgcttcgagtcctaccgttttggtttaagatctagacatgttcaaggactacaccatcgtggtctccgccgatacggcagtctgatcaaaacgattcaagagaatcaggcggaaggttttttctgaaattcataaaatcgggtgatctttgcaatatgcatacgtatatccttggtaaatgtattggctttgtttggttaacgatgttgataggattaggttgtgatcaaattagaaaaaaattgggtcttttctgattttttttggccaattctctgattatgagttttggaatg

SEQ ID NO: 5261 - DNA, 3000 bp, Unknown
  misc_feature (1)..( 3000): cDNA_ID_1015303_gDNA_ID_1620775_Annot_ID_167696 3000 nt of promoter + ATG
aaaaaaaaaaaaagaaaaaagcaaataaagaattaagagaaaacatattttgaaatttgaacagcttaatcaaagagaaaaaaaaaaagagaatttataggaagagaaggcataaattattttgagatgttgattagcctcttcgtcgtcggttattctaaactggtttaattaaagaatagtgtaatatttatgattttctgattttctccttcgagaaactatatttgttgtatctgttttgccctaaaaaggctatataagcctactataatgccatatcgtcaaagtttttgttttgttttttgttttcttgttttttacgtgcaagtaacaaatcaccatatcgtcaaagttacttgcacgtaaagatacgagaaccaatagaggaaattatgcagggtttggcggcgaccacagaccgtggctctctgagctatctaatggtgatttggtttatcttcctttgtgttcttcttgagtgcttacgatgcgcaatggctggaagctatcctcagattccaattattagcgatgctgcttacattcataggcgattcagtttggcagattattggcccacggctttgagatttcccaagcctaaaccaagtatttgagatttgagaaaccaaaaaaacactaattatacaaatttggcagattatggatttatcattcatataatgattcttgtttgatgacaaaaaaaaataaataatgattcttgttattaacttattagtattagtttttcattagcaaaaaccggcctaatttgtgataattgggcttttactaacaaaggcccaataaggtggagtgctttcactaaaaccgacctaaataaaatatagccacctcgtcaaaatcaggtagcttcatatttcttgcacgtaaagtttactctgtctcaccgattttgtttttttctttgttttttttttgattttttaatatcgaaaccctaaagcctcgaaggttctctcgccggagaagaaattatgcagggtttggcggcgaccaccaccaaccgtggctctctcaccttcctcgctccgaggtaacataatcaactcatgatttcgtttctccttttcgatctctctctctctggtcttttcgttctccttcttcgattctggagttcctcgttattttgatgatttgtgtcgcatcggttgattcttactagtcttcgatttgctatgatatgttttaatctttcgctctgtactgtttgaatcgtcaatttcaatgaaactcgaatcaatttgcctacaatttctgaaattgaaattgggttagaaatggtgtctcttttgctttaagatttggttactgcgtttctccataggcttttaaaatagatttgatgttgtgtttaccgtttttgataaaccaggaaccatagtccaatttcaaagaaatttgtgaatccaagagtgttctttcccaacgttgattcatccgcaaaattaagattatcagctagctcaatttcacggagatgtccacgagagattgctcctctttcaggtaattatttggtttcaagttttattctttgcttgttctgtaaccatggctttgaggcttgacagctaaatcatgtgctctttgtgattctgcagcaactgcatctgtggactttgcagcagcagcaacatcatccaaccagctctttgctaatggcttgccaccattagctcctggtttgagaagacaccggagaccgatagagcctgcaagagtggctaaagatgacttctttaaaatcaaactgcctaaaatcgcagagagacctgaatggtggtggaggacgttagcttgtgttccttatttgatatccctccaaatatctgatgttggtttctatgtccaaccttttctcgaaaagcacgacgctattggggacatgatatatttcatcccgggagcgataaacagatggccgacatggttcttcatggtgtactgctacttgggttatatgtgggtggtgaagaacaaagagctgcctcattacttgaggtttcacatgatgatgggtatgcttcttgaaacagctcttcaggtcatatggtgcactagcaatttcttcccgctgattcatttcaaaggacggttcggaatgtattattggatggccatcggattcacctacatatgtctgcttctcgaatgcatacggtgcgctcttgctggagtctatgctcagattcctttcatgacagatgctgcttccattcacaccctcttcaacttgggaggttttcagagaccactcaggtgaaaggtgaaaaactggccctttcgggtgttacatactttggaataggaacaagtctcttatcgagtctacacttatatgaatttagtctttttagtgtcagtgtcttatctcatgtgtaacacagaactctctatgagagtagcttataccaatgattttaaagctgaataatccggtcggatttgtccatgatttgaaagtacgcagatcaattcagctctatattgaacgtatctcacatgttgttggattgctttgcgaatttaaatacttcaaacatgcttttgtaatttaattttagtctattggtagactttgtacataactcataaccgccttaaggtccactggtttaattacattgaattttttttcggttaagtgggctccatgattccccacaggacataaaaaagtgatcattattggagaccacgtctctgcaacatggtaccaaccaaatcacaatgtcagtaattttacattccatcttctttacaaagtcttccttggtcttgaaactcttgactggttctaaacacagctcattatatgtctatttagtattttacacattggtttcagacggctcttaaaggtctctctagcttcatgtcaaccatctaaaccaaccaccattaatgttcctctgcccattttcaagaaattagaaatcatttttctctaagttcttgatcgtcgcc

SEQ ID NO: 5262 - DNA, 3000 bp, Unknown
  misc_feature (1)..( 3000): cDNA_ID_3076379_gDNA_ID_1620775_Annot_ID_167691 3000 nt of promoter + ATG
ttagttgcatatggtgccttgttgacagcttggtgttcgtaatggcagggatctatcgtctgattcatgtaatctgtgccacattcaattggccggttttgagatccttgttttactactctttcgttgttttgaaagaattatttcttttttattgtaagctaagaatttgcgaattttgcttgggcatgtgtagttttgtcataatggtttcttcgtttaaataatagttttttttttaatatgtatttatttcttgttagagcatctccaatgcagggctctcttgataatttgagagagttttgttgattttattgattaaaaaataatcaaaactagtcaaatttgagagaaacgactctctaaagagaggttttgggagctgagagagccggacacgtggcactacgtgataggttgattgtttttaacaaaaaggaaaaaaagatcctttttttctttgctcaggacatctcgttcccgatttcgacaaaaagctctatctctcctgaatttttccggtttcgttcagtgtggtgagttaaatcgtctgaaatgtggtgtatgtgattgtaaacgaatttttttaaagattgattgatttatggttgatagtttcggaaattttgttgaatctagtgaatcgatctatttactgtgatgtttgtttctgatgagatcgtttgctgtacttgggaatacagattacagaggaagaaattctcaaggtttctttgatatggagatgaacacttacatgtgctatgatctcttgtacaatgccacttgactgatttgctttgtttggctgattactttgcttggtcttgtatagttgatgtttatgggctatttcagcacttcttagtttatcttgtctcagattttgtgatttttttaatgtcataaattaagaaactttaatggctaatttatttcagattaggagatttcatccataaatggaaaaaccaatttcagtgtttatgttttgagctctcgaatgatcataatcttttgctgcatcagataatgtgattcttgagatgttactggcctttgactgtttgttttcatgaaaactgttttcttttccttgtgtgtgttgtttatgagacttccttgatggtgttttaggctactggtagctcggttgatcacatgacttgctttggagatgcagtggtggagagggatttttatccggagatgattcagtgagaatgtcggtgttgatgccggaattatgattttctccagaggatgctgataggcttgtggcttcgtttagtggtggatggcaaatgagaatgtcacttggaaagaaattgcttcaggtatatgagtaatctgattccttaaagttttatcttttcattgattttgaactgaaagctaatgtgaattgtgtatggctcttatctaggagtacatggcagtgacaacttgaaagatgatcaattattcttcatgtctctcattctttctcaatttatggtaacttatctttgatcattcaatttacaacatctatgtttgattctataattctatttcttccacttttgcctgtaagtcttttttttttttttggtaagccaagggagacaatgtctcccaagattaattaatgaaaaataaaattacattcgcacttaacgtgaaaccgtagctccactagtgtaatccaacaaaataaagcgtaaagaatctggaaccaaactaagcaaatgaaaacctaatggtaacgaaaaggcatagttggctaacccgtcagcaagacggttagcttccctataaacgtgtgaaatacggactctccagtcccttgatatgaagccatggcacaatcgtaccaggaaagacagcggatgtacctcgtttatccctgtcttcaacaaacccacaacaatctctgagtccacctcaatctctagccgtgtgactcgtcgctcccaagcaatgtagaggccatagtacactccccatagctctgccaaaggtgctgaacaaactccaatgttcagagcaaaacctcctctccaagctccttcctcatctcgtagcacaccaccagcagacgctaaacccggattacctctggaagccccatccgtattaagtttccaccaaccttcctcgggtttcgacctgtaagtcttttaatcaaagacacaaacaacatttattcttgttttacaaagatacaaacacacttctaatttttattttttttccaaagaaccccatttgagagaaactaccattgtactatcattttcttctaaaaataaatacaagctctcttcttacaaattttcacaatttatattaaacaatgggagagagccccatgagggactctcaccattggagatgctctaagagagtcattggtgcatagagttaactctacaactatttccatcttattttggtttttgtaaatctattttcatcttgttatcggtttaatgtgaaacccgaatgttgtacgatttaggctttgtgtaaaaagaaattttcacggaagtggacgaaaaaaattttgctctcaccgtttgtcaaagtgagaactggttttcacggtttgtcttttcattcaattttggaccaaattaccctgagaaaacttaataatggcacaaaccaaaccgtgcagcagttcgtatcggttaagttgatggcataaaccaaaccctacagcagttcgtttcggtttagtttatgcggttcagttttgaaaaagacaaaaaaaaaactgaaacgaagaaaccgaagaaaaagaaaaagagaagagagtaacagagagattcgagagagaattagaaagcgaaacgaaattcagtatccattgcttcaaaattcgacataacttcgaattgttgggtagttgaattgagccactgaactcccacaaccggggaaagttactgtttctcccggcgaagccaagagaaagttactgtttattccggcgagatagcaactttagct

SEQ ID NO: 5263 - DNA, 3000 bp, Unknown
  misc_feature (1)..( 3000): cDNA_ID_1808137_gDNA_ID_1620775_Annot_ID_167685 3000 nt of promoter + ATG
ataaattccaatggattaattataatcgggattttataaacaccttgacgtgatccaacatatgtctattctctctcttgctgcattaagattattgaaacacatgcggaccaaattaaaagtattatagaataaatactatgaatacaaggcatatatactaatcaaacatgcagaaccatgatagtgtagcagaaataagactttaatgcagtatttacttatcgaaattatatggaccataaaaagtgtcaatgtgtgaataaaatccagttaagactctaaaatctaaattatgattttaaataacgaattttcaaggttttgaatatgatgcattaattgttgcaaaaagaggacaagaaagataggatgcattggatggagggaaagcctgaaagcactccgcaattaaatttattttcatttctttaaagttttagttatgtttttttttttttttttttatctttataaacattactgtatccttctttcgtaaaaaaaatctatttaaaaaagaacattcgcatgttatgctttttagccattaccaaaatagagccgaccagaaaagtattataagtttataacacaatatacagagtatttataaatcattttcgttggtataaaatgtattttcaacaattttgctttacaaattgatattctgcttgtttgttttatatcaatcatattgatcattttaaaaacactagtcagtactcagtagtcatgtatatttttgtatgtattaaacccatgcactagatcagtagtagatttttttatttttttttcacaccaatcatagttagttttagggtgaatctgctgtataaccaaaatccaatctaaaattaataatataacatcatattcaaaaatattaaaaaattaacaaattagagtagtgaaaagacaaaattattcaacggtgaaagatacgcgctaaagaggacgtgatgagatatgtggaagaagagagagaataatctaatgttataaaaattaatattaccccaaatgattttaattgttgaattagtgatataaaaataactgattaaattttgcaataggtttataaaaacatagatttttttttgagtataacatgattaaaaattttaaaatctaatataaattatttaaaatagtggataatgtttgtataaaacagacaaataaaatagtatagaataaaactaaatagtatagaacaaaacgtagacaatccaaataaccgaattaaaccgctttgatcaaaaaacactataccctaagatacaacattgacaacccaaataaccaaggtaaaccgtagcggtgacgttgacgatggtaagattctgacaattttttttacccattcgttaatcaatagtttaaatagacaaacaaatcgaaatcgaatgaattggtttgtttgtttgtaggataagttaatagaattacataaacattttctgggcaaatcaaagaaattggaatctttaatagactaaacattgatgtcaaggatatgagtgattgtccgttggagattctattgccttggtgatgcaaacggatttaggagagagagagaaagagagagagaggaattgtgacagttcgattgtgaacagtgaggggaagaagaaaagtggagaaaaaatatcgagaaagagagggggagagagaaaatgagaggagaggcaaaggggcaaaattgaaaatagtatatcaaatatagaatatatcatccatcttttttgttgatgtgattttcttaattataatatttttgtgcgttagttctgcaaattctccttagttttaggcaagtttgcaacacttaaactctaataccatctccattggagttttttataagagtttctcacaataaaaaaaaaaaataatgaaaatgacggaaataaagtgtagaaagttaattctgagatactctttacaacccatcatgacatttctcttctcactattggttcaaatttttaacaatttttttttttaaatcaaataattaaattataatataatattattattttttgtctaaaaaactttgtgggtttctcatagatggagatgccgtaaaacatatgagaaaacaaaagataacctctgacaaaaaaaaaattgaaaacagaagataatgttatcaagatgcattattatattggacctaaaacgagattatcaaacaaaatagattggtgcataaagcttgtgcatgttaataataggctacaatcttaaattcttataaggaatataactttttaaaatatgatttttggtaaaaactttaatttaatatttttctttggaaaataacattgggctattaaatttaatagtggtgaaagattcaatgcaagaatggcaccggatatgaggagattttcatatttacgtgcctaattaataatgtgaaactgattagccaattaagaaataaaatttgtattggggattttttttttgtttaaataattaagaataaacaaaaagagagaaagcaaagagacacacatgcaagcacgtgatgagtgcatgtctcgcagagtctcacgccatgcacatttcatcatatcaacttcgttgactccttctcagtatgtctttacctttttcctcttatcaattcaaattattcaatacatgttgatgttttaatttaaatgggctataatgaagtttatcagcccaataaggcccacttatagattggtttattttttaaaatttacaattgttatattggcccgttttaagcccattaagaatcacatcatcaagaaatccaaaatctgaaaagtatgtggctatgtggaagcagaggctggcgcgtgccttatctgcttctctctctccagtggtctcaaatctctctgtgtgatcccacttgtcatcctcctccacaacataaagcttgagaccataaccctttagcgttttcggctaaagctttcgctgactactacaaca

SEQ ID NO: 5264 - DNA, 3000 bp, Unknown
  misc_feature (1)..( 3000): cDNA_ID_2053058_gDNA_ID_1620775_Annot_ID_167681 3000 nt of promoter + ATG
gtggaaagttctagatatgttgcacataaagacgttattcagcatcctcagttcatgagaagctatgggtataataagccttcgggatacttgaaagtgaagggagagagtgagaattttgctatcactgccgtaaagagacaattaggaagacaataccaagaggatggtccacctctgggggttgaatttgatcctcttcctcccggtgcatttgagcctcagactaatcctatagttcacggtgagtcatgataaaatgtttcaactttacctttaattttctggtttatgatgttatgagtattgagtaagtggctcagagaagctaaaaccatcttcttcgtgtgtcagattgtgaatgcctttacccatgtccagtcggatttgattgctttttctatcaactgttttgtcagagccaatatatgttgggaatcagagacggcctcaccttccacatttacttggaacgaggaagagctttaatcctggtcctgtaagtgaacattttctgtatactacatacccatgaagataatataaactagaatcttagtctgccatcacattctttggctaaattatcttactttctttgaagtattattaatattttcgttttctgtcttaatgtctttatagagctatgaattagctcgtaaatcaaagttgcattcgccagatccagattcagaggatgatgagcatgatgatgatgacaacataatggttggaatggagcctggtctaagagataagaaaagttttggggaaccaagactgaaatccccttctaccagtttctataattctgtacctcgccacaaatcgtttaaagagacattcaaaggttcaccacgggaaatccctgtaactaacagcaagaagggttggataagttccaaaagttgggctgaagggtcgagaaaccatctggttgccaacgtccaaaatctttctggaagcaatattgaaaccaatcagtctcatgattatgataataatatatctaatggcggacgcaagacgggatatctcactaaatcttcgaagctgttacctccgagtagaagcagatcccctgagtcaatggatagaggtccatcttctgggatggtaaagatttgtctaatacttccatgtctacatgttcctttcttgcccttttatggaaatatgacttgtgttttgtgtgatatcttcttttaaaggcaggaatatatcacggggagaggaatcaaatgaaaatgcagagagagaaattgcattcgactgatgaaccaccggtgagtttgatggttaactatcttaaaaatatagatattgatgtatattttaacaaagtttagaggctctatcaagttcgtgttctgacctttaacgaatgttaataggttgccaaacgagtgaaacatgggtatattcagcaagtatatgcaccaaaatcatcatcatacagcgagattcttgaacgaaaaagccagataaatcggttagtaaccaaccattgtgtaatgcatttattgtcccaaagagatatcaaatcggcttattggatcatactgttatgtttgtaggtctggtgtggaactgccttctagtttaagcggggacgatgagactgacgaatctagctcgtcaatggattaagtaaagaaaggtacaaaggaagattaggaaattccggtttgtatagatatatgatgaaaccggtttaggatgtgaaaatgttgcatcgtgtaattggtaaaagttagagctctcttcattttggtaactaaacggtccccaaagagatacagtgagccagtaatgagcctttttttgtttaaatttgctcctaaaccgttaccggtttgaccgaattgagtatgtaaatcccagtgattacaaaataaccaaagtaaggcccatttattaataaagctcaaattaggcccaaaatattatgatagtccggtttagtcgtaaaaggcggttcggaaatgtgtgactaggagatttcgtcacatgagaaaaaatcagagccgttgactagttttcgtagaaagtatgtggtacaattttgattcggccaaaaaaggtttttttctttttcttttagggttagcgttgctttgcctcaaactcaaattttgaagataatttttttggtttctctgctactgatttcgaatctttacgcttaatcaattattcatctggattttcaaatccaatccttttcctccctggtaagaatctctcttcttcttcttcttctctctcacgacgattccactgttctccgattctgtgttagttcctgcgatattttccatcacttgttcgtgtttcgttattacgggtttgtgttttgtgaacttgttgacctttgtgtctccgtaatttcgtccaacggttgatgtttttgattgctgattagatttttgtcggtaggtattgaaaaagatgatctttatggattttgttttctgtttcttctttcctttttgtaatctgacttgcaagctttttgctttttttgtcggtcggtgttaaaaattgttccttttctcttgttcaattgtttcctcaggtgaccaagtaattggggattaacaaagggactggggctttattaagctcgaaacaattgttcttcactctggccgcttctgcaaagtcgtgtgcttctcgcacctctgcgcaggtgtggggtggccttgaagtggtgacttcactctgtcttccaaggatttctctagcttctatcatttggaggctccgtcgtgtttctgagggtcttacccttgattacggctaacatttactacgcccactataccacctcttaagcttttataagaactttttattcgtgcaaaaacttaacttggatcttaattgtttctagtttagttgtggttgtaaagtaaagaaccgtttttttgtggtttggttttgcttttttagtttccgttggtgatgtagttcgatgttattaagtttgacaca

SEQ ID NO: 5265 - DNA, 3000 bp, Unknown; identical to SEQ ID NO: 5240
  misc_feature (1)..( 3000): cDNA_ID_2025218_gDNA_ID_1620775_Annot_ID_167657 3000 nt of promoter + ATG

SEQ ID NO: 5266 - DNA, 3000 bp, Unknown; identical to SEQ ID NO: 5263
  misc_feature (1)..( 3000): cDNA_ID_1808137_gDNA_ID_1620775_Annot_ID_50271 3000 nt of promoter + ATG

SEQ ID NO: 5267 - DNA, 3000 bp, Unknown
  misc_feature (1)..( 3000): cDNA_ID_1828107_gDNA_ID_1620775_Annot_ID_50273 3000 nt of promoter + ATG
atagccctcttagtaaacgccattctccaatatgcatcatataaattaacgcaaacaatgaatctggacgtctaatgtcactttcgtcagagtaaatgggtcgcagtattagaggaatttgaaaaacaattgtgttaagcgtcaccatcacccatacaacaatttaggcatgccatcataaaatttggacagatattgggcttttggttaaattaaatgggctgaggtactgaactaaagtttattaacctaaacttgtacaaatattgggcctttggtttgtttaaatgggtctaaggttcagaaccaaatttggggctttatcattctgattaacaagacaccggcgtgtagtgagcttgtatcagctgcagagtttctctcccgattgacaaagtcgattgagcagtagggtagctttagcatccaataacgtatatcgcaaagaagaggtccaagcaagcgatgatcctcgtcattgttgagtaacgttacaaggtctctgttatcggtttcgaaccaaacataacgcaatccgtgaatccatatcacttgtaaggcatggagaaacccgagaacctccgcgtgtagtgagcttgttgatggatgtagtttcgcacttccacataggattgtatggccgttactctctcgtattatccaaccggaacgtgtataaggacttccttgcataaacccactatcgaagttacatttgcataaacccatatcgaagttacatttaacccagccaacagggggaggttccaactgactgcttcgatttcgtattgagggttgtatatcacttggtgcagcattctcatttgtattttcctagggctcattcacgttaagccactcctctgcttcttgaatacctttcttcgcttcacagtctggagatcgacttttttgttgaaataaaaactcatttcttgatttccagagtcgccacatgatccaaaacggaagatatttatcaagaggattgtttattaacacaccggcgtttgtatcaaaatttgctttttaacaaaacagtaccagtccgttcaaagataaattgttcgtagagaacaaataattagtctttcaacatgttttaatgaaatctcatattatagtcatgttcgtctgataatttgttaacccattctctagataacacaatcaccagagaccaaactgatgcgttaagacatccaatttttgaggtactcaaaaatagttttaataatttttgatgtattatctatcgtagatttctagtatcgacatattggattcacaattgaataagaaaacgtattcaaacaagtaaaaccaaaaaccaaagtgtaagatagtaataaaaagcctcagtcaaaatccatataacttcatagaaattacagtttctgccaaggggttctccctgtaaaacagggtctcagctccactgcacctcgaaattggattatatcatcatcagccaacaaaaagaaatatcactaaaaaaaaaaggctcagaagttttttggtatacagtttcttcgatcaggaattatctgaagcagaactggttttaatcatcactgccctcaatacaaacaaacaaaacaacaaagaagaaactttaagaggctcatattaagaaattcaaccattgattatcgtatatacttcatagaactaagtctcagaagcgcggataattttgtaatcatagcccaaaaacacaaattcatcacagagaataacaaaatctagacattgctttgacacagttaagccggattataaaaagagacagaactgcaacacgaatggcatcaatctagcaggagctttggggcttaattcttcatgaattattatcagactagcccgggaggctcctgcggaaatctatgtaaccagagaccctaaatctatatatcaaaaacaaaactgaagaaccctaaattaaaagctatcgtgaggttgagaatgatttgtatatatgattcaacgcggctattatatagagagtaccctagccctaaaacaccgtctctgaaatgtcgtatctaccctcgttcattgactttcctttccgttgttgtcggtttaatgtaaccgaatgttgtagtatttgggctttgtacaaaagcccatcttcaaatttgacaatacgaaagcccagtgtcaaaactatccccacgtctaattgatttgccttttcgtaatcggtattattgtaaaccggcttggttttcatgatactactattattttttactcgctaattttgtttattccgaaaccctaaaacctgtcgccgtcgaggaaattatggtgacaaccaccgatcgtatctctcttacattcctggcctcaaggttttttctcctctcatcattcattttgcactatttgatttttgtttttatcaccgttttactcatctgcttcttcgttttttctgtgaaatgtgtttttttttcttcgctcgtagaatagagaaagctttaaaagtttaaatccttaattttgttaaaattatatacatgtatgaatttttactagtgtataactagccctgcatagcctttaatgtgttttcgtaaacaaataaagcaggaaccaaagtccatcatatctaaagaaatacttgaaaccaacaagcttatgttgtttctccaactttggttcaccattcccaaaatcaagattgacaataatctcgagtttgcaaagaaagattgttcctcttctaggtaataactactaagttattgtcaatattgaaaacttgtcttgtaatggatgactcttttaattaatttactatactgaatatctgcagatgtggacgttgcatcaccatcacctttcaaccaaatatttgttcatgaccggaggctaacaaagcctgtgagtacactgagagcatctaaagatggaaactcgatcccatcaatagcagcaaacgtattgctaaagagacttttcttgacttttaacataatcattgga

SEQ ID NO: 5268 - DNA, 3000 bp, Unknown; identical to SEQ ID NO: 5261
  misc_feature (1)..( 3000): cDNA_ID_1015303_gDNA_ID_1620775_Annot_ID_50276 3000 nt of promoter + ATG

SEQ ID NO: 5269 - DNA, 3000 bp, Unknown
  misc_feature (1)..( 3000): cDNA_ID_1828099_gDNA_ID_1620775_Annot_ID_50277 3000 nt of promoter + ATG
tacttgagaacatcagagattgaacatttatttactttctggtaacaacattcatgtaaaatccttgccaatttaccagcatctacgtagtgtcacaaaacctcaactataattttacgtactatctaaaggttgtgcttggttttgacctcaaactttgctttaaagctcatctttttgcgattcttgaacgcgttgctttgctcatcccaatagttagggaacttcaacctcgcaacagcgtgtggcataaatcagtcagtcatcgtattcgtaggtaaagctgttgaagaattaaaacgcttccgtatgattagtaaaaggcacactcactgactcacatcttatatctgaaagcaatatttttttcccccaaaacgatcacaaagtctgatgaatgaaaccctatatttcaatatttttttgtagctactgctttgatgttcattgtccaatggattttctcccattttctggtaagattttgaactcttatgcgttttaattttgattccttactatctctgcagcattggtcgtttttgaaggacttgtcctcttacgttttctaaaaggataaaagagcatgtcttcgttctcagttaggttcttcaactagatttaagtcatcatatttgattcaatttagaactaaacaaggtttttctgtgataaaattccaaagttaacttcttttatttagcaattggagtttgtaattttcgttgaatttgcctcagttctgctacaaaacctctattgggtccattttgttttcgggttttgaagactcttgagtttctgaaattctggtaatcttgtaaaccttgaaatgattttggtcaatttcttcactatgtcatgtgtttatgtgtacaaatgagcaagactttaatgttggtttgatcagtaaatgaattgctgatgatgattgtttagtattcaaaaagtctagaacaagcaagagttatcttcattatgatactaaaggtattattattactagtccgaagaaaggttctctttttttgaatgcccattttgtgcaacttcttaaagattattatagatcaactgtttagttcaaagaagtctaaaaaaaatcacaatgaaaattgaagatgaagaaagattttcactttctcaacagagtagtatagcaaatcgtttttcatcaaattcaattcttttgagtgaaagatcaatatagtaatcataaagattctgtttttacaatgcccatttctctatgacatcgaatgagactgagagaaatatcaaaggtttgacattagaacagtaacactcatcactcagaaacacaagaagaaaacgtagctgaaagaaccgcgagagggacagagctaaaagatgaagatagagaggaagatcgattatgttctaagcttcataactagtaccatttctccttgtaaagaagcagaaaacaaacaatggagctgagagatgagggagattcagggtttggtcgaaagaacaatggagtataggtttggttgatttagggatgccacgtgtacttcatcagtttctctcgtctgttggtttcacctttccagtcttcttttttagttattataatacaattatcaaaaaaactactagcttcttatgagtctgagaatgtggtttagccttatgagtcaggttaactggaggaagtcaagatacctgctgacctgggaccaataagcagaacgaagaagtgccaagtctagctctaatgatgcactacccggagctaattgagcagatgttgactacaacaccaagttggccatgacctgttgttgtaaatcagagctatttcaaccagcaaacaccacttaggcttccccataaatatgtggttaaagcttaatcaacgacaattgatgcaacttcagtctcagggggttaatgctggactatcttctgaccaatgtccaagagtagcagagcagttgagatgattttcgactttggtttttactctcacaaaacataattttgatatatgtaaatggatatgctgatgactgtttattcaagatctagttcaagtttggaagaacgaaaagttatattctaaacagttattgattagcaaacttttcttcacagttcattatttctcttgatcgttgtccactttcgtgtaatacacattcgtcatgcgcgcgtgagatatggtcgattcaacaacggtcacgcgcctttttgcgtgtcagagactttcagcttcaacgtttttcgttaaagagactattcaacgttaagctaatcccattattaaagaaaaaaaaaccatatgataaaataattaatcagattgattttgccaacaatttaagttaaaaccctgaattttaaaaactaatcactttttggattctcaacgcttctgtttctcatttcttctctcttcagagtccactccgaatctaatccatttatgttttgttcttcgaagaaattgacatctttctctctttgtgtctccctcattaactttgtttttgtccaaggacaactctgccctaattttacgctcctgccgtaatttcattcagcagcatctgtcttagtccaaggacttgtcttgttatgtttttttgaaagacacaaagacttaaactttaagcatctgttgattgttcggttcttgaaactccgatttaagtcattagatctgacttagcttaagactaatcaagcttttttagctgacatgccaaaagcaataaacagtagcaaaaaaaaactgttccttttattcggttggtgcattggttgttggtgttcttatcaactttcttcttctattaattagcttttggtttgggtttttgtcatttttgttctagttgcctctattctgaaaactctgcagcaacaatctctatctggtaatttatctttatttgtacaaaagattaagattttgattagctggttaggtgttcaagagaaagttttgatctttttttgggggggatg

SEQ ID NO: 5270 - DNA, 3000 bp, Unknown
  misc_feature (1)..( 3000): cDNA_ID_1828083_gDNA_ID_1620775_Annot_ID_50282 3000 nt of promoter + ATG
aaacaatggagttactaaattttggtatttcgaaaattagaaaatcgtttctttttcagtttatatgattatgagacatcgacaacaccagcttaaaccaaggatacaaatcccgatagtctttacaagttgttataaaggtaagtggaaaagaatgtttgttagtaagtactaagtagttaagaacttaagattactatatagtgcatgcataagtcattcacaacttcataaaattgcattgatttagcatacaaactagattttttcttcgcattgttttttttttcttttctttgcattgttccactataagcttaaggtgaaataaccatacaatagtcaatactcaatagtgtggggtggcataaagttgttggtcgagagatcatgtcacaagtataactatacataattttgataagggccatataacacgattgaaaaatgaagaatgcatgataaaaggaaaaagaagtggcataattttgataaaaatcaaacaataaaaacatttattagatgtctcaaagaagcattaaaaggcaaaggcagagagagagacaagtgggctaaattgaattgatagaatacaaaatggaaaagaaaacatttattagatgttgaataatgttgaattgatgttgagggagtgatggcgcatactgttactgttaactaagagtgtgtggcacacatttttcttgcttttacattctaaccagatgaattcttgtcaacagtatcattcatgtttacatgtactattagtgcatgcattacatttaaatatataaatgcacatacatgcatactcgtaaatttacctatgactcgtctaattggagaaaaggctccgtttgggcttttaccctgtccaacgtaggctaggcctaaaaaatgacccaatctttagaactcggtgagatttctcttagtattttttttttgaaatctcgttataaattccgaaactttattagagcaaaaagtaggtatcagagcgttgagtatatttccaaccaaattaaaaacagaacaaacacgtttcttaatttgaaaatctgaggctaattttatcaaacatgcatggcaggtatagagaaagtatacacacaaatactgaaatgctcaaatgcatgtatacgaaccaaaaaaatcatttttttttttgtaatatcatacacactatgatcactaatactcatgagccatttagcaaccaaaaaacttacatgaaaaaagttagaatctcgtgatcgtatttttctacccatgcaagcgacaaaacattattcaaacgtgtgaagtgtaatattcgtaaatgctttaaaatttaccaaccaagatccaaaaatatgtctaattctgaaaaaaaaaattagaccaatcaagaatatttttgatcatcttgtttaataccgcacaccgtctaaaaacgaacacattttgcatgtaaaggtgagaggtcaaaaatatgtttgtcgaatatccccaaattagaaacatctagatatttgttaacatataacttctttaacgattgaacagaactataccatctcactaatcgatgtatctgaatattctttttaattttttccccagcaaaactccaagattggttattttttttccacacacatcacattccaacggtccataatcaaccaagcaaaaaatatcagaggatttgtttgttggcccatccatcatccatctctccatgtgggtaacaacaatgtaagcgaaattattataaagttttcatcaatagagttagaaaaggaaaaaaatgtggagaaagatcaaaaactaaaacacataacaaccttataagaagatcactataatcatacaaagattgcaatgttatcaacaatacattgttttcttaacctatgattaaagttagtcagactaatgagaagtggatgaggagctgacgtggaagtgagtgacgtcatctgacagtgaagaacacgtgacactcgccagcaagaaaacagtaatgggaatccaattccaactaatctttttccttgcggctaattttgtcttttaccgttaccatttcaacgtcttttcaccgtctctcctccacgcgcgtaccattcaaccttttatcttaaccagcggtttagacccggttaacaccgattaaactgagacatcgtccggtataactaacatccaattattctcgttatcgtccttaaaattgacaactattattgaaacaagtctttggtcggattagaatcttgacgcaacttgtcctcaaacataatatagggatacagttgtacacatccattaagttaaatcattgattaattaagtagactttatcattaattatgactttttagtactgatctcaagcaaatagaagcatcagtcaaatttttgtttctaaataaacaaatctataaacacagtttcagtaatgaagaacttaaactctgtcttaaacccaaataatttctgaatttctccagttctttcttcttaatttgcaggttttggtcccaccgcttaaattaggaaaaagtttcctttttcgttctgggttttcttctctgattattatgattcattcctcgagtgtcgagctttattctcaagtgtcaaattattgagggtaaaatttacttcaacgacgaaagttcattgaaccttagctcttacgttgcgtcttaaatctcattctcacccacaaaaaaagaaaagtttgcattttttttatctctcaggattgggtttttgggaatttaaaggaaaagactttacccttttattcgttttaatttcaccaacccattaaagctcgttgatgacgattcctctgcttttccagtaagttttttgtaatctttcctcttctcaagattgctacttgtttaattcctcccttatggatcttgtcgctttcagattcgtggacatcgttttgttcgattgatgtttcgttttactctactctgacttggaacaatg

SEQ ID NO: 5271 - DNA, 3000 bp, Unknown
  misc_feature (1)..( 3000): cDNA_ID_2992383_gDNA_ID_1620775_Annot_ID_50283 3000 nt of promoter + ATG
aacatatcttgacagagcaaagattgatttttacctcacagaattggtagtaatagtgagacagtgaaccatggagtgtgaatccaacaagacctgatctaagaacacgagttcgatcaaactcaaacagcggttttccttcgtaacactgcataaagttacagccaaaatggtcagagagaactcaaattaagaagctttttagagtatttttagtttcttacttgtgcaatccaatctcctaaagaatacacaattccactaatcgccattttcgccaaaacagggtttgttttgagaatttgttcatacgcaaaccaattatgttcaggtgcatacctaagtatctcgtagagagtccaaccctaagaagaacaacaacaatcgtgatatcaatttcagtataatcccataaaggagcaagctttgcagagatagaagaaccaatcaatcacaagagagataaagaaaaccctaagcttacttgccaatagtcatgatcaatggttaaaagcttagtaaccgcaacggtaccggcggcgagaactatagctgcgttgatacctcgactcatcagccgatctgtatcttctactttatcttctgatagttcttcctctgccttgaaattgtcatttttaacatcgattgcttctctgtcttcaatgatcgatttaacgatcaagtttcttctctctgtaatcaatcgtttctgattcttaaaagggttgattcggggtaatgggcctgcggttttaatccgtgaagaaaccttcccggagacgatgatggtggtgggacaacaacagagagctgccatggacttgcacttctcaaaggaagatactttttctcttctcgttggctctctcacagccaaaggagaggtttttagacttagagaacaaaaaagaagcagcagactttggtgaccaaacggtaggaactgagccgaaccgagtttcggttaaattaaaaccaataaccggtgggttttaatttggttaaaaaccggtttgcacaatctcaaaaccgaagccgaaaacaaaggtcctaccgagatttgaactcgggttactggattcagagtccaatgtcctgaccactagaccataggaccagttgcttcgagtcctaccgttttggtttaagatctagacatgttcaaggactacaccatcgtggtctccgccgatacggcagtctgatcaaaacgattcaagagaatcaggcggaaggttttttctgaaattcataaaatcgggtgatctttgcaatatgcatacgtatatccttggtaaatgtattggctttgtttggttaacgatgttgataggattaggttgtgatcaaattagaaaaaaattgggtcttttctgattttttttggccaattctctgattatgagttttggaatggttggaatggtagaggagggtttaggcgtaaggtaagagaaaatgggattgaacccaatttgcatacttcaaattctctggtgagcttgatgtttcattgatttgacaaagcatgtatttgagattgtgggcagttgcaggatcagactacatgttacttacaacaggcatgatcaaggagtattgtaaggtagggtagagaaatgatatgacaatgatgcaggttttgagtattgcctagctttgtatcaagatttggatgagaagtgactttcaggcttgtagtttagtgattggagattctgcaagaagggaaaattacatgaaggttatgtggtttttctgcaatatgattcgttaaggaggccaagccaaatgtagtcaaatacaccacgttaatgattcatccgtatggggacagcttagatttttctgtgtgttgcatccaaagatgtactgtgtacccaaattccgagttcaccaaccagggatgaatgatactgtgtacctaaattccaaagatgtactgtgtaccctaacagttttcgtctggttaggagataatcacttcttgaaagcagtttgaatgtttctcaaagaatggtcatgtactacccacgttttttgtttggttatcttggaggtaagatgagctggtgacaattctgtttttggcttatactaagattaacgtggagctagtcctttgctttacggagctttgataagatgttttaggatttaattacccatcaagaagataatgagggagaaaaaggctaaagagattcattcgacttgcaaaaccatggttggaattttgtgcacatagtgattgaggagagagatagaaagtgaagggactttaaatgttagacccgttgaaactagtggtgggcctgtgaaggttgaggttgagggaagagccagcctgcccaaaagaaaaaatatcttgtgcaacttgtgatgcttggtagctttggtcctacatgcttatccagatatttgcagagaaagaaacatcaaaaggttagccacattataggaagaactaaaattttctaatgctattttgctcaaataggtgtttgagagctctgttcatttaataatgtccatatttgtggctatgttcactgaattattaacagggaaagcagttgaaagatagctaacatgatgtaggggttttggtttttaggaggcaaagaggctttcatgggaccacactggatgatagttgcaaaatacattgtggttaaggtttgtctcttgagcacatgttgagactgggatactcttctgtgagaacgcattaatagctgtattaagtgttgatagaatttgtggacggtaattcccgtgacatttatggaggtatctgtgatgtttttcctattaaaaagacaaataaggagacccaaaaaaggtgagaacaactatacacacaaagaaatttcttttgtctgaagacaaagggagtggtcaatgaccagtactcccctatatgttgggttaggacttctactcattttgcatcgttgagatactatactgccttgaaagacttggtattggatg

SEQ ID NO: 5272 - DNA, 3000 bp, Unknown
  misc_feature (1)..( 3000): cDNA_ID_1977521_gDNA_ID_1620776_Annot_ID_50291 3000 nt of promoter + ATG
agcttttttggcttttgagttttaaaaaaaaaagtgtttaaatttcatttgtaactgatcgattttgtcacttctgtgtagattagaggttaaacgattttgattgtaaaggcaacaatgtaatctttttctttttgttgataaaaagtttgtgcattgcatttgcagataatttttttgtagaatttaatctatttttctaatacattaaaaaaaaagcagtgtgagactctttctaaacgaattatatttaacgatcgagattagtttttagtcctgagatcagtgatcaatttaggagagttgactacaatttcaattttacttttgtaattagtgggccttattgttagcccattatatgcttataatgtggttttctgaatacgggggaaattaaagttgactttaactctagacctggtttaggccctctaagaacttgtaacggcccaattagattgctatatattcacgattgtgcagttggaaatattaaaaccaaaaaaaaaaaatagaaaggcgggaaagagagttagttacatcgtcttctccggcgagacaagacgactgcgattggatttctctgaagcgcaggtatataagtgatagatcaccattgatactcttcaagaagatcccattcaattcaagctttatcgagtaagatctttattttattccatggaaaccgatttgagatttacacgaatgatccaaatacgtctcatatcatgcgatttcaagacgaaaatggcgtagttttattcaatcgaaggcaattttgaagatatcaaaaagatcgatgcttcaattgcttgatctctaacgtgtcagtttctttctttttgttcagcgacgatccttcttcagtggccatggtttctggagatacaaaatcggatgcgaacaacgttacttatgggttcgtgaacttttgtatttcccaaagccaattttgtggaaatgagagagatcgatcgatgcttaaagctctgcttcaactaataatgtcaatttctttctctttttttcagagaccttccttcttctccagcggctacggattcttcagaaccttcttcctatgcgttagtgaattttattgtattctttagaaccaatcttttagaattgatctttgcttttctggttatgttttgattgatttgttatctcattttcagtgaacagcttgaaaggctcatgatgatagattcagaagaagaccggggtccctctgggtttgtgaccttctcgattctttaaccaccaatctttgttttctctggtctatctatgttttgatattactctttttttgttggttttgtttcaggtttacgactgatgaattgatctttcaggctttagaaacagtctacgagaatcataatggtcttgatgtcgatgcgattttcacttttatcaaggttaggaggatctctctgtctctataagtatctgtgtttcatggtcatatctcatgagtagtgtatattggttctgaaatgtgagtcaatagcgggattacacaatggaacattaggatctgaaaatttgacttcatgttccatcccctaaaagtcttccttttaaagtcttggttttgttgattcctccgttgttcttgatcaactaaccatcatgttcttgtggttaatataaattgcaggaaaggaacgagttacaggaagattttagggagcggttggaaaaccagctgagatatctagtttctgaaggccaagtatacaaggtaactagtttttcagagttgcctcacactaatgttaagattcagtagttttgtttgatcagttcagaaaaacggaaaaaaaaacttgtaaatgcaggtaggaaacctctacaagatcccccgtggtgtatttgatactccagttgtgtcagtaggagattcaaatcaaagagaaaccatggatccagaagattccacgggcacaaaggcacaagacacaccaagtacttgtgcttctttcgcaccaccaacaacagaagtagatcctcggataatcgcattagcaaaagaagtcgcagaggcagaacacttggagttggaagcaaaagaggcatacgaacttgcagataaacacgcccagttgctaaaattagaaagcaacataaccttgcagttagccgtagaaatccttaatcgatgtaagtaatgtccacctcttaaccttttatcatcatcatcatcactgactttttcatttgatttggtccttgcaggtgctaacggtgaaaagattttcctgctgtaaaagctttgaccttctggtccggttcaaggtggatatattcgatcaccggtttctttttagtgtttttggttttgagtaaaaaaaagagtgtagatatgaaatgtgatttcatttgactaactagtcatagtttgttactttgtggttaaatgattttggttgtgaaggcaacagactattctgttagtttttgttaatacaagtttttacagataatgccaatcttaagaattgaataggtttttctaatacataacataagaaagaaaaaaagaaagtgtgtcatggtgtctttagcaagtatttttaacggtcgagattaatttcaaatactgatcaagaaagaaaaaaattagttatgagaattacaattttataatgggcctcattgtaagcccattataagcttacataggacttttatgagtttttgttctcagtctgtccctttaattgttttttggctcttctatcgcccatcgcttgggagattaaagtctgaactttttgatctcaagcttctccatctctccctcaactcaagctcctggttcggaactatttactttcctatgcgattggttgtttataagttgatttcagagttcggattcttgtactcattagatgtccatataggtcttgtttactggtttaattggggttttatcaaggaaataaagagtgtttagggtttgaatttccgtgtttgcag

SEQ ID NO: 5273 - DNA, 3000 bp, Unknown
  misc_feature (1)..( 3000): cDNA_ID_2161790_gDNA_ID_1620776_Annot_ID_167753 3000 nt of promoter + ATG
cccttcctttctggttgttggcaaacaatccggaacttaaagtattacagttgcaggataatttatttaccatcttccagatgcctgctacaatagtgcatgagttgcagttcttggatttttcagtgaatgatattagtggactgctccctgataatatcggttatgcgcttccgaatctgttacgaatgaacggctcaagaaatgggtttcaagggcatttaccatcttctatgggtgagatggtaaacattacatcccttgatctatcttataataacttctccgggaagctacctagacgctttgtcactggttgtttttcactaaaacacttgaagctctcccacaacaattttagtggccattttcttccaagagaaacaagctttacttccctggaagagttgagagttgatagcaactcattcactgggaagatcggagttggtttgcttagctccaacactacgttatcagttcttgacatgtccaacaattttctaacgggtgatattccaagctggatgtctaacttatctggtttaactatcttgtcgatatcaaacaattttttagaaggtacgataccaccatctttgctagccattggctttctttctctcatcgacctatcgggaaacttattatctggatccttaccgtcacgtgttggtggggagtttgggataaaattgttcctacacgacaacatgctcacggggccgattccagacacgttgttggaaaaggtccaaatacttgatttacggtacaatcaactttctgggagtattccacaatttgtcaataccgagagcatatatattcttttaatgaagggaaacaacttaacaggatctatgtcaaggcagctctgtgatttgagaaatatcagacttttagatctttcagataacaagctcaatggcttcataccttcatgtctatataatttatcatttggaccagaggatacaaattcatatgtaggtacagccataacgaagattactccgttcaagttttacgaatccacatttgtggtagaggattttgtggtaatatcctctagttttcaagaaattgaaatcaaattttcaatgaagcgaaggtatgattcttattttggagcaactgaattcaacaatgacgtacttgattatatgtatggaatggacctatcaagcaatgagttaagtggggttatcccagcagagcttggaagtctctcaaagctacgagtcatgaatttatcttgcaacttcttgtccagttcaataccatctagcttctccaatctcaaggatattgagagccttgacctttcgcataacatgttacaaggaagtattcctcaacaactaaccaacctttcttctcttgttgtctttgatgtgtcttacaataatttatccggaatcattccccaaggaaggcagtttaatacctttgacgagaaaagctacttgggaaatcctcttctttgtggaccaccgaccaatagaagttgtgatgctaagaagacctcagatgaatcagaaaatggaggagaagaagaagatgatgaagctcctgttgatatgttggccttctattttagtagtgcttcgacttatgtaactacattgataggcatttttatacttatgtgctttgattgtcctttgcgtcgagcatggctccgcattgtcgatgcttccatcgcctcagtcaaaagtatgttgccttaaaatcatttcacttcagtttttacgtaccattgtgtttctataactatattgctttggattttacctgacatggttaataataatgtgtgctttggattttaccatacacggtaatgagtcgtatggaagaattattgtgtacgatcgatagttttttttgacagatttattcttttagtgatagagaaaaaagtaagtaacaatttttttttaagagatatatatttggtaacgacagagctgtttctttcaatggatttatttttcatagcgacatagttaatgtaacaaattaatgactaaagtagcacaacattgactctagacttattctacgtcctagtaaatttgttaattaatggaatcaacttttagaaatagttgtgacatagtaagtccgtattggctgtgatagacttgagtctgattgaaatgggaaaacgttgatatgaaagtggtgacaaacttaatatcaccaaactaaattactaactctctcataactatgaatataactgtcacaattacaagtataactctatcataactcataactatatatggttaaatgagtatgtaactaactatagttcacaagggtaatatatatagtaaattcttgattgctagatgcaggagggtaaacttgaactttgttgtggtatctagatactttcggacaaataacgtataggtgatgaaacaaagtgcatatcttattgtacagttttagactttaatttggataaccctactcattgccaaggttattatcgtttagggatatgattttgcaaagataattctcccaatagaaacttaggaacttgccgagttctaaatttctaatgaagaaaaccatatctcataaaatttaagaatttgtggcttattgtgttaagttactaaatcctagagatgaatgcttagtttggtaataaaaaccaagaaaatctcattacgtcactttgagaccacaactaaacccgtttgaacaaagtgggtaaagtaaatccggcccaataaagcccatttatttccaagagaataataattagaaaccggagagacttcacggatagggtaaaaaagaactcagaggttaatcggaaaaataaatatttggggtgaagagaagcttcttctgctcaatcatgtctaacaactttggtgacagctaaagaaaaactaagttagaagaatatttagataaccttcaagctcgagaccactcggatctctctctaatcgccgatcggaatccgcc

SEQ ID NO: 5274 - DNA, 3000 bp, Unknown
  misc_feature (1)..( 3000): cDNA_ID_2161757_gDNA_ID_1620776_Annot_ID_167743 3000 nt of promoter + ATG
aagacaggagaaccgtgcatctatctttgtttgttatgtttctgttttcttgtcatgaaaattatgctcatgtatcttatctaaatcaaaaataataatttgatgaatcataacttgtaagacttgttatttaattttaacttgggatctatgtttctttagaagatcaaaacttttatctgttgaaaaaaagtgagaagatcaaaacttgttgataaacatatatagatgataggtttcacgtatactaaaagagtaaaaaaaattttttttaacaatacatacaccattcagtaaatgaacttaaatgattgtcaaatgataatagatgtttgagaagaaaaaaacaattaaaaaaagtttgatgtttgaccaaagcgaaattattttttttctttagaaagaaaacttgttttcatgacaatggccttctacaagaaaaagtatttgttagtgtttgctctcaataatgttttccgaaacattaatcagttttctgaaaactaaaagtttatcatcaaaagaaaaagtaaaaagtaaaaataaaaccaaaagtttatatattccttttttgttgttgtcaaataatagaatccaatgccaaaaacataagcaaaccgacatgagtttttttttctcaatctctgattcaaaacctaacgttgcttctttcacagtggttggaattgattatttcaaccaccaaaaataagattctaccattttcaataaatgaattgtcaactagtttgaggctttgagcggttcgtttacagacgagcttttataaatgaaaccaatcatacattcatagcaattatctaaatcgcttatcctattagtcgatatttcaattcaaaaaagaaattctatttgtaattcttaacacacaaatattgaaccaattacgaaaagactatttaaaaaatatatatcattagtttttttttttcgtcaaatatatatatcattagttaaatttaacttttttaactactatcttaaatatatatttttttttacttccgtcacaattatataataataactcaagaaggacaatttatacttatttagttttaatgaagaaataacttatgtaaagtgaaacataatgaatatatgtatacatcataccaataatgcaaatacatggtcttattaaaacttgatcacacaggtgatgccataaaatattggtacgctttaacaactcctaaaactgcagcagccacaaccaccacagcggccacaccctcaactactgtcttcctccatagtctttgcttcaatgagccaaacttactataaaattcgcttgaacagtttgcaacatttctcataccctcatctgttttaggggtttgatgttgtggcgtggctcccttcaaagaaactgagagaccagctgctatagggattgtctttggcatcgtcacatacaaaactcccttagagaactttgcacgaatctcatttcttttacaatcttttgcaacttttgtttctttcatgaacctgattgttttggtttggtccactggacagcctcctgttattgttagtacaccactgttgttgatctgtattttaagatgctctttcttcaaacctacaccaattccacttttcattgataaataactatactctttagttctttcttttttttctacaaccacacattgaattaaacaaccggtctagctagagatccatacggggaaaatattctttacatattactcatctaaattcgtagacctagcactactggccaaaaggtccgtttggacatttaaacaacgtggagccaaagagagtttgagaagcaaaagtagcaatgtggaatcaaagtatactttacaatggttggagaaatagagaaacaaagtagcaatgtggaagcaaagtataatcaaagcttttaacaattctctcgtgctgtgctatatttcggttggaaaagatatatatatatatatatatatatatatatatatatatatatcaaacaaagtgcaatgcagacttacaatgctatatatatatatatatatatatatatatatatgtatatatagtaaactaagaaaagaactactatgtattattttttattttttttgttataaatttattgtaggaaataattgttgtacctgaaggaagatgtagctcaagaatgtcgatgtcttccgttcttctccatcgacaaaagggttcgatttcatcgtaaaagtgtgtctgtgaaccttccatatttactgccatttcgttaaaaatttcaatgaacacgaaaaataaacaaaaatatattactgaaaatctctctcttgttttcaatttgttggaaatcaatattgcctggtgattgtgatgatgacccatctaattgcttctatttatataatttgttctgtgcatgcagtttcttcttggatctcctatgtactgaatgattcgtttattacccttaaagatttgctttaaaaattaatttatttcactctttcgagtttatatagtttgttgtatcttgtgaaattggtgtttcatcacatgcacatatcttcgtctatgtggttccaaatattcttttgttctttttattttaccatgcattgctttattacttacacataatgacaattttgctggtcattgattagaacatcgttttaatatcgaatgggatgtcgagttgaatattttgacaacgttcgttggctgggtcatgaatgaagtcagaataccatttctttttcattaaacaatgctatttttttcccgcaaaacaatgctattgggctcattttgggcttaaaatgttttgcgtaatctcaatgtttgtggggcttttagtttttagcccatgtatggtttgataactttagtaactcgtgagaaaaaaaaaagcttcgttctcaatcccaattcgaaatcctagctgaagtctatgctccataatcaaatccagttcatcagagatcaaagatg

SEQ ID NO: 5275 - DNA, 3000 bp, Unknown
  misc_feature (1)..( 3000): cDNA_ID_3076415_gDNA_ID_1620776_Annot_ID_167742 3000 nt of promoter + ATG
gttttgttaatatgtgtgtcaaaattgatcgattgaggttattaagttcgtaattgattgagcatgtatccttacggcaagagtcaatctcttgtgtggaatccttgtatacgtcttgttttatcaataaaagggtcacatgtgcttataactcttttaaacttcctcttgaacaaccccttaagggttggtaaaaacatgcgtttcacctgcataaactttagtcagtgcacatcgattagtgtcaagcttcagagacacataaaatgtttatcttcagtcttgtcaaatcattagtggcattactttcatttttctatcgtggtcatatgataaacttttcaatgatgcattgatgaagtagttaaacgttttcagtattggcgttctctgtatttatcatgtttgttcttctctatcagagggaaaaattccaccagacgagccctctgttcttcctccactacctatagttcctaaagcggaaaagcgtaagtccttctatggcacacctcagcccaagaagattgattatagagatagagactgggatcgtgacagggattttgagctcatgcctcctccaggaagcaatcggaaagaccttatgccaattgaagagcagccaatcgatccaaacgaaccaacttactgtgtctgccatcaggtcctgaatacataaattttgcaaaatctgtaagttgcctgatcctgttgtgatctttggttaacattttcgttatttgtttcaggtgtcctttggagacatgattgcctgtgacaatgagaatgtgagcctgctctcccagcatcttattatttattttttaatgtatagctgttatgatgaaaccttttgttcctgtttcgacagtgccaaggaggtgaatggtttcactatacatgcgttggcctcacacctgagaccagattcaaagggaaatggtactgccccacctgcagactcctcccacagtcacactaatatcatttgtacctgtgagaaggtattgctttactatcatcagaactaagctctcctcctgcaatttccatgcattctgtagctaatataatacgtatggagatttgcacgtacttatgatattaattctcataggtgccactggcatcttctttggcaccttcccttcatgaccaatgccaccaaactcatctttcttgttacccaacatctagcaagtgcaagtagaagcaaactttagatggagaaatcatcatgttttgtaaacctcgggttaattcgtggagcatatattttgtatatcaattgtatttgggtattggtgggcattttccgttttattctactagtatcgatatttacatctgcttctttctttcttttttcccctcaaaccatgagcctttgtattgatcaaatgacatgtacaaaggttttgttcatcagaaggaatttcactaaaataaaaaattgcttgatattttattcttgctgtttatatatgaaaaaagagaatccattgtgagcagctggtttgatgtgtctagatcgatagagggtgtacatatatcagtgctagataagttagttactcccttagtttgagaagtactacttgttttgactctattaaggaatactgatattattgtagtttagagaggagagatgcttcacagaacagacccacttctgcttcagaggcaatgctgtgtttgggactagtaaactaaacttctacaaggccaaatcgattcctaaacatatgtcaaaatggatccattagattagtcctttttagccttaaaaccattagtacagtataaaatttgtggtcgatctgtaatcatcctcttagtataataatctcaaactcaaatataataacaccacagtagcatttatttgttcacggatattcacacaccgtctcaactaaaataatttgaaaatgcagatcactagatctagagacttgagaatgggacccaatgcaacaatatagagcggtgagatttcgaatagagagatttgaatttaaaaatctccgatctattttttgttaaacacgagaaaatataattatttaataaataaaaaaagacaaaaagattcatattacaacagatggcgacaactgacattgaaaaagacaaaacagcttcaaacaaaataaagaagaagcagacacatacatacacaaacaaaaaaaaactaaaccccaaacattttttgaaaaatgtgttatctgttgaaccgcgggatttttcatttgtaaggtttccgccacacactttttgattttctcattccaaggtttcactttgctacttcacatcgatttcatttgcttttgaattctccaaaggtttcatctttgtacggtcaaaccaaataattagctgagagctcccagtataagaagcaggtacggatctgttctgagattcatggttctgtaatttttgctattatctcgtgaagttgtctgggtctcagttttctcgtattggatgtctttatttctggtctgaatcgagtctgcaagaatgagatttgaaaatgtagcttaaagtattttgactttaagcagaaatcttacgattttagtgtgatatttccttctgttgtgcagttggaataattgttttgtcttgaaatttttgctattttctcgtgtagttgtctgatttggagttagttgtctggttctcattttcctcgtatatgagtctttatttctggtctgaatcaaacttgcaaacatgaaatttgaaaatgtaggttaaagtttatgactttaagaataaactctatgctgttggtgttatttgtcttgtgtgttgcagttgaaaattagctgtctggttcccaattatctcgtatacggtgtttattggtttcaatcgagtttgcaaggctgagatttgaaatatagctaaagtttatgactttaagaagtagccttatgttgttggtgtgattttttcttgtgtggtgcaggttgagtaatg

SEQ ID NO: 5276 - DNA, 3000 bp, Unknown
  misc_feature (1)..( 3000): cDNA_ID_3076419_gDNA_ID_1620776_Annot_ID_167741 3000 nt of promoter + ATG
ataactttaggtgtatcaaatttagatagataggtctaagaaataggagtaaatatgttgcacttttccgggttttgtggtgttttctttctcaaatgggtcatcacatacaaatccagtctgctttagtatcagtgagtttcggcagtggtttttcctattaaacaacttcaatggtttcttgttgctaagcatctttttcatggtttggatgtctgtctgttttcctgctcgagagctcttttcgtgtttcttgatctgttcttcatttttaattcttccgtcagttcgagtacataacttgtcgttttgataggggcctcttattttcttttccacaggtcccatatctgctgtaccaagacgtaactgtgtgaatatatttgtacattgagctgtcagctgaagagatttgtcaaagtccatttttcaccaattttctcgtttcttagacacaatacaagtccctttttttctttcttttttctatgagctaacagcctaatacctcatacattcattctgtatatagattgttttgttcaggttataaaggacataggagtttcttttggttcaaattatatagggccattagtctttggctaaagttgtacatgttcatacattttcaataaaaatagtgcattcacactcagaaccttaaagttattatgtattttgatggacttatttcttctctgtttctatgcacgctcatttctgttgtgtttagaaatccttttgtttgttcctgttacttaccttgtatgattatttcttcagaagaaaatttggggactgaagaaggaacggaggaccctgaagactacactgacgataatgatgattacaatagcattttgagacctgcgtttgaagtagatggagaacctgattttagtactggaccaccagaagatgggcttgaatatttaagacgagtcaggtatattatctctctgtttccatctttctgtgtctttacacttttaaacttttggtattatggttaagttgttttgtttcctcaatttaggtgggaggctaagggaattccgaatgtaagagtagccaagatagatgaaagcacgtacataaagaaagagcaaagtgtttatatgccactaattcctgaaatccccaaatgtccagagtacctgttacccatgaaggaatgggaggactcgttgcttttggactttgtacaccttcgccaggtattttttcctgatatttcatctgacttacatggttggttaatagcagtctctctcttaatagacgaaaatgaaagtaagtgttgttatttttacagactctaacacaaagtgccaacagctgtgaggatgagataatatcaagtcagtgtgtagaagatttgcttgtggagatgttcaataagcatctccacacagaggaggatgagtcttttggtgaggtggtaacagacatacaaggaatggactcggtgacgcgggtatcaaagctgaaaaagcgtatatgtttggttgagaaggagagcggtttacagagtagcgattgcaaatgggtagtagcgttgtgtgcatcattggagactcctttggatgccgatacttgtgcttgtctaaggggtcttctgaggaagtgtgctagtgttcgtgcagagacatcattagaggttggagatgaagaagttatcaccatggcaaatatgctcatcaccatcgccggcagatactttggccaaatgggacagtaataagtgaagaagagagtggacatgacatgcccttacttttctctcatatgtgcttttgaatcttacatgagctttaatgccattttttgtagtgtcccctttgttatgtcatctgtgatgttcggaatcatcgtatttgtgcgaagtaagctctttttttttgggatcttgttgaggttattgagatcttcacaacttccgtggatcggctagatagagtcttcttatcataccgagttctatcattgtcattgttgaaggaaattacaagaactacgttgctgtagtggtttcaatttgttacaattcagtttaagtgctctttgtttcttcttcgtttggatattgcaccaaatagtagtcagatactacgtttggatgcaatctttgatattattgttacaaagaaaaaaagaataaagaaaaacatgtaatacatatgtaatatacttcgaaacatatgtaattttgcagttcccaaaacaatgttctttttgtttttgacatggtaatatgaaattacttttataaacagatgtttcaaataatatttgcgaattttaatatttttggttacagaattagtttgtacgagtatgttagttctatcttaattattaataatttaatagataatcatattttatcataacagaaatattttgttttataatttagatgataaccaatttgaattactgatgacagaaaaaatagcagtttgaattactcatccaagaaaatactagtacttaaaagacatgtaattattagattaatttagtttaacgcattcagaccaataagtagataatcttactacatactgcagccggcctgaagaacctatgcattatttaagctattgcttataagaaaaattaactgtgattatgttattatctactggtctaataatgttgtataatgctcagtttggtggacattggtttcactctcgtctattgatttcaagatgttacattgtatgttggttgtcctgtgattcatatccgtgtaccagtaaaaactcaaaaatcctcttaaacacacagagagacatggtgacgataaaacgacggcgtatttgcggtttgactcttgttccccaaagtctcaactctcaaggtcgttgggtggtccaatctcaaatctgaatggaggaagtgatgatttctccggtggagcacgaccctcagggccaggttaagcagcagcaagcggccggcgttggtatactgcttcagattatgatg

SEQ ID NO: 5277 - DNA, 3000 bp, Unknown
  misc_feature (1)..( 3000): cDNA_ID_3076433_gDNA_ID_1620776_Annot_ID_167737 3000 nt of promoter + ATG
ttcttatcccttgtgctgtaaaagtaccattccatgtcgtttcccggcaaaaatgacttttctgttccgcgtattatccaaataaataactcataaaacctccaatatcatatgtatgaatgcatcatgaccaatatatgtaatctataacgtcagattgacataaacaagctgaaccatatatagagagagatataaagagttggatcgtaccaggcaagtcccatggctcgcatttataaagatcaacttctgggatgatctcgagctcaatggcttggccgttgaccttcctatcaagatagtaagccaccagttcttcatcagtgggatgaaacctgaatcctggaggcaaactcatgggcgccattcaaagtgtatgcgttagaaaacgagagagaaagagatgagagagattaattaaagtgattaggatgttcgtacgacatatgaaggtgactatatataattaaaaagatgagactctgaagaagatatgatatgggaatgtgtaaaagtatgccatgggattggcatcttctgagattaatattttgtcttactttgggttgctttttggtcagtgtttgtcatgatactcatcacacatattttctaaaaccaatatatatattttaaataaaaacctaactctggcttttgaagattctgcaagtgtgaaaaccctagtaggaggagagacggaaaaagctttagcaagaaggccccatctcacaaatactcacatatatgaatgtatatgcttataattccggttagaccttaacgtgggtcatgaatcattatagagggatttttataacgtttgctttaaaccaaaaatgaaggctttttatgattcaacagtttaggggacccatctcttcttctcaaaccaaatctacctggcgacacctaaacactcggctttttcttttctttttttttcggtttgacagttttgttatattgttttatgttgttatggtcttataataagaatacttataaattgaattcatatatatgattaaaaaatgggagaataaaaaagcaggaggcatccaagtcgactttggctttagtgttgggaggcttctttagtcccttttacatatggattaaagacgttgttcggctcttttacatcattactcccacacaatctttgactctctttctctcggcccttcaattttactaacttccggtcaaatctcttttgcctcgactctcggcctcgatccaaaagataaattaaaaaaataaggacatcttcattcttcacatgtatgatatatataactcatgtcatatattagatgtctcgtttacatggttttttttcgtttgctaatatatataattcacatgtagacgaagaacattgtaaacggaatttaacagaatgaagtaatcaaacgttttatgtaaggaaatgatcaaatactgagggagtccacaagttgcgacatatataaaactcctccattcttataaagtataatattcaaacttcaagtaagtaactctcccttttccgtgagaaagaaataacaataacattttagggaagctttaagatgtggtcaccaataacttagggagagagagagagagtgacagatacaaaaaacaaaagatagcaactgaaaaatattttggcgaaagatgctttaacagtttaacttatcaaacgacaacaacaagacatgccccaattgtttcaccactttgtttttcttggtcacaaatcgagtctaagtctatatgaacaagtaattaatgtgagtactatatataaaaaaaaatgtgactatatatataaatgttgtatcacaaatgcaaaaggaatgtggattaattaattaataaagacaacgaggaagctaacatgcaagcctaactaaagacatgcaacctttgatacgatctaaggggaagcgaataaagctaattaagatctaagcatcttatcttatcaacccttttatatttccatttcacatgtatcaagtacctatactctttctcaagcttatagtattgatatctagagtatcaaataaacattaattaattagacgtaacacaatagtgacattattaaatgaatagtaaacaaactttacgtgtatatatatccatgacgaaattggcaaaggcgggactctatgggggaatcatgataatacatacatacgatatacatgttgacatgtatcatgtatcatgataatacatacatcatcccttttttgttggtttgttaataaaatgatcatacatcatcttaaacatcaacatcaatcacaattcttctaaaagagaagaagagtcttgttcagaaaaagtagcatctgattccctacatgtcggtttccaaaacatattttttttccatctcatattagtttgtgctaaacaaactgatccaaggaaaaaagaaaagcctttaaataatacaagttggaatccctgtgtctctagagattcttgctttcatgttttttcacgcatctcaattatagcagaagaacaatgtcactgtccaaaaacatttgcgttatttgccttttgcttttctccatgcattaaatctcatttctacccttgttaaagtggtcacactcattactctttttaatatactaatcctacaggaccacctcgtgattgttatctcaaattttgattaattattcaatcaattagccaaagcagatcttcttcaattttaagattttgatgattactgttaaagctgactatcactgcggggaattcaaagatgatgctagtatacaaaaagagaagcatggtttcaaattgcagaatcaggcccatatataagtgggcttgattatttgggcttttggaagagtgtggcccaacatagagatatagagctgttatcgtctgtctttcatggcggagcagaggtgatcgtttcactattcaatttcactcgtcgatcattaccaacctctgcgggcaaag

SEQ ID NO: 5278 - DNA, 3000 bp, Unknown
  misc_feature (1)..( 3000): cDNA_ID_2161741_gDNA_ID_1620776_Annot_ID_167736 3000 nt of promoter + ATG
gcaaaattctcaagattttaatcacaaaaagaattcaatctgtgattaaagatttaaaaaaaagttaagatttttaccttgtctttgatgaatttccagataactcgagtcatttcgtctcctgcttgtgcacagagaataaataaagagtcaagtttctgaatttatttcataaaactataacatatagaagaaaagaaaaacccggaacagagccgatcacatatactccaatataagcaaatcaatcaatcagagtaacgagaaacccataatcgtaatcatagatttgagctaattgactgttcgaacacttaccatccatttcaacaacgggattgatcaccttgatcttctcgaattccatctttgcccgcagaggttggtaatgatcgacgagtgaaattgaatagtgaaacgatcacctctgctccgccatgaaagacagacgataacagctctatatctctatgttgggccacactcttccaaaagcccaaataatcaagcccacttatatatgggcctgattctgcaatttgaaaccatgcttctctttttgtatactagcatcatctttgaattccccgcagtgatagtcagctttaacagtaatcatcaaaatcttaaaattgaagaagatctgctttggctaattgattgaataattaatcaaaatttgagataacaatcacgaggtggtcctgtaggattagtatattaaaaagagtaatgagtgtgaccactttaacaagggtagaaatgagatttaatgcatggagaaaagcaaaaggcaaataacgcaaatgtttttggacagtgacattgttcttctgctataattgagatgcgtgaaaaaacatgaaagcaagaatctctagagacacagggattccaacttgtattatttaaaggcttttcttttttccttggatcagtttgtttagcacaaactaatatgagatggaaaaaaaatatgttttggaaaccgacatgtagggaatcagatgctactttttctgaacaagactcttcttctcttttagaagaattgtgattgatgttgatgtttaagatgatgtatgatcattttattaacaaaccaacaaaaaagggatgatgtatgtattatcatgatacatgatacatgtcaacatgtatatcgtatgtatgtattatcatgattcccccatagagtcccgcctttgccaatttcgtcatggatatatatacacgtaaagtttgtttactattcatttaataatgtcactattgtgttacgtctaattaattaatgtttatttgatactctagatatcaatactataagcttgagaaagagtataggtacttgatacatgtgaaatggaaatataaaagggttgataagataagatgcttagatcttaattagctttattcgcttccccttagatcgtatcaaaggttgcatgtctttagttaggcttgcatgttagcttcctcgttgtctttattaattaattaatccacattccttttgcatttgtgatacaacatttatatatatagtcacatttttttttatatatagtactcacattaattacttgttcatatagacttagactcgatttgtgaccaagaaaaacaaagtggtgaaacaattggggcatgtcttgttgttgtcgtttgataagttaaactgttaaagcatctttcgccaaaatatttttcagttgctatcttttgttttttgtatctgtcactctctctctctctccctaagttattggtgaccacatcttaaagcttccctaaaatgttattgttatttctttctcacggaaaagggagagttacttacttgaagtttgaatattatactttataagaatggaggagttttatatatgtcgcaacttgtggactccctcagtatttgatcatttccttacataaaacgtttgattacttcattctgttaaattccgtttacaatgttcttcgtctacatgtgaattatatatattagcaaacgaaaaaaaaccatgtaaacgagacatctaatatatgacatgagttatatatatcatacatgtgaagaatgaagatgtccttatttttttaatttatcttttggatcgaggccgagagtcgaggcaaaagagatttgaccggaagttagtaaaattgaagggccgagagaaagagagtcaaagattgtgtgggagtaatgatgtaaaagagccgaacaacgtctttaatccatatgtaaaagggactaaagaagcctcccaacactaaagccaaagtcgacttggatgcctcctgcttttttattctcccattttttaatcatatatatgaattcaatttataagtattcttattataagaccataacaacataaaacaatataacaaaactgtcaaaccgaaaaaaaaagaaaagaaaaagccgagtgtttaggtgtcgccaggtagatttggtttgagaagaagagatgggtcccctaaactgttgaatcataaaaagccttcatttttggtttaaagcaaacgttataaaaatccctctataatgattcatgacccacgttaaggtctaaccggaattataagcatatacattcatatatgtgagtatttgtgagatggggccttcttgctaaagctttttccgtctctcctcctactagggttttcacacttgcagaatcttcaaaagccagagttaggtttttatttaaaatatatatattggttttagaaaatatgtgtgatgagtatcatgacaaacactgaccaaaaagcaacccaaagtaagacaaaatattaatctcagaagatgccaatcccatggcatacttttacacattcccatatcatatcttcttcagagtctcatctttttaattatatatagtcaccttcatatgtcgtacgaacatcctaatcactttaattaatctctctcatctctttctctctcgttttctaacgcatacactttgaatg

SEQ ID NO: 5279 - DNA, 3000 bp, Unknown
  misc_feature (1)..( 3000): cDNA_ID_3593869_gDNA_ID_1620776_Annot_ID_167735 3000 nt of promoter + ATG
gagctcgagatcatcccagaagttgatctttataaatgcgagccatgggacttgcctggtacgatccaactctttatatctctctctatatatggttcagcttgtttatgtcaatctgacgttatagattacatatattggtcatgatgcattcatacatatgatattggaggttttatgagttatttatttggataatacgcggaacagaaaagtcatttttgccgggaaacgacatggaatggtacttttacagcacaagggataagaagtatccaaatggctctaggacgaaccgtgcgacccgagcgggttactggaaggccacggggaaagatcgtacagtagaatcaaagaagatgaagatgggaatgaagaagacactggtttattatagaggaagggctcctcatggccttcgtactaattgggtcatgcatgaatatcgtctcacgcacgctccttcctcctccttgaaggtaaattatttcccatgcacaaacttctattaacatatatatctatattcatttctgatctaatttttttttttttgataaaccatatcgactaatattaatgttgatctaaaacaggagtcgtatgcattgtgccgagtgtttaagaagaacatacaaattccaaagagaaaaggggaagaagaagaagcagaagaagagagcactagtgtaggaaaagaagaggaagaagaaaaggagaagaagtggagaaaatgtgatggtaattatattgaagacgagagcttgaaaagagcatccgcggagacatcttcatcagagctaactcaaggggtccttttagacgaagcaaacagctcatccatatttgctcttcatttctcatcttctcttctggacgatcatgatcatcttttctcaaactattctcatcagcttccatatcatcctcctcttcaactccaagatttccctcaactttctatgaacgaagcagagattatgtcaatccaacaagactttcaatgcagagactctatgaacgggacacttgacgaaatcttctcttcttccgccactttccccgcttccctttgataaatccatatctcatactatcatctagtacttcttttctcaacttatttaaatatactcgggtacttcatatatagtatttttttttttacttgttttttgcttatgaattagtttgactggtgaaaaagggtgaggaggtttgtggaattattttttctaccacaaaaagaaattgcattattttattttaatttttatcattaggtgtgtatggtacttaatcactagagttggttggttttgtcatatataggagggaaaacggaagtaaaaattgtgtaatcgatcgacattacttattggtttgcatacttgtagacttaaaatctggcatgggcgtcatggcaacgcaaatttggaaaacttttcggattatatatgtccgactgcggatcaatatcttatttaactatatatatgtgttatgaatatgaaacaaaagttttaaaatctgaatgaataaagaaaaaattctcaagaaaagaagctgaaaacaaagaagagagaaaaatcgagacaaatttcactacaaacaaaataaattctttattaaaaaagatgagaattacaagacaatgattaaagacatctcgagtttatgatactatatatagtttgtgattgatttggaagatacaaacaacattatcatgaagaaatctctagtttatgatacttttaatttaatttaaccaagtgatagtggtctaatagttttcacttgaagacgaatcatcgtttttgtctaggtcatacattgatctctctcaaatgcaagattatttaatcattcttattatactatccctaaaacaatcttactataaatgaatctttaaaatatatatatatatatatatatatatattgcagtttcaaatccaaacatataataagataataatttgttcgtttgaaattcaacatgatcgtatatgcataaacttgcaataaaacatactaaactttttaaattttgtattcatcaattaacactgatcataatcccatcctctaaagtataaactctagtaaaacctctataaattaatactcgataaattaataatctctataaattaagaaatgtttttggttccgagttgggatcagtataaaaagtgacacaaatcgataaattaataagataataatttttttgaaaatcctatataaatatatggtctcatcaatatcataaattaataattatttaaatgtatcaattatatatatacattatatgtaagaaatttctttgaaatataattctaatatttgtttgcttaaatttgtatttatccttatttgaaatatagttttagtattttactatatcaaaaacttttggtgttattttctaaatatgatattattttttacttgtaattgattcttgaaagatattttctataatgaaaaaaaatcttatacaaatttttgaaaagttactaaattaggaaaaattttctattaattaataaatattaaattatcgataaattaaaacccctctaaattaataaaattttgcagtccgaacattattaatttatagaggttttactgtatccaatatttgaaggaaaaacgttccaaatcaaaaaatttgtagaacttaaaaacattttatgatgcatgggagattttgggcttcaactcaacaaaatagagtaaagcccattataaagcccacaaagtgggcctttcattttgacgtcaatatgggaataataccggttctttctgttaacgacgacgaatcttcgtcttccccttgttcttcttcttcctcttcattttactttctcttcccgatttctctctgtccgattcaccttttcctccgatctcggtctccttagattccggaataatcccctcaaggcttggcttagtaatcgtcgttttctccgccatg

SEQ ID NO: 5280 - DNA, 3000 bp, Unknown
  misc_feature (1)..( 3000): cDNA_ID_3076437_gDNA_ID_1620776_Annot_ID_167734 3000 nt of promoter + ATG
tgttaccaaagctggttgacaatatagtgaaaaaaattaagaacttacttgttacatttcttttagatgtaattttacatctaaatagtaaatgttgcaaaaagttaccaagctaaatcattcgcctgactgatggatgatgatatattgactaattttaattcattgtaatcaacattaagataacaaataaactttattctttatgctaaaaatcaacaccaagtatgtagcatatgagtacatgtgaatagcatacttctatatctctgttttgttatatttttgaatagaaatgtgaatagcatactatatctctgggatattccgtaccatcgacaatgatttcttgccgccaataaaagaacacgagcaaatctacaaatctgcaaatggttcataaaccggtttgatttatgcatcagaccataaaacttcgctcatgtccggtttagctctcggttctcgctttgtattgtcatggaaggtcatcatcattcaattcacaaagcaaattttattgataaactcacactacaagtacaaatgcataccaaaagttgatacatttatatatacgctcataagcaaactattagattatttttttgacacaatacataataaaagcattaatacatttaagtaatggtttataaattccttttgggactggctgatcccgtaaatacaagctgaacaaggagtatctctagaattgctcaaaaaccatggatttttatgttatccttcttcacaagcccagcctgatgattcaaaacatttctaagatcaggatagatacaatgcttccatcttttcactacaaaaccaacttcaaaaccaataaccgatagaacgaaaaaatgatgattacctgaacaaggaacgtagatacgttcttcctctgatcaccttgaagctgaataacctacaccaaagatattaagtcatttagcaactaaaagcaatccaaaatgtatcttgagagctatggtagctttcttgatacctgtcctaattcagagtcctggacgacggtgccattgcagcagaattctttcttaaggtctttaagtatcttgctatagctatactctttcttaagcccctggacagttgtcaagctttttctaccattacgctgctgaacacgaatgtgcacgtattcctttgttcccgccccagagtcctcagcatttgcatcagcgaacggatctttttatcaccaaaaaaaacacaaagcataagaagatcatataacagaagaagatactccattccaaaaacaagaatgctgtggaatcatctaataatcatcatattctcaacaaatttaaccgccaaatttcagaacaatccttaccaaaggcagtggggacttgaacttcaagatcagacatgaaccttaagttgatacaagggacagtaaatcgacaaggcctgagaacaaaaacagaatgttagaattacgagtccaaaaatgatttcaagttacataacgtaaaaaaaagtgacactggttatcctagcaatgtcttattcagataatcaaagattcatataacaaataataaagaaaccattttctgcaaaagtctccattgcgtaaacatatcacaagattccaaaatcaaaaatcaaaacaaaaaatatagtatctgtatctaaaattcgataccattttctacagaataaataacatatctagttttggagtcaatttcttctgaaagaaaaaacaatcaaacattatcattttgcgaagaaacaaaacccagagtatatattttgaaccaaaaagagctgcattcagatcagaaaataaaatgacctacaaatctctaaataaaaactttttcgaacaagcaaatcaacaggaaacaatcattcagcagaaagagagaaagtatcacctgatcaagaagagattagggtttcgagtatttgattgaaggaagaacggaaagaaaaatggaaaccctaaattcggacaaaggcaagcttctgtctgaaagaagaagaagaggaaattacgagaggaagagctacaaaatcgaacaagttttaattcgaaccaatattcttctttttttatattttaaatcggcaaataatagtcggcgagtcggcacggcatcgattccctcccactcatctagttgcgtctttatctggaaatacgtattgggccttaacaaagcccaaatatttgttacggcgtaacaaagcccaactaaatggagccgatggggagatgctgaaatcgccaagcagagaagcccaaattacaatcagttgttcccgcccgatcacctctttttcagttgttcccgcccgatcaactctctggaattacttagcctcaaaatcctcacaacaactcttctcttgtagctacatctactttgctcttccctctctgttgtctcgcgtttcctctgctgtctcgtgctctctttttcgttctgttttgttctttctttagtaattttttcagatagttttaagtctcttctgaagaagaattagggttttagggtttagaaaaaattctctaaatatatttggttttagatctaatttaagattcattcacaaaatagaaaacgtttgtttcttcgtcatcttcttcttcaacgttggatctgttagttatgttttttcagggaccacatctaaacttgtctctaacaaaaagtccggaacttatcaacaagattgaatcttacctcaacggacactgcacatgtcctcatcaacaaacagagaactcatcaaagagatcaactcttcctaagagccctgagaaactaaaagctatgaatttcccaatctccacgatcaggattggcggatgggtcgtcgttgccaaaaaccctgatgacattgtggccaaattctattttgcaaagaagaaacttatatgggagtttctcttcggagaaccagagactaacacgctgaggctgaaacgtaagatcgagattcaatggaatg

SEQ ID NO: 5281 - DNA, 3000 bp, Unknown
  misc_feature (1)..( 3000): cDNA_ID_1396182_gDNA_ID_1620776_Annot_ID_167730 3000 nt of promoter + ATG
agagattctcagatttatcgaggtgaagaggatatatacattgaagtcctttgtgtttttcatggtttatatttgacattcattagtcagtttatctcaatttcttgtcatagttatttccttgggtttcattatactctcttctctgaatacagaatgctaagttttcacctgaaatgagtcgatagattgtgtagtctgaagtgagtcaatagtaactgatcacaatggacagaacataaggatttttaggatagttatctgacaattagttggtaacttctgaggttgtagatatatgtagtgagtattctaacacaaccatgatgactgcaaacactctgataccattggaatagcattactaactgctgttggaacctctttgttgcgccgcccaggttactgaaattcatacccaggaaacttgtggtttcatttttcctccttataacatttgactccaagcatgaatcctttttatcaccaatgctgctgcattacattctcttattactgtttctctattgtatcctggttcaagctttgaaaaatatcatttggataaactcttatatttacgttcaaccttaacatcaagaatatgaattacattgaatccagttggaagttaatctttgtggtttatcaattgcagggacaacatgaggttccacaaaactttaagaaactgttgagttatagcctgggaatccttgtttctcaagacaaactcaaaaaggtaactagtgttgtttttcttaatgcgcggtttgtcacaagcctatctacttttctccatacccccaatatctatatgacaagatgtagtaataataaacctgagttatattatatgataaactcaaaaattactttataaatgcaggtacgaaatcgttacaaaatctcagttacgaaagcaattaagccaacactcaccctgcgtccaaaagattccacgaagccaccagagttaccaagtacttctgtgatattaacatcaaaagaaacacatgagatagacccagcagcaaatagagaagcagaaggaatgaatgagttggcaaaagaaaacaacgtaatcttactccttttaattacatgttgctcatccaatttacagtatcatagcaacaaaagatatgatcccttgtggttgatcaatttcaagactggtacgaggagcaacaagactttaggatgtttttgagtgagtgcctgataattctcgtttctcaaggcaaactggaaaaggtatatttttcttaattgctcagctatttattgatgcatcatcatctatctataacaagatcatttgtaattcttatgattgattaaaatcagaaaatctcccaaattgcaggtattggatcgctacaagatatcagaattagaaaacaaagtgttggaagtagcaccagaagttgtagcaatgaaactagcagagtcagataacaaaaggttgatagcagcagaggcagtcgaagaagaagaacgaatgcacaagttagtagaagaaagccacacgatgcttcaattatgcttagagatccaccaacaatgtaatctcaacaaaactcacatggtacatcaatccatcatcatcaccatgatcatcactgtcttttgctttgtttcttgcaggtgctcttggccaagaggttgttctactgtaaaagaaaaccaagtatctatctagtttgcttcaatctatattttacttaactaaccacttgagttttgtttttgtagttcttaaacacaggtttatatggttgtaatggtgaactaatgttcactgttttgttcataaaaagatagctttttttttttttgctaaaaaacaatgacgtgtctatggagtcttgtgaatgctttgctacgtcataaagcatcaaaaggtgctggaaagaataagcttttccaaaagaaaatttggtctttttttctaattaaaaagtttggtattggcgtatggaagtacaacactactactcatatttccacttgaaaacaacattttgtgattgtgatttgatattttctggtgtgtgttagtatgcaattgcgattcattattcatagtctcttttgacattggtgtaaaataacttgattggtaacaatattttccctactagtttaggaaaagtataaagaggtgagaaaaatctcaaatcgaaaaggaagaggaaagtgggggtaaagttggaaatataaaaattttggaaaagtagaacaattagaaagaggaaaaccctaaaaaaaaaaagagggggactatataactggctaacacgtattgggttgagtctctctctacctcaatttatattatttgcttcaatcttctctttatcgctccaccagatccaagttcgcgagatttcaagctctctaacaaagttcttcacttttactctcaaagctttcatctttcattcaactacttaagctccaaggttcggaaatattttttttacttttctctgcgatttgttccttttcttatgaacgattggatctcgagtctgatttactctctttgcgatggaatttgttctgggtcgttttcaaaattgacgcttgttaatctataattcgtcatcggattcaattagtccgtgaaacccttcaattcgtttatctcaaatcgatttgggttaggttttgatttcgacacttatgttaaaatcatccaaagcttttatcttcgattttggacaactttgtgtatattatatgctttcatggagagatagatgtttttgaatggtatctgttatgataattggatgaaccatatttcctatatctctcctgacatcgaataattcagatattaatgcttgtgttcctctctatatggaacttcaagtttggctattctgttacattcttacttttgcacaactctctctggctataagatttaagaatcatctctagctatctgggttctaaactattgtttcttttgtgtattgttgtagt

SEQ ID NO: 5282 - DNA, 3000 bp, Unknown; identical to SEQ ID NO: 5281
  misc_feature (1)..( 3000): cDNA_ID_1396182_gDNA_ID_1620776_Annot_ID_50293 3000 nt of promoter + ATG

SEQ ID NO: 5283 - DNA, 3000 bp, Unknown; identical to SEQ ID NO: 5279
  misc_feature (1)..( 3000): cDNA_ID_3593869_gDNA_ID_1620776_Annot_ID_50298 3000 nt of promoter + ATG

SEQ ID NO: 5284 - DNA, 3000 bp, Unknown
  misc_feature (1)..( 3000): cDNA_ID_2161741_gDNA_ID_1620776_Annot_ID_50299 3000 nt of promoter + ATG
tcaagattttaatcacaaaaagaattcaatctgtgattaaagatttaaaaaaaagttaagatttttaccttgtctttgatgaatttccagataactcgagtcatttcgtctcctgcttgtgcacagagaataaataaagagtcaagtttctgaatttatttcataaaactataacatatagaagaaaagaaaaacccggaacagagccgatcacatatactccaatataagcaaatcaatcaatcagagtaacgagaaacccataatcgtaatcatagatttgagctaattgactgttcgaacacttaccatccatttcaacaacgggattgatcaccttgatcttctcgaattccatctttgcccgcagaggttggtaatgatcgacgagtgaaattgaatagtgaaacgatcacctctgctccgccatgaaagacagacgataacagctctatatctctatgttgggccacactcttccaaaagcccaaataatcaagcccacttatatatgggcctgattctgcaatttgaaaccatgcttctctttttgtatactagcatcatctttgaattccccgcagtgatagtcagctttaacagtaatcatcaaaatcttaaaattgaagaagatctgctttggctaattgattgaataattaatcaaaatttgagataacaatcacgaggtggtcctgtaggattagtatattaaaaagagtaatgagtgtgaccactttaacaagggtagaaatgagatttaatgcatggagaaaagcaaaaggcaaataacgcaaatgtttttggacagtgacattgttcttctgctataattgagatgcgtgaaaaaacatgaaagcaagaatctctagagacacagggattccaacttgtattatttaaaggcttttcttttttccttggatcagtttgtttagcacaaactaatatgagatggaaaaaaaatatgttttggaaaccgacatgtagggaatcagatgctactttttctgaacaagactcttcttctcttttagaagaattgtgattgatgttgatgtttaagatgatgtatgatcattttattaacaaaccaacaaaaaagggatgatgtatgtattatcatgatacatgatacatgtcaacatgtatatcgtatgtatgtattatcatgattcccccatagagtcccgcctttgccaatttcgtcatggatatatatacacgtaaagtttgtttactattcatttaataatgtcactattgtgttacgtctaattaattaatgtttatttgatactctagatatcaatactataagcttgagaaagagtataggtacttgatacatgtgaaatggaaatataaaagggttgataagataagatgcttagatcttaattagctttattcgcttccccttagatcgtatcaaaggttgcatgtctttagttaggcttgcatgttagcttcctcgttgtctttattaattaattaatccacattccttttgcatttgtgatacaacatttatatatatagtcacatttttttttatatatagtactcacattaattacttgttcatatagacttagactcgatttgtgaccaagaaaaacaaagtggtgaaacaattggggcatgtcttgttgttgtcgtttgataagttaaactgttaaagcatctttcgccaaaatatttttcagttgctatcttttgttttttgtatctgtcactctctctctctctccctaagttattggtgaccacatcttaaagcttccctaaaatgttattgttatttctttctcacggaaaagggagagttacttacttgaagtttgaatattatactttataagaatggaggagttttatatatgtcgcaacttgtggactccctcagtatttgatcatttccttacataaaacgtttgattacttcattctgttaaattccgtttacaatgttcttcgtctacatgtgaattatatatattagcaaacgaaaaaaaaccatgtaaacgagacatctaatatatgacatgagttatatatatcatacatgtgaagaatgaagatgtccttatttttttaatttatcttttggatcgaggccgagagtcgaggcaaaagagatttgaccggaagttagtaaaattgaagggccgagagaaagagagtcaaagattgtgtgggagtaatgatgtaaaagagccgaacaacgtctttaatccatatgtaaaagggactaaagaagcctcccaacactaaagccaaagtcgacttggatgcctcctgcttttttattctcccattttttaatcatatatatgaattcaatttataagtattcttattataagaccataacaacataaaacaatataacaaaactgtcaaaccgaaaaaaaaagaaaagaaaaagccgagtgtttaggtgtcgccaggtagatttggtttgagaagaagagatgggtcccctaaactgttgaatcataaaaagccttcatttttggtttaaagcaaacgttataaaaatccctctataatgattcatgacccacgttaaggtctaaccggaattataagcatatacattcatatatgtgagtatttgtgagatggggccttcttgctaaagctttttccgtctctcctcctactagggttttcacacttgcagaatcttcaaaagccagagttaggtttttatttaaaatatatatattggttttagaaaatatgtgtgatgagtatcatgacaaacactgaccaaaaagcaacccaaagtaagacaaaatattaatctcagaagatgccaatcccatggcatacttttacacattcccatatcatatcttcttcagagtctcatctttttaattatatatagtcaccttcatatgtcgtacgaacatcctaatcactttaattaatctctctcatctctttctctctcgttttctaacgcatacactttgaatggcgcccatg

SEQ ID NO: 5285 - DNA, 3000 bp, Unknown
  misc_feature (1)..( 3000): cDNA_ID_1828195_gDNA_ID_1620776_Annot_ID_50301 3000 nt of promoter + ATG
aacaaatccctctgatttcatttcctcaggatggacgaagccaatctgtattggaaggcatgcttttggtgatcagtatagagccactgatctcattgtcaatgaaccaggaaaactgaaactagtttttggtaatctcctcctcccgttctggatctgtctaacccttcaattaaattgttcattatagagaataatgggggatcattgtcattgaattcacctacctgtggaagtttatttatacacgttaaaaatcatatcttacatatgcagagccaagtggatcttctcagaaaacagaattcgaagtcttcaatttcaccggtggaggtgttgctttagccatgtataacactgatgaggtagatattattgaaatagtcctctccttcatgtctgcactatctgaatacacttacagagtatctattgatatggtggtccgatttcatttttgaacagtctattcgtgcatttgctgagtcctcgatgtacacagcttaccagaaaaagtggccactttacctctccacaaaaaacaccatcctcaaaatatatgatggaaggtgtgaattcactggcctttatactttcttgttagagtctcaccgaaatcatttcaccatctagtcatactgccctgatattaccttttcatcttgttttcagattcaaggatatattccaagaagtttatgaagctaactggagatccaagtatgaagcagcagggatatggtgagatgtgcatgttattagcgacattctattacagtacaccatgcaaacttgtaaacaaagttaatgaaatccaggtatgagcatcgtttgatagatgatatggttgcatatgccatgaaaagtgaagggggttacgtctgggcatgcaagaattacgatggagatgtacagagcgatttcttagcccaaggtttttcctcttaaatttgagatctgtctagggactgaaaccttaattctgccaaatgcattttggtcttgtatcatggttctttgttctttacttgtgatctaaatggggacagaaacttcaattttatttctccttatgaaacaaagtttctgctctccgctgcaggatatggatctctgggaatgatgacttcggtgttggtatgaaatgacgcgggcctcagccaaagtttttggtctttatcatgataacatgtttcctgcgcatcattatattttatgtattaaatttgagatatattacaggtttgtccagatggaaagaccattgaagcagaagcagctcatggcacagttacacgccactacagagttcaccagaaaggtggtgaaacaagcaccaacagcatagcctctatttttgcttggtccagaggccttgcccacaggtaacgcatttccactgtctttaaacattttcatacttggtaattcgtgttgctactctggagaaaatccagtcccttgcttcaataatgagttagtctatcagggattgtttgtggtaagatttgtcattacttgtctctttataattgatcactgaactatgtgaaccgttttacctttggcataaattgagtttaaagtctctgaaaactggttgagttcatcttaacaagatgtttggtatgtgatggtaccagggcaaagctggacagcaatgccgcactcttgagctatactgagaaactagaagcagcttgcatggggacggtggagtctggcaaaatgaccaaggatctagctcttctgatccacggagccaagtaagactaaaacttgagagaaagttgatgaggttgatgcacttaataaaaaatgtttaaagataagtttttgtctactatttgaacagggttaggagggatcagtatgtgaatacggaagagttcattgatgcggtggcatgggagttaaaaagaagattgttaggcaacaactccaggttgtgagaagaaagaatggaaatctgaaaagcaaagagtctcagcagcgtgatgtttgatttgatgctctttcataggtgtagaacttaaagcctgaaaaggggctattgcatgaataaaaggagatagactaattgggtaatttattgaggaactcagatttcccaaagccgagactcactcctcattgattcgttaaaaattgaatctttttagcccttctttctctgtataatctctgttgtaaaagctaccaatcaacagaaatggctacgttctcgttgtcattatcttctctttccctttgtattatttatctggcaaagaaatgaatggttgagctttagttataagtgttccctcttgctccctcaagttgctatggctatgtgggattagtaagaagacgacggaggatgattttgatgataacagctcccgtttgtcctcctcaccttctcctacgccattcttctttgcttcgccatgaatcatcgatcggaaactttcatcggaagaaaaatccacgtttcagaaccgtatcatgttcttctttgttgccgcaaccgtcggttcgtccggataaggcatcggagttgaagactctgtggaagaaattctacaaagtcgcgtcgccttattggttttccgaggacaaagaccaagccaggcttcgtctcgccgccgtcttcgcccttactctcgccaccaccggcattagcgtcggcttcaatttcctcggccgtgatttctacaattctctcgccagtacgaattcttcaactctctctctcatttctcacttttcaaaaacaacttgctctgttgatcctcttttctctgtgttcaatagacaaagaccaagagcaattcaccaagcagttgttctattacctctgtgctttcgccggcggcattccggtgagttttcctcacgctcctccctctgtatccaatctcaatgaatgatgttgttcactttccctggattttgcagttctttgtgctacgagattatacaaaagagactttatcactgagatggagatcatgg

SEQ ID NO: 5286 - DNA, 3000 bp, Unknown
  misc_feature (1)..( 3000): cDNA_ID_1828187_gDNA_ID_1620776_Annot_ID_50303 3000 nt of promoter + ATG
cgataacctcgcagatgctttgtttgtctcttattccttgcattcttcacctgactgttttgtttttcttgttgttggttgagaataactttaggtgtatcaaatttagatagataggtctaagaaataggagtaaatatgttgcacttttccgggttttgtggtgttttctttctcaaatgggtcatcacatacaaatccagtctgctttagtatcagtgagtttcggcagtggtttttcctattaaacaacttcaatggtttcttgttgctaagcatctttttcatggtttggatgtctgtctgttttcctgctcgagagctcttttcgtgtttcttgatctgttcttcatttttaattcttccgtcagttcgagtacataacttgtcgttttgataggggcctcttattttcttttccacaggtcccatatctgctgtaccaagacgtaactgtgtgaatatatttgtacattgagctgtcagctgaagagatttgtcaaagtccatttttcaccaattttctcgtttcttagacacaatacaagtccctttttttctttcttttttctatgagctaacagcctaatacctcatacattcattctgtatatagattgttttgttcaggttataaaggacataggagtttcttttggttcaaattatatagggccattagtctttggctaaagttgtacatgttcatacattttcaataaaaatagtgcattcacactcagaaccttaaagttattatgtattttgatggacttatttcttctctgtttctatgcacgctcatttctgttgtgtttagaaatccttttgtttgttcctgttacttaccttgtatgattatttcttcagaagaaaatttggggactgaagaaggaacggaggaccctgaagactacactgacgataatgatgattacaatagcattttgagacctgcgtttgaagtagatggagaacctgattttagtactggaccaccagaagatgggcttgaatatttaagacgagtcaggtatattatctctctgtttccatctttctgtgtctttacacttttaaacttttggtattatggttaagttgttttgtttcctcaatttaggtgggaggctaagggaattccgaatgtaagagtagccaagatagatgaaagcacgtacataaagaaagagcaaagtgtttatatgccactaattcctgaaatccccaaatgtccagagtacctgttacccatgaaggaatgggaggactcgttgcttttggactttgtacaccttcgccaggtattttttcctgatatttcatctgacttacatggttggttaatagcagtctctctcttaatagacgaaaatgaaagtaagtgttgttatttttacagactctaacacaaagtgccaacagctgtgaggatgagataatatcaagtcagtgtgtagaagatttgcttgtggagatgttcaataagcatctccacacagaggaggatgagtcttttggtgaggtggtaacagacatacaaggaatggactcggtgacgcgggtatcaaagctgaaaaagcgtatatgtttggttgagaaggagagcggtttacagagtagcgattgcaaatgggtagtagcgttgtgtgcatcattggagactcctttggatgccgatacttgtgcttgtctaaggggtcttctgaggaagtgtgctagtgttcgtgcagagacatcattagaggttggagatgaagaagttatcaccatggcaaatatgctcatcaccatcgccggcagatactttggccaaatgggacagtaataagtgaagaagagagtggacatgacatgcccttacttttctctcatatgtgcttttgaatcttacatgagctttaatgccattttttgtagtgtcccctttgttatgtcatctgtgatgttcggaatcatcgtatttgtgcgaagtaagctctttttttttgggatcttgttgaggttattgagatcttcacaacttccgtggatcggctagatagagtcttcttatcataccgagttctatcattgtcattgttgaaggaaattacaagaactacgttgctgtagtggtttcaatttgttacaattcagtttaagtgctctttgtttcttcttcgtttggatattgcaccaaatagtagtcagatactacgtttggatgcaatctttgatattattgttacaaagaaaaaaagaataaagaaaaacatgtaatacatatgtaatatacttcgaaacatatgtaattttgcagttcccaaaacaatgttctttttgtttttgacatggtaatatgaaattacttttataaacagatgtttcaaataatatttgcgaattttaatatttttggttacagaattagtttgtacgagtatgttagttctatcttaattattaataatttaatagataatcatattttatcataacagaaatattttgttttataatttagatgataaccaatttgaattactgatgacagaaaaaatagcagtttgaattactcatccaagaaaatactagtacttaaaagacatgtaattattagattaatttagtttaacgcattcagaccaataagtagataatcttactacatactgcagccggcctgaagaacctatgcattatttaagctattgcttataagaaaaattaactgtgattatgttattatctactggtctaataatgttgtataatgctcagtttggtggacattggtttcactctcgtctattgatttcaagatgttacattgtatgttggttgtcctgtgattcatatccgtgtaccagtaaaaactcaaaaatcctcttaaacacacagagagacatggtgacgataaaacgacggcgtatttgcggtttgactcttgttccccaaagtctcaactctcaaggtcgttgggtggtccaatctcaaatctgaatggaggaagtgatg

SEQ ID NO: 5287 - DNA, 3000 bp, Unknown
  misc_feature (1)..( 3000): cDNA_ID_1828183_gDNA_ID_1620776_Annot_ID_50304 3000 nt of promoter + ATG
aaaagaaatggagaggtgtcaatctgaccaaatggcttatgttagaggagctgcttatgaagcaatgatgacttcaaaaagaatagcggcagagctcgagtcgaagatggagaaaggttgtcgttctgttactggttcgaatttcagtcgaagaaactgttcgtccattgttcctgattactccttatcacctgaatcacagactctaggctcttttagcgggtatgattctccggttgagtcctcgcctatttctcatacttcttgtaactctgaatttgatcggaggagtgtgaaccgcaaactttggagacgtgatgagaatggaggagtggttgatatctctttaaaggatggtcttttctcccgtgtaactaaaggaagcaccactgtctctgattcacctcttgtaccgtatgatacttgtgaaaatggagatgaatttgaagggtttctaatggaaagtttgagaaacaccactcctagtcctcaggtgaacatcaatccatctttgttgtatgtttgttagtttcatttatgttaaacatttctgacttttctgatacacagagacagcgttcacgtcgcatcaatgctgaagatttcaacatcttcagcactccacggaagctaatcagctctcttcaatatcctgatgatgttgatttagatcattcagacatccaaagtccaatactgagaggcgagagagagaaaaccataggatctcgcaagaatcctaaactcagaaagcaatttccaaccatggtggaaacaatgtcatcaactatcacagttagtgaagacacagctcaaacacagatgataaccggtaagaagaagaagaagaagatgagctatgccaaactcgttattgcgatatcttttgttgtggtggctctcttcgcaactgtgatattgatggtgaatcaagatgatgatgttggttactacactgtccctacatgattcacctcttattggtgttaagtttaatcgtagtgtagcagagagagtagtttagctatttaattacgtgttagttgtttgtaatgaacttgatacaagatgtagtagaatcttcttctacttgttgttctcattttgttttgtatggaaatgttaagaatataaacgatgttagtacaaaaggcttcaaaagagaatggtgtgtggaattagcagatatgcggatccggtataatccgggatgagaacacattggctatatttatacatagaaccggttcaaggttgataattttttccggtttaatcaaaccggttcgagcaatttattagcttcgagaaaaggaacaatttattcactcgttaagggttttgcgcacatccgcctcatgatgacaaactccgattccgaccactgtactccggcgaaaacctcaatttctggggatggattagaaaaagagagcgactttaagaagcaactgaactctgagatagatccacaagcttcttcctcgcaaaacgatgcaataactatggaagatggagccgtctctgtaaacaatagggatctgcaagagataaaggaatcatccttctctaaaggaagtgagcaatatcgagttgatggagcccttgaagaaagtttgaattttgaggagaaggaacaagaatctgaagctcagagactattggaagcagagaagagaagattgctggctgaaatcgaacttgggtcaatctttaggaagagtgttgatgtggatacgttgcctaagatcgaagagacgatggataatgatgttgataagattgaattggttgatcatactgcgttggttgatgttgttcatcatcctaagagaccagggactgctcaaaatgagaaggatacacctagaaagcttaagaaaattggagataagagaaatgttattgaggggagtggagtagaaaacaatgggaagcagtttaggagattgtacactaggaaacaattggagtcaatgaggtttgcccacattgtgaatcagaagaacctgtggagtgagatgtattctaggattctacctgaggtggtgactgagtatgaaagtttagtttatgtgaagaattacaagagttcaaagtctaatcgtgttcgtgggcgaacggagagtggcaatggtaatctcgataacctcgcagatgctttgtttgtctcttattccttgcattcttcacctgactgttttgtttttcttgttgttggttgagaataactttaggtgtatcaaatttagatagataggtctaagaaataggagtaaatatgttgcacttttccgggttttgtggtgttttctttctcaaatgggtcatcacatacaaatccagtctgctttagtatcagtgagtttcggcagtggtttttcctattaaacaacttcaatggtttcttgttgctaagcatctttttcatggtttggatgtctgtctgttttcctgctcgagagctcttttcgtgtttcttgatctgttcttcatttttaattcttccgtcagttcgagtacataacttgtcgttttgataggggcctcttattttcttttccacaggtcccatatctgctgtaccaagacgtaactgtgtgaatatatttgtacattgagctgtcagctgaagagatttgtcaaagtccatttttcaccaattttctcgtttcttagacacaatacaagtccctttttttctttcttttttctatgagctaacagcctaatacctcatacattcattctgtatatagattgttttgttcaggttataaaggacataggagtttcttttggttcaaattatatagggccattagtctttggctaaagttgtacatgttcatacattttcaataaaaatagtgcattcacactcagaaccttaaagttattatgtattttgatggacttatttcttctctgtttctatgcacgctcatttctgttgtgtttagaaatccttttgtttgttcctgttacttaccttgtatg

SEQ ID NO: 5288 - DNA, 3000 bp, Unknown
  misc_feature (1)..( 3000): cDNA_ID_1828176_gDNA_ID_1620776_Annot_ID_50306 3000 nt of promoter + ATG
catacaccattcagtaaatgaacttaaatgattgtcaaatgataatagatgtttgagaagaaaaaaacaattaaaaaaagtttgatgtttgaccaaagcgaaattattttttttctttagaaagaaaacttgttttcatgacaatggccttctacaagaaaaagtatttgttagtgtttgctctcaataatgttttccgaaacattaatcagttttctgaaaactaaaagtttatcatcaaaagaaaaagtaaaaagtaaaaataaaaccaaaagtttatatattccttttttgttgttgtcaaataatagaatccaatgccaaaaacataagcaaaccgacatgagtttttttttctcaatctctgattcaaaacctaacgttgcttctttcacagtggttggaattgattatttcaaccaccaaaaataagattctaccattttcaataaatgaattgtcaactagtttgaggctttgagcggttcgtttacagacgagcttttataaatgaaaccaatcatacattcatagcaattatctaaatcgcttatcctattagtcgatatttcaattcaaaaaagaaattctatttgtaattcttaacacacaaatattgaaccaattacgaaaagactatttaaaaaatatatatcattagtttttttttttcgtcaaatatatatatcattagttaaatttaacttttttaactactatcttaaatatatatttttttttacttccgtcacaattatataataataactcaagaaggacaatttatacttatttagttttaatgaagaaataacttatgtaaagtgaaacataatgaatatatgtatacatcataccaataatgcaaatacatggtcttattaaaacttgatcacacaggtgatgccataaaatattggtacgctttaacaactcctaaaactgcagcagccacaaccaccacagcggccacaccctcaactactgtcttcctccatagtctttgcttcaatgagccaaacttactataaaattcgcttgaacagtttgcaacatttctcataccctcatctgttttaggggtttgatgttgtggcgtggctcccttcaaagaaactgagagaccagctgctatagggattgtctttggcatcgtcacatacaaaactcccttagagaactttgcacgaatctcatttcttttacaatcttttgcaacttttgtttctttcatgaacctgattgttttggtttggtccactggacagcctcctgttattgttagtacaccactgttgttgatctgtattttaagatgctctttcttcaaacctacaccaattccacttttcattgataaataactatactctttagttctttcttttttttctacaaccacacattgaattaaacaaccggtctagctagagatccatacggggaaaatattctttacatattactcatctaaattcgtagacctagcactactggccaaaaggtccgtttggacatttaaacaacgtggagccaaagagagtttgagaagcaaaagtagcaatgtggaatcaaagtatactttacaatggttggagaaatagagaaacaaagtagcaatgtggaagcaaagtataatcaaagcttttaacaattctctcgtgctgtgctatatttcggttggaaaagatatatatatatatatatatatatatatatatatatatatatcaaacaaagtgcaatgcagacttacaatgctatatatatatatatatatatatatatatatatgtatatatagtaaactaagaaaagaactactatgtattattttttattttttttgttataaatttattgtaggaaataattgttgtacctgaaggaagatgtagctcaagaatgtcgatgtcttccgttcttctccatcgacaaaagggttcgatttcatcgtaaaagtgtgtctgtgaaccttccatatttactgccatttcgttaaaaatttcaatgaacacgaaaaataaacaaaaatatattactgaaaatctctctcttgttttcaatttgttggaaatcaatattgcctggtgattgtgatgatgacccatctaattgcttctatttatataatttgttctgtgcatgcagtttcttcttggatctcctatgtactgaatgattcgtttattacccttaaagatttgctttaaaaattaatttatttcactctttcgagtttatatagtttgttgtatcttgtgaaattggtgtttcatcacatgcacatatcttcgtctatgtggttccaaatattcttttgttctttttattttaccatgcattgctttattacttacacataatgacaattttgctggtcattgattagaacatcgttttaatatcgaatgggatgtcgagttgaatattttgacaacgttcgttggctgggtcatgaatgaagtcagaataccatttctttttcattaaacaatgctatttttttcccgcaaaacaatgctattgggctcattttgggcttaaaatgttttgcgtaatctcaatgtttgtggggcttttagtttttagcccatgtatggtttgataactttagtaactcgtgagaaaaaaaaaagcttcgttctcaatcccaattcgaaatcctagctgaagtctatgctccataatcaaatccagttcatcagagatcaaagatggctattgcacgaactggagtttatgttgatgattaccttgagtgtaagatccataatttctctctttatttgataaattttctctaattagttcgaattttagggttttaattgtacaattcggaaattcaatttcatgtagatgcaagcactttccctgcagagctacaaagattactaaacacagttcgcgaactagacgagagatctcaatgtaaatttttgttattacattgttctcttgcgtatgtttctttgtgtgtttcgtgaattgattatg

SEQ ID NO: 5289 - DNA, 3000 bp, Unknown
  misc_feature (1)..( 3000): cDNA_ID_1828168_gDNA_ID_1620776_Annot_ID_50309 3000 nt of promoter + ATG
atagtgttgttgttgggcagtttttgttagtctcctccaccagaaatttttgaccaaataaatctaaatttggtctgattttacttcttttatactaaatccatgttgttttcactcgacaaattgatcatggatcctttagacggtttatctttgtctctttcgaagctccgtcaaaccaattcatgaaatatatattattagttttgaagtctaactatcatcaacggaggacaaaagatttgaagactacattttgaagattctatagtgatatcaatttttcaaatctttgaaaaatattgatgcatgaaagttgttataaatttaaaaattatataatcgtagctttcaattttttttttgctatttctcatatctgatttgtgtaactggttaaatttcttgggtttatgtttataatgttgttgatgttgtgtaaaatcctctctttctaataaatattaataaaaatagtacaatttaatatatatatatatatacatatatactaagacgaatgaagatatataattcaactacagataaaatatattgcagttcaaataataatcatatatataatagcagagttttctctcctctaaaagtgtccacgtcactacatctttttaatgtggagcccacatgtttttactctgtcttcacatttttttctatgcgtgagatagatttagtgatgtttatggggcacgatttagtgatgtttatggggcacgatttggtcaaaaagcccatgagccaaagaaccaaatagacttagtgaggtgtatcgggccaagatttagtcaaaagaaccaaataaaccagtatactccttctgtgtagtcaatggacgaactggcagctaggcgaggagatagatgagttgtgcacttgagggacgagctgacgagtaggtgaggaattggacgagctgactagctgacagctaggcgaggagatggtcgttgagtgatgtggagcttgaagacgagctgaagaacttaaagacgagctggagtatggggcacgatttggtcaaaaagcccatgagccaaagaaccaaatagacttagtgaggtgtatcgggccaagatttagtcaaaagaaccaaataaaccagtatactccttctgtgtagtcaatggacaaactggcagctaggcgaggagatagatgagttgtgcacttgagggacgagctgacgagtaggtgaggaattggacgagctgactagctgacagctaggcgaggagatggtcgttgagtgatgtggagcttgaagacgagctgaagaacttaaagacgagctggagctttccgtatttttcttccccagaagctcaaacatcaacagttattcactaaaaggtacttaaatacatggcttaattcctacaaaattccactacttgcaatttaattcatacttttaatatctcaaatcgaaactgtaactggagaaaagcaaaaacctcctatacatcttcctttaaactactataaaatcatcatctcccatcacccccaaacacaattatcactttccaccagaaaatattacacactctgaaaatggctgaagttgatgttgttgcaattccttctaaagcaaactatgtagcttttgatgctttacgtcttggtcgctctactcaacaggttgttggtcgcctacttcgtttttgggatgctcgcaacatcaagaaagatggccaattcatgggcatagtcctcctgttacttgatgaaaaagtaaatcatcttagatgtttaatgcttttttgtttcatatgtaattgatggctaactaacacttaatttgtttcattaatagtgctccgtaatccatgcttttatcccagcagctcttgcttcacatttccgccaagttttgcgtgaaggcataatcttcaatgttagtgggtttgaagtgggacgttgcacgaaaatctacaagatcactgacaatccttttctcctccgttttctccctgccacaacgattattgaagtttcagatgttggccctacaattgagagtgaaaaatttatgctacgtaactttgacaaccttcaagctcttgctaacaccaatattgaacttcctggtaatatttttcatgattcttacattttttaaacatgaactatgattataacacctttgaaatgatctagatgttgtaggccaaatcactttcgtccaagggtcaaacttgaatgatccaacttctactcaacgtttggttttgcgataccggattgattcgtaagctagcacttccaaaccaaaaataaataatgaacaaaactttaaaattgaactgatacttccgtctttttattttaaggtctgttattgtctacttatcactatgggatgatgtcgccgcaacctttcgtgcccatcttagctctggtgatacaatttactcggtcatgctaataactaccgtcaacccaaagatgtttggaggttagataaaactgatttatttccaaattttactctcaaattttaagataaaagataacatatggtcattcttactgtttaaggtaacctttatctcaactccacacccgcaacaaggttttttttttacagcagcattcaaccaatccaagagtttatcaaaaggttaggttcttatcaataaatctctcataactcacttctataaacacatacgcttaaaatctttctattgcttaattattaatggatgcaggatgggtataaaaagtggagagtctattgcacgtgctgatacagcagctggaatacgtaaaaaagaaatggtatcgattcatcagcttcacaaattcatatctaaaactgatgaacaggtattacaaatatattcaacataattaagttccaaaattaactccaaagaatcactactaatgttttgtttacaatgttccataagtcacaggatgctgatttcctttgcaatgctaaggtgttagatgtactgcaaaagaatg

SEQ ID NO: 5290 - DNA, 3000 bp, Unknown; identical to SEQ ID NO: 5272
  misc_feature (1)..( 3000): cDNA_ID_3076443_gDNA_ID_1620776_Annot_ID_167729 3000 nt of promoter + ATG

SEQ ID NO: 5291 - DNA, 3000 bp, Unknown
  misc_feature (1)..( 3000): cDNA_ID_1828161_gDNA_ID_1620776_Annot_ID_50311 3000 nt of promoter + ATG
ctacacagaaggagtatactggtttatttggttcttttgactaaatcttggcccgatacacctcactaagtctatttggttctttggctcatgggctttttgaccaaatcgtgccccataaacatcactaaatcgtgccccataaacatcactaaatctatctcacgcatagaaaaaaatgtgaagacagagtaaaaacatgtgggctccacattaaaaagatgtagtgacgtggacacttttagaggagagaaaactctgctattatatatatgattattatttgaactgcaatatattttatctgtagttgaattatatatcttcattcgtcttagtatatatgtatatatatatatatattaaattgtactatttttattaatatttattagaaagagaggattttacacaacatcaacaacattataaacataaacccaagaaatttaaccagttacacaaatcagatatgagaaatagcaaaaaaaaaattgaaagctacgattatataatttttaaatttataacaactttcatgcatcaatatttttcaaagatttgaaaaattgatatcactatagaatcttcaaaatgtagtcttcaaatcttttgtcctccgttgatgatagttagacttcaaaactaataatatatatttcatgaattggtttgacggagcttcgaaagagacaaagataaaccgtctaaaggatccatgatcaatttgtcgagtgaaaacaacatggatttagtataaaagaagtaaaatcagaccaaatttagatttatttggtcaaaaatttctggtggaggagactaacaaaaactgcccaacaacaacactatagccaaactttaaggaatcaacagatcgaaccgaaaaaggtcaagaaaaacattgacgaggataattttttttgaaatacataatccaaagcaaacatgcataccatattagataatactattattcactttttaaactaactggtcacacagattgaagatattttaccgtaataaaatggaaagtaaaaatgttattataaaatagaaatcatttcgccgatatttttatcctttgacaatccttgctaaaatttatctacttttcgtctctaaacttgtttcaccaattgaaaaaacgattatcccgatttgtggctcttgcctctcgtctaccggcttatatttgcaatctgcaacatatcgtcgtctccctattccatacgtatcaagcgagatatgttcagtctctgacttggccttctaatattttgaaaattttggaatgctttcttcaagtgtatgaaccatattgtatacttcgaactcgactctgatactgaccttatgggtccccatcttgcaactctttccgttgtgaagagcatactgctgcaaccctcctcctttacaaagagaacaatttgctccttaccctccttcatgaagaaaactgttacaatgtggtctccggtctggaaccgtccattcttccagttgttactatcttttggagaagaagtaatacgtctcatgccggtgagaattgaggtcttggattccttttcaaagtcaaattgtcaatcgactatgattatttacgacttgcttgtggatgtagtatcgacttacgattttctcgcttttgtctatgtgccttatcgctcatgtctccgaaagttggatttatcgtcaaggtatctattcagtttatattatgctctaatcagtgtattaaattttgttgtcttaagtcttggttgtgatgaacccttattctctctaattcctcttatcgtatgaatggaaaaatcagtctttgcacaaagaaaggatatgtaatagtgaaaattttcttttctaatatgtaaactgaataaatcaaagaaataaaaaattcggtccatcttcagatcataaattcatatgtataaacaaacaggacaatttaatttaagatgttagacaaacatgtttaggtgtcgaacatgacactttagttttctctctaataaaaatttctacatatttttatttaattgtgtgtttattttcataaatacatgtcttactactcacatctacaacaatcacatgtcattaatatagtatatatatacaataagagtgacaatttataatagctttcaacattatgaacttaactgattgtgctttttattgctagaattttattatagatatgtcaattatatttagaatcgaaatttattttctttcatatctccacagcttgtgtcctttatgaccgttaatctttaccgctaatttttgatttattcataatggtaagattatttttttgctttttatttgataataaagcagatgatatggtatgatgacaatttttatataccttctattaaatgtattttttttaaaaaaattggtgtgatgataatttttttaaaaaggttttactgtatttaaattttctaaaaaatacatgtaaacatgaaaatacattaagataaaatgataaaccgttaatttatttttctgataagtattctaaaatctacttatatatctaaacttataaaacttaaaaacaaataaataggatttaaaaaataaaaataatcatcatgtacatatttggtatggaatccaaaacaaatacaaaattttgacaaatgtcacacaacattgattaggtgcttatcaagaagattagctccttatcatgattaagctttaatacgaagactcatttcttgactaagacttgacttcaatggcgattctaaaaccctaagcgagaatccaaaaatgagtgaagaagatcacattgcttaggtgaagaagtctccgaagaatctctcaaaactatcttcgtcttctcttacaattccgacgaacagagatttccattctctctccaagtccgacgagttcaagcgtccgatcgatgagttagcttggagctcgcagtctgttcttgagacgattggtggtaagaaatcg

SEQ ID NO: 5292 - DNA, 3000 bp, Unknown
  misc_feature (1)..( 3000): cDNA_ID_1828157_gDNA_ID_1620776_Annot_ID_50312 3000 nt of promoter + ATG
cacacggtgttatgtaacctgttttttttttttgcattgtgacgtgttgaagaaatgaatcttgtagcacacttcttgttttctttgatttagttctgaagggattttctggtgattgttaaatgagactgaattagttttttcctctttgtgttcagctaaactctcctttaccaactaggaggataccagatcataagatgcaccatgatgaagaagatagtttttctgttgcttcctcgtatcctttatgtgatagttaaacgaaaacagaaacattgatttttaatatctaaccactaaaggacttttatccttagccatatatagatcagctacatccataagaagttttaaacccaagataacgattggagttgctccaacatttagtagcacatcgcgactggagagacgaagagaggtaatttttttgggtagcttataaggaaacgttttaaggaagcatggcattgctttgtttctctcattagagatgtcctatttattgttccttgttcgtgtatctatcactctgctaattgtcagcatattctggtttcagttttaccagaagttagaggaaaaacagaaagcacttgaagcagagaaaagagaaaacgagaaaaggcttaaggtaaatgttatatcctcatgcattacacttgcattcgtcaatagataatgtaggaatcttctatatattgtttccgtgttagttatgacaacagaaaaagttctgcatacaattcttgaaacgaaaatatattcaatataatgtatattgagcagtctcaaaaatatttggatatgtaatttatttggataggaagagcaagaagcagtcactaagcaacttaggaagaacatggcttacaaagctaatccggtaccaagtttctaccaagagggtcctccaccgaaacaaccattgaaaaaggtatggaacgaaacctcactgtcttcacttaccttttttacgcccactttgattcattttattgcttgtccaagactgaaaacatattgaatgatgagattcaacatttagttttcttttcttgtgatcgggtaagataggcttatcctcaccacaaacagcttatcctactcaactacgtctatggtcactttagctttgtttttattttaattttaagcagtaactcactaccacaattgtgaattcactttattcatggtaacagaagttgctgaatttctgtattcagatgttggattttggttatatgggctctagtagtctacggtaggaatgattccaaacgcggagattttaactttctatgattgtttgatttgcagtttccattgactcggcctaagtcaccaaaccttaaccgtagaaagagctgcagcgacacagttaacgcatcatatcaggaagtgaaggggaagcattgtgctcgacatcgtcacagtgtaggtggttgcaaggatgaagtcaaaacgaacagtgtcccaaggacaccaaatagcagcagcaaagatcagatgagaaagtccaaaaagggaacaccaaagtctgaagaagtacatgaaatgtttaatagtggccatgatggagagactggtgagaatggcgttggtgttgtggaggagtgaagcttcgcgtagttgtagtttcgttttgactaactttggtgaatgagaaaaacaagaaaaatggtgagaagcaactgcaaggagaagaacaggttttagagtgaaagaacaagtttaaagtttgtttgtttgtttgttgtctaatgttctgcagattgattgttctaaatttgattgctaaaatcagctgctctattttcgtatgatcttttcttatctgtttgacaattaatgtgaaatgtatattaaagttgttgttgtatggatcccaaattcccaattattataactagattaatggttaagctgagcgacatctatttatataatttcattgtgtttgtatgttttatttttctaagtacaatagatataaaagtttatgagagatgtagagattttgtagttttgaattcgttattcttgaaccaattgtatatattttattatttaaacataaatataaataaaaaagattgcttaaccatcgggttagagaatatttatgtaagtatatataaagaaaaatacaaatataaagatttattaatataagattaacaaacaatgtatgtttttttttaattatcaaaaatatatttttgatatgaaataaaaaaaactctcgtgattatttgttacattgttaaaaaattaactctaaaaaaatatttcttcttataatctttcctcctaatttagcctttcttattagtcacacccaattcaaaaaaaaagctaaaatatttggtaaatgggaaattctactatgatgcatagaatctcgtctgccttgcgttaaaaaaaacgttatttggttattatgatgtctataaaattgatgcttagcttaggctagcactagtttaaaaagaaagttgataatgtcatggagactcaaaattttaattgcaaatgtaagaagcttgtgatctgtatttgttgctcgacgtgccaactagttaattagtagtatagactacactaatattaataaccaagtcaacagtacaattttttagtaaagttcatcttttcaacattttactaattatagtttattgacttttgactgaagaaaaaacgttaattaataatgagtgtgttacccttttcctctctctctccatcgacccttaaatttctgcaactttcaaagctaatcctcctccagcatctcacggatctactataccttttcttccctttttctgaattgaatcatatttttttttaatattatacgatcaatacaaacactgctacaaatgtatcataaatactctctcactttctcttatcaagcaatcttgttgaagaaataggattttgagaatttgatcacagttttgaaggaagaaagatcaaacaatg

SEQ ID NO: 5293 - DNA, 3000 bp, Unknown; identical to SEQ ID NO: 5273
  misc_feature (1)..( 3000): cDNA_ID_1828261_gDNA_ID_1620776_Annot_ID_50315 3000 nt of promoter + ATG

SEQ ID NO: 5294 - DNA, 3000 bp, Unknown
  misc_feature (1)..( 3000): cDNA_ID_1828257_gDNA_ID_1620776_Annot_ID_50317 3000 nt of promoter + ATG
ctttttatgtaaataaaaactctgaaattgaaagaggcactccaaggctagtaattaattacaaaccattagatactgctttaggccatcttcattggtaagatactttaaaagttaatgtagtttctgttcaattataaacacacacatatacagatagtttctcgattattactttctttgcagagaaactattctcaatctctctcatatctctcttctatttttattattattttatactttttagttaatgagaaactatgtaagagactactgatggagatgctcttaaaatgtattagatatccaattccaaagataccaacttcaagaacttagacttctttttttgtaataaacttagttaaaaaagatatatatatatatatatatatgtttattttcataaatatcttaatacagaacatattaaaatctaaaaatgttaatttatgtgataaaaaaaaatgttaattaataagatgtttatttgtaattggttgcttaaaatccgatgtaaactgtctcaaaagcttataacatattacatattctaatgattaaaatctatataaatatatataaacaatatagaatttatagatattattaaagtgatggaatatataagagttttgtgacatcacaaagccaccattaatggatctaaatttctttcacttgtccactatctctctaccaaatttgtcatcttcgtccccactaatcactctcgcaagtatctttcttctttccttaaactcttaaactctcgccatcagatctttttctctgatttcttgggtcagtattcttcttcatagattgtttcattgtttgctctgtcttgttgcgttctaggttttgtttgttctgtctacctctgtaatttctctgttttgctctctagggtctttttaatttgatgctaattacattatttttgcttctaagtggatgcaattagattattattttcatagaatgtaatgatttcttcggagtaacagcttgtttagttgaacaaatggttttgtggaataagtatttgattctttggccttaaagttaatctcttttctaatgtaacttaaagtcatatcttgttattttcatttgcttaatcaaaaatagaaacttgacttggggtttacattcttgcgtctttctaatgttatcatgatgtatcacactgttatttgtattttccaggtgagaaaataacaaagctagctagaaatggaacagtatgagtttcttgagcaaattggaaaaggatcttttgggtcagctcttttagtgagacataagcatgagaagaaaaagtgagacatgctatcttcttttgctgcctcttattgttttacttcaagaaagttttaaatttttgatgtcatgtattggttttcattagatatgtattgaaaaagatccgtcttgcccggcaaactcaaaggaccagacgatctgcacatcaagaggttggtgttcttctatatactctctgtatgataagcttttttctatggtttgatcttagtttcatttctttgagtagatggagcttatctcgaaaatgcgtcatccatttatcgtggaatacaaagactcttgggtggaaaaggtaaggcataccttatgacttgaacaaaagtatatatcattccacaccttttgagctaataaggattttgtattctttctcttaggcttgctatgtgtgcattgtcataggttattgtgaaggaggagacatgttagttttctgtggttcagcttttttttttacgtagattctgtcattttggcttcactatatagatggtgacgcagcctcatattcttcttatgttacagggcacaagctatcaagaaatccaatggtgtgcattttcaggaagaggtgtgcatttcttttctcagtgcttttttcatgaactttgatttggtatagttatcatcctattttgtgcctttttctttcagaaactgtgcaagtggcttgttcagctcctgatgggccttgagtacttacattctaaccatattcttcatcgtgatgtcaaggtatcaatcatgttgctgactagacaatccaaagcttaaagatgatacttcctatatgctaatgttttgtatttttgtccagtgttctaacatattcttgaccaaagagcaagatatacgccttggtgagcttatctttctgttttcttgtcgactcttcttctgaaagaatagaatatcaacctgattatttgccgttacaggtgattttgggttagccaagattctaacatccgacgatctcacatcctctgtgagttttatagttactctatcatatgagtgcatatctaccatgcaccgtgtttcctttaagtcttttctaagattatttgtcctatgaatgtcaggttgtcgggactcccagctatatgtgccctgagcttttagctgatataccttatggttccaaatctgacatttggtctttaggtacgtttttattgcatgtagtagtggattgttaagttcccttatttgctacataaggaagcagtaatctatctcttgaattactaaagtttcaagcataagcctgaaaagattactgcaatttagttttcatgaggtttctaagaagtcttcataaaccataaggaagactgaagagagttctcaagtcttgtgttctttttgttactagatcattctaagttgtctagtgtgaattggatcgtagcgtgagggccagctgtgttatctgattaaatttgtcaattagcttgatggtctttttataaatacgagatgcagagagattgtgaggggtgttaagtgatctgggctggtttgggggtatggtggcttggtagagtaagctactctctcgatctaaactcttgttggttctttgattcagtttctgatgtgagaaataaagaaaatcattctaaaatcttaacaaaaatattgcatgtgtcacaaattatg

SEQ ID NO: 5295 - DNA, 3000 bp, Unknown
  misc_feature (1)..( 3000): cDNA_ID_1826633_gDNA_ID_1620777_Annot_ID_167780 3000 nt of promoter + ATG
tgtagaaaattaggatgcaaagactttagatatttcaatcttattggtaaaaataaattctaataattatttttattattattaaatatagtttataaatattatttatgataagtatgaatttatttgaaaaatagtgactacaattgatttattaataattatttttttgaaaattaaataattcataaataaatgaataaataaaaaactcattttacaaattcactatttaaaatcttcaaatatgatttcaaaagaacagaaaagtaaaactacatttaatcaatcaaaattatttgataataaaatataaatatttttttaaatagttttgaaattatatggaaaaagaaaaaagtattttattttcttttattattctctcttaaagtgaaagtctcgtttatgagactttagaaagaaaaaaaaataaacgaaaagaaaaagagtttacaaacttttaaaattaataaaatcttgaaagggagattggttaaaaaataacttgaagaatttaaaatattttcaaaactaaaaatattaacaaagtcttctttgtcaccgttaatgtcctcttgttcttctatttcaattcgagtttggttatagaaggaattgagtcgggtctctttatcgtttcttggaaaaattcctttatggtggtgtttatattgatctttttcggcggtggcgacaagtgacgactcctctggattcatgtgaatgctctgtaaaagatcgaacacaacttcttttgtaagttcttttaatccctctaatactttctctatagtttctttcgttggcttcaatttttcggccactgaaactatcttcgtgccggcttttctcatcgttgaaaaaaaagctctaaaataacagaaagaaaatggttaaactggagaagaagacggacccaattcaattggaagagatatgtgtatacgttcatttatgagtctaaaagaaaatatccatacatttataactctacatccctaaggaaataatatcccatatctctactcatacacattagtcataaaatcttacttggtacttgtcaaattccctaattgatcataaactcctactaaatatctcataaatgatgtttatacacataatatataccataaccatcgatatttacgtcgtatcaatctcacgtcttaatcaatgcccatatcaaaacttcatgcataccttatatagctagcatctctcccatgttcgaacaacttcacatctcgaattaaatcaaatctttagacgatcaaaactattatacaattttatccaattatattagtattaattaaataaattatattgttataaattttagtggcctgttaaattagttattatccatactgaatgtttgttaaaatatataacatatgctaagtttaattcaccaataacacatataacaaaaagttgttaaaaaaattgggagatttgcaaaactaccatttttttactacctttttgcaacaatacttttttatgttgtccatttttaaaaataccctttcccttgaacaaaatgaccaaattaccctcatctaatagaaacatgtaattggaaactgaacttttcccaccaattttttggcgccaaaatttttttttcccgccaaaaaaaaagtttccgccaaacttttttcccgcaaaaaaaaaaattctgccaaaagaaaaattttccgtcaaatttttttttcgtaacaaatttttcctcagccaaaaaattgattttaaaaatccttataaatattttctggcggcaaatagatttacaaggaattttaaaagggttttaaaagatttacaagagatttaaaaatgttttaaaagatttacaagagattttaaaagagttttaaaagatttacaagggattttaaaagggttttaaaaaatttacaagtaattttaaaaggttttaaaatctcttgtaaatctttcaaaacacttttaaaccctttaaaaatctttacaaatcatttgtaaatcttttaaagccctttaaagttccttgtaaatattgtaaaccccttttaaaatccattgtaaatattttaaaatccttttaaaacaattttaaaccctttaaaaatctttataagacatttgtaaatcttttcaatccctttaaaatatcttgtaaatcttttaaaacccttttaaaatcccttgtaaatcttttaaaaaccttttaaaatcccttgtaaatcacccttttaaaatcccttgtacatcacccttttaaaattccttgtaaatcttataaaacccctttaaaatcccttgtaaatcttttaaaactcttttaaaatcccttgtaaatctatttcccgcaaaaaaaaaaattggcgggaaaaatatttttgaaaacaaaatttggcgggaaattttttttcgaaattttttggcgggaaatttattttggaatattttaggcaaaaaatattaatatttcattttgtaaacctaaaacaatttccaaataagagtaaaatggtcgttaaaaatttaaagagggtagaaataaaaatggataaaataaaagagtatagttgaaaaggggcatcataaaaaaggcattagaaataatttttcatgttttaaatgacaataatttaaaagttaactaaaagagtctataatgggtaataacaaacgtataacactagtgaaaataggacttgtcaatccatgaattaaatattttcatggatacggtcgtagggaaataaatctttccgtcagtcctaaaaagcctaaattattggatagacaaaaatctgaaaatcttaaatcacacgtaaatcaaacgtatttacccccacatggaacttaatccaatctattaaattcaggtggcgaccgttcattggttcttgtctctagaatcccaaaggactcgtttccgagtataaaaatacgttcctcaattcaaagtacaaaccaaaaacagaaccgaaacagaaa

SEQ ID NO: 5296 - DNA, 3000 bp, Unknown
  misc_feature (1)..( 3000): cDNA_ID_2161251_gDNA_ID_1620777_Annot_ID_167793 3000 nt of promoter + ATG
ctaagtttaaattcatactaaatattatttcattccttgtatatttagattctgattgcattggtagggcgtaaataaggcctttaactcgagttttgagtactcaagtgtctaccaaataattattgcacgtcatattttatttaatagaattgtctcctaacaatttaaacccaattaatttagcactaatttagtgtctcccgtgtaaggcttatccatcatattcatatgacttacacggtcaatacagctcactcaacttttatatgtgtttatatgaatttcatctttgataatgtagaattattccaatacgtaacacaacaaactaatcaaaatcccacgtgtaggacccaaagcatggacattggtggctccaattcgggtcgggtacactagtcggatattggcccgtatctctgttcacacacctgagggagcatggaaacatggtccagtttggtggcgagatcgtgaacacacgacctggtggttcacatacttcgactcaaatgggcagtggccattttgccggtgaaggttttggaaaagcgtcttactttaggaatcttcaaatggtagattgggacaatactcttattccgatatctaatcttaaagttcttgcagatcatcctaattgttatgatataagaggaggggtaaaccgtgtttggggtaactttttttattacggaggaccgggtaaaaactcgaaatgtccatagagaaaaaaaagaagtggatagtgttgttttgagcttaagtaaatgagattttttgggatttagagctcaggacaatgatgaaagatccatagtttttttttttgtttgtaagaaaagaaatgtatcgattgattgatatgttatcaaatgtgtaaatgtagaatatggtgttaagtggaagtaggcgtttatattttttttcctatgtctttctttgtttgtaatgcatgcctgaaagaaattataacacataatttatatactaacaattggctaatttctcacagtccatccatattttcatttttgcacttcccaagactcaggaaagctaatggttctcacaatacaaaaccaagactcgaattatgattacagttccatttaacataagtgcagtttctgaacacgattttatggtttttaatcaaaattaaggagattaattgaatttggttcattcgaaagaattttatagaatggacggaattagaaagaaaaagaagaatacaaggtgaatggacataggctaaaaagaacaagatgatatgatccttgaacgaccattatacatgtgtagtccgacatgcagccttttttatcaacataatttttttagatatactagagtatttcacaacttaactttctatcattcttctttatttttgatcaatcaattaacataaatttctttacgttatcataatacgtgtcgcgtataatgtagatggcaagaaagccaactcctataggacaaacaacatcttaccactttgtgtcttgacaagattggaagaactagaggcttaattactgccaacattaaaacaattgttacgaagttttcctatctgatgttcgttgagagtgtgcaacctcctatgcactaggaaacctcgttgttggtagtctgttcaagttaaacagagttatcgtctcattcagtcaccaaaggaggtgttagttagtcatgatgtagcgtgcttcaacaattctattgtggttcaaatacttgtttcactactgaagtgttgtgaaaggaaggacaaatgtgtaaggagttctattgctgaatgcttggccaaattggctctgatggaacctgagacaatggttccaaaatttgcatcaaggttgacaatccaaaacccagagactaagcaaacacttattacggttcaagaagaccacaacattgatgaaatgatcaaaccaataattccatgatttattagactactcaaaaacaatgatcatgtattttatacaattattgtaataagtttaagggtccctaaatttatatatatataaactattcttcaatgtattatacagaagtgtggtattgacgtcgataactcttagtgaacgcaaatcaaatcttttgaaaggatgcatcaatgaaaaagtgtttcatgatgtttatgagcttgtttatttacatcatgatgtttaacactttgctcaaatataattgtttgcagaaatatggtctagagataagtatagcagtttgggagggtgtcattacactttttaagaattccggagacaaagtaaatccagcaactgtgtagaaatatcattcataaagttttaagcgtggacgtgtgtacgacgttgattaatgtggaccacgaatacttaattagaaatttcacgaaacatgaagaagaaggattctccggaaacttgtatgtattattatttttaacagttcagcaactgctcctacttataccaaccaaacgttactttttaataaaacagttcaccatatctctcaaatctcaatggaacccacttttattttcccaaactatacacgtttcatctacacacaagaaagcatcaatcacaatacactgttaaatagagaaaataaaaaataaaagtgtgcgtctttcattggtccttggaaaacagagctcgtttcatgcgtgagggcaaatgaaaaacgaacgagaaagttgtgtgtttctgtggataaaccatttttcgtagaaagaaattattcaatcaacaaagcagtgattcatacaatttgtcttgtttagggtttttcatctttgattcaatgtcgacacagagcaacctctgttgactcgtttgcttctttctttcttagatacagaattggaatttggttcatcttctttgtgaaaaatcagattttgattactgggttttagacaagtctgcgttttttttattgaagagacgaaagatttaagttttggggttttggttaaggaggaggatg

SEQ ID NO: 5297 - DNA, 3000 bp, Unknown
  misc_feature (1)..( 3000): cDNA_ID_3076488_gDNA_ID_1620777_Annot_ID_167799 3000 nt of promoter + ATG
gggtgaggatcaacggtcgggatccaagggaatgggatggagggaccaaagctgtgtttgttttttatatggattcatacgaaaccgtaactttgtgtcagataattttcgaacaaacatggcccgaaaatggatgggtcaatcaacctgtccatcaacgaaaagacccttttaacacttttttttaatagagaaaatagaggaacatatttgataaaatattggtttataaatcttgttattgtttttccgttgatgatttacattatggaaacaaggtttcgaagcactaaactcattaaatatggttgcaaatctataaatattggctaaaaaatcatggctggtcactatgaacgttggagattagtttggaaaaattccatagttattaaaaaatggttgagaggcttagtaaatttcctcaataatttatttgttggatcctaggtcacaattagaatggaccacgagccgaattataaattcagtactttagctgcatgtataatacgtagacgaactttataattgggttacatatatttatgtcgtcttacattatttggtgatagattattgcaattatatagataggtagggagataggtacagaaaaatgaaaagaatctatcaaatcacaaagcctagatatgttgatggaaaatgaatataacatcgcacgtagtttcctgagctcaatactcaacatcagcatccaagtggcgcatcgcatggataaccagagaaagaaaatattgaacattttgattgtgtctccagaaaaaatttgtattgttttttctcaccaagaatatgcatatgtgaacaaataatatgttaaataaataaataacatattttcgtctgatctttgccaataataagaaggcaaactcgtttgtgatatatatattgttttcgcttttgtgacttcatatttatctaatttcaagtctcctttctttaacttaatttccccttgattatttatgatacgttaggtgatttagagcaaccaatagtttgcaagtacctttaagatgaaaatgactttctctagtctttgagaaaaaaaataaaaacagaaacaaagtttatattaaagtagtatgaaagaacatgccactttcttgattgaaaattatatgatagacgtaaaaagctgtcgacaaaactaaaagaatagttccattcgaaatattatagatgctctcgttctattttctttttggttaaagtgctcgtttttttcttgatactctctttaaattacggccaatttcataatttcaaacttaatacatatgtaaaatcattaaatataccaaattatgcttatgtctatttttgtgaataaattacatagttcattttcataagctaaagtcatcatgaatatcagcatcatcaattttggcataaatttcataaatcataaattagctaagaccattgattttgcagctcctatacgcctagaccagcgtttattttattcttagttttatccacaaacttgctttatacagaactattctaaagtaaacactagctgatactatatactaatttaatcttaattagacgattttccattagggccttcttatctactatctaggaacggaccttcgcttctcgaaacccatttcatcccgtacaatcgaagtgtccaacatccgagttggtaaaaaatttcttactacgtagtaggtactaagaatcacttatcatatccatatattcttcacatttgatttatttcataccatcatttgaatatatatgtgttgattatcattttgttagtagtcgtgttcgataattttgttctgtatctagcaacaaatttacagtgacaagtattaaaataataccgctctttaactatatatatgtatgtatcagctcactagttgtttgtaaccagttcttgtttttccagtttgatatattcgattcaacatacccaaaacatctctcatatactgaactaatatctatttctaattgactcgattcaatatcattagtactatattatcttctgatatgcgacttcatttgttttctttcttctgttcggttttccacttgttgtttaacattttcaccttgtttcactatttgcaatcaaataaacgatttatgtaggtgtatctatatatgttcttaggatcataataaaaatatattttctacaaagtttttcgaaaatatatatacattggggattatttttttaactgtctacagctcacacatgcatattatcatatttgaatgaagataacgatacaatgccgatactgatacaaatcattatgttagatgctcaatttgtttctataggtcctataatatatacatcaagtcatcaactatactttttgaaaagaaaattacacagagctttcaaataagttgcgtgtagtttagtggttatatgtactagtagttatgttaccatctaagtgtattgtcgatgagaaaaaaaagagttcaaataaactgacatagtatgctggtaaataatcacactttttccgttttttccatttcgttttcaataatatataattttgtttctcgccatgtttcattgatattaaaaatctcatgatcatgcaaattctatcataacacagccttggacctttcttagatatatatgttaggaaggccttatctcgacctatgaagcctgaagctccattgagccttttagcatatgtcctttttcgtaattatcattttatttttcttctccgttaactttcatatcttttttcttccaaaagaaaataaattaagatccctcgagcctctctctctctctacacactcccatagaaataaatattttcaagaaccaaaaagtttgttataagcggtttcatattattcttcttcatcgattcttgattttgcaagaagacaattcaagaaagcgatttagaagacggaggagttcttaccggagatcttatacttatg

SEQ ID NO: 5298 - DNA, 3000 bp, Unknown
  misc_feature (1)..( 3000): cDNA_ID_2161264_gDNA_ID_1620777_Annot_ID_167797 3000 nt of promoter + ATG
ataattttaaaatttgttcaaagtacaacttgcctttttgaatgatctcatctgttttttttttctttggttgtgtgctttatttaaccatctttttctttcacctgaatgaaatcataaactaataaagaaaaaagaagcttacaattgttagacaatattcacatgggatgcgatgttatctactagtttctcagttcaatcacatgcttggtttctttcatgttgatctgatttagtaatacaagttgatcacatagacttttgatttctcacttcttggttgttgtgatacggtaatgcaacttagcgaaagcccttctttggactagctaaaaaagcaacacattcttttcttctaatgcgtggttatcttgctacttagagtggatggtctcttattgacttttatagtcaacatttgtcttgttgcatgcaatatcatcaatgttacatgtttgcatatttgatctagaagataagaatactgcaacgagaagaataggaacatagtgcatgattagcttgaattagaggttcttttggtttttgttataaagtaaaaggtggaaaagtcacatggactcccgtggattccgctaatgaccccaccaactttctctcctaagattttatttttgatttggttattaaaaaaaaaaggagacatagggttctctacacaccacaatcaaatcatctataagactgcgactatgcttcttctctatctttctcaactcttttgccatgccctctggttgcgttgttcccttggtgggtcgtattatgtctctctgaggcacgctactagcacgtgtctacttgcatgttaccttcttcagtgaaccctattttcaaagcagtcaatgcattgctgaaaatgtaaataataatcccaaccatacaaactatcgttttttgccattaaactgttaccctaactactcatatgtgtgtaatgtgaacgtaatggtctctataatatatgatcagttcatgttttatgcattttagtatatttttattggcctatttaacatctctatttccttcataattactgtggctgctgtagaaatcttttaacttttataatatgtttataaaactgactgaattgcgtgaattataaattgactgaaattaccttggctgttgtagaaatcttttaactttttttaatatatgtttataaactgactgaaattgcgtgtatatattatgtagtccagtattttgtgtgactgactaaatattttgactaagcacggttgcttggtccgactatatattctgtcacataggcaaaactattgtaaaatcaggtaatgttcttgaatcgtctttgggttgagttttggtgtcagagaagctgggtaagtgggtcagtagagtcgttggggcatatatataaatgtccaaatacattaaagaaagagagagagaaaaggaaattgagttttggggtatcgtggagaacataaatgagaggtgtagcgttatttccgggggttcacacaacctctaaatggtatttacacgtgtcatattgagattgggtaattagtaggcctaaggggggatgtctcctcatggggacaagactattagtcctctcctgacaaatgacaatggaggtaactattcactgcggcggttttttgactgctgcactcaatcgtgtgcgtcctcgatattctctaccccttaccactctttcttctttcccttttttgccctctttagccacttagccgttttagccgagaaagcccatttaaactttttcatggtagtgaatagtgataattctgttacatttacttgctataacctataaccattctctgtctttgatgtctttgtatagtgataattcttgtgaatttggtgtaacagaggatggtgtaatatcatctgacgaggaactgagtggaggtgatcatgaggtagcagaggatgggagacaaagatgtgaagaccgggacctcaaagataggttgctacgcaaatttggaagccgtattagtactttaaagcttgagttctcaaagaagaagaagaaaggaaagttaccaagagaagcaagacaagctcttcttgattggtggaatctccattataagtggccttaccctactgtaagcaaaagcaacacttgcatgttttccgacataactaaccactacacttatatataaatgggtggtatgaatgtgtgtgtacacaggaaggagataagatagcattagctgatgcaacggggttagaccaaaaacaaatcaacaattggtttataaaccaaaggaaacgtcattggaagccatcagagaatatgcctttcgctatgatggatgattctagtggatcattctttaccgaggaatgaatttatttatggtacttatttaacgttgattaaaagatggatgtataattctgccttgctttgccgacaaaggaaaaaaagaaagaaagagtgaagcatggacgacacatgaaatggatcttacactcactcacatgtagtagaaggaacaagtcaaaatgctttgtaactattattatcggtgaataaaaataacctcttttgtcttctccggacctctcgtgatatagcttttaccctcttattggcaaaacgttgaacaaacaaaatacttagataggttagatttgtttattaactatgtgtttttcaaaaataattataaaatatcttgttatttgtgtaaatcacactaaattaaacacattcttttattgacagtttaatcatcatgtacattttgctaattgtagccaaaagtttagctatctagcaattggaaccttgtgcccataatccaaccatctctgtttaaattttggggtgggtttcaaattatccttattgggcctaaaatcggcccaatattaaactgaaaccagacttttatccaatccgagtaatcggaacaaaacaacatgatcgtgtgaaccaacggccaaaaaatg

SEQ ID NO: 5299 - DNA, 3000 bp, Unknown
  misc_feature (1)..( 3000): cDNA_ID_3076484_gDNA_ID_1620777_Annot_ID_167804 3000 nt of promoter + ATG
tgcccacatctcacagtcaccaccattgacaagcttgtaaacggtacactcacctgcaacacatttacactcattaaactcatgatcatatatataaagagaggaagggagaaaggaagggagagaataagagaagaagttaaggtataccagcaaaatagtggtgcaaaaaccacactggacatggcaaatctgccccggcagatcaaatagatggttgagtgttgtcgtcatgttggggagctttgtcatagagagtgtgtgtgtacgatgaatgataggagatatatgtgtgtgtgtgtgtgtgtatatatagacagagagataggttttgttaatattcattaatgcaaatatgtaattatatttatatctttcatgtggaatgctttggttatatgctaaaatgcacaatacaattcaacttatgtacgtctctatctcacttgtaataattggaatcttcatagtctctatgagctgtaagcagtaaatgattctcattctttctattaatcacattcctaactccttaatattcaaactacattttcttctctaaaataaaataaaataaaatgatgtatataatacttttgttgatgatggagtttaattaagaattttcgttatacaaaagcattgttataagatttttatgttatgtcacactcacaaaatatatatgacaaatgatacataacgtttgagcgtttaccattagaggagacattttttgttgtcaaaacaatttaaaacacttaataacctataaacagaaaatatataagctcccttcaaaaaccatttcaggatttttctgataaataagcatacaagataatatgtgttattgtaagataacactaggttaaacaaaaaaataacaagagataaaaatcgatggtaaagagtatgagtattaaaaatgaacatgtgaaaatggaaaggcacgttgcacaagaggagatagatagacatcgaagagagctggggttaataaatgatgtgatgtggtggtgtggtttggtttgcaagttagaaagaaagaaaaaaacaagtgaggttgagaaagaaatgcctctttgtctcatgtgtagttgtctctttaaatgggatttaatgaatctctcacaaaactcaacagtcttttggagttttggttgaagtgagactgaaaatgaaagtgcagtgagttgagactagtgcgggtgtttctaggagactcatcacttttagtaactcggaatcttaggattttgtctttcttctctcacatttttgctaactgtttcttgaccattttacccaaactcttctctctctctctctctctatttcttcaagtttcagtgctttctctctgtgtcatgttatttctactgtccctctctttattgctttctctctctctcacttactctcatctcctattttgtgttcaaccacaagaaaaagactaaacataatactaatatttactcaatttcctacacatttgtaatttttgtgtgggtggaatccaatgcaatgacccaaccccggagtgaacaagtttcgacccattttgagagatcacataatttaccgacccattaataagtttcgatccattttcataagcctattgatgagtaattgagtaggaggtacacatttgtgatttgagagattagaggttaaaattatacattgtaatcatagttatggcttctggtttaacagtcttttactccatatatactgatatacatctcatttctagtctcaaacttttacatgacagcttatagattggtcaaatctcactgttaacataaatagaagctgtgaaatgacgataaaatgtgcaaagacaaacgcacgttaatgtcaaacacataatcaatatctgagagaatttaaacttatcttagcaaacaagttatcagagccaacaacaacaaaacttcaagacattggtgtaagaatatgatcagaatcaacataatggctaaattttgccttgcactaatccaggttaaaactaaaacaatgtcgcaaagaattgttccaacacaacgtcctaattctacagccacaattcaacatttccacatcagtcaaagcataatgaaacaaaaaaaaaattgatcaaatttctaatcaaagataatataatgtattatgcaacaattaaaccatccctcaatagtataaaaccatctcaaaatatctgaattaaaaaaaaaacaatctaaattccaaaagcaaaaagacataacctactcttcatcagccttcttgaacacgtaagtagttccacatttcccacaataatgcctatcgaaatgactcgccatgaaagttccaggaccacaactaacagaaggacactctttcttcaacctctgaactttcccacttccatcaaccttgtaaaactgcagaactgctagcttcactttcttgtgcgtatgcttaatcttcttaggtttcgtgtacgtcttcttcttcctcttcttcgcacctcctctcagacgtagaaccaaatgaagcgtcgactctttctggatgttgtaatcagctagtgttcttccatcttccaattgttttccggcgaagatcaaccgttgctgatccggtgggattccttccttgtcttggatcttcgctttcacattgtcgattgtgtctgatgattctacctctaaggttattgtcttccccgttagggttttcacgaagatctgcattttcttgtttgagaaaaaacgcagagagtgaaaacaatagcttttatatcaaggaaattagggttacaagtccatagattatgggcctggccttagggcccaatttaataagtaaagcccgtaatgattaaacgatgtcgtctacaggataaagtttgaaaactactaaaactctcatcttcttcttctctgagtatcaatggcgattgtagcatcactaagagatattaatctcttctcttcacttccttcaacgcctccaatg

SEQ ID NO: 5300 - DNA, 3000 bp, Unknown
  misc_feature (1)..( 3000): cDNA_ID_2161236_gDNA_ID_1620777_Annot_ID_167789 3000 nt of promoter + ATG
actcccatcactcgccgtcaagaccatgaccttatgctcttcaccttctccaaaatcaccggccacgctgggtcacgcattgggtgaggctaactaaacacttaaacaacgttgctgccttgtttgttttgtagacaacaactaaatcatgctcgttttgcaacaactaaatcatgctcgtttcatatatgttgcaactactaaatcatgtttgttttgacacggctatagttttaagcaaatgataactaaattaaaatttacttatccttcaacttctgtaagttttctctttagattttgttatagaattgtaaagtgtatatgtttcgttttgtgggtgaaggtgggcgttagtgaaggacatagaggtggctaagaagatggtgcactacttaacaataaactccattggtgtgtcgaaggagtcacaaactcgagccaccacaattctaaacgaactgacaaaaacatgtaggacacaatcggagagcttcttcgagtatggctacgagaagatgaagtcacggtgggagaggctacgtgaggtagtcgaatccggtgacgcattcactctccctaattaccctcaagacttctgcaacttctttggcaaaaccctctccacttctcctggtacgtactaaacaccacgaacgcaattttgtgttgaactttgttaacggttctggttgttgttgcagcgtttgcgtggttggggtataaagaggaaagagatctcggaagtctcttgaaggagaagaaggttttgacgagaggaggagaccgatgtggttgtaacaagaggtacgtccgtgtcagcatgcttagccgcgacgatgactttgacgtctctctccaaagactcgctaccatcaaggatctcaaatgcgtcgagccttgattttttttatttgctattttcgttatgtttttaaagcattattcagtagtatgtgaaataatatgttttaatatatcatataagagatttaatgtttgttcgaatcgttaattatacacaaagtacttgaaattctatgggagaatgagtaatgtaatcccaaacagtattcattcttccaaacaaagggaagacataaacaaatgaacacaacctgggcttttccaataacaatgcaaagttaagattcggatcctgtcttaggtttttttgcatgatttcaaggtggttctctcaaactaatatctcagcttctaagaattcatttttaactagataaattttccacataaaataaattctaaagcggctgagaacttgcatgaaataacctattggattggcagtttaatttaatttcgtttggcttctaagcttttctattttttgtcttttaaatgtgagtttccgcgctacgcaatgattttctccctcttagttaaattgattaatgttatatgtgtctatatgcatattttagataacataagaatttctttgaccaaatagggtatataacttttgcaaaaataattttcttattttaagatagataatatccgttgtaaattaaatgtataaaagaaaactaacttatatgtatattagggtggtttaggtttacaattattcaatgcacgtacatcaaaatgtaattatagatgtggcaaaataaggctttgaatggatgcagtggacatagcggtctaatttgtctgcggtttagttcatcttatttttggggcggacaataaatcgctacagaccagttttatttgtatgtaaaaatggtccgcaaatggtccgctgcggttttcttctatttcttttggtccggaccactgcaaactataattgatgaatggtaaataaaaagcggtctgatccgttgacggttttgtccgttccaaccgccgtaaccagtcacaccctaagccttacatttttagtccttaaataaaatccaattcgggatatgaaacttaacaaggtgatatttttcgtatcgattcttaatacaaaagaaattattgatagaaagtgtttaagaaaaaataaacaactcatattgattcacttatgaagtcttgagttctatcattcacttgtcaattctcaaaattgaagtggcaaaacaactcttgcccatatagcttaagccttttgagagtatgaggagccaataggcccaaagattactagtaaacacaaagctgctggctgctgcgtcttaaagaggacgaaacaaaaacgacggacacgtggatcgaccctattggtcatgttccaaacgcataatttactcagaaaaacagtccataacatgacaaaactaacaatctcttcgtctggaatctccaccacatttttattctcttcaaaaattatctgcttctatttttataattaagcaagaacggtcttcgtagcataaaaacgagacacggatatagagatatcgtgaattgacttttgtctgacaaatcctcttcgtcaatttcagtggctctgctgcttcctttgttgtgaagccacatagattagattgaggaatgatccaaactcatgtcatacacacatttgtaatctgctacacaaaatacttttaaaatcacacacactaatattttaactctccccactctttgccttgcccttggctctagaaccgaacgtgactctccagatagacttttggagtcacaacattgagtttgaaggtttgtgatttggtttttctttctctttggatcgatcattgatcaaattcttcttcttttgaatgattctgaaatacccttttgaaaaggcgtctcctttacactgtgtgattacgaatttgttctggaaattgagctacagaaacccagaaattagtggccttttggtgttcttagagtcgaattagttttgatcttgattcgtttatccaaattctggttttctggttccaattgctgatgatgaattgttttcttccaattgtagaggagggaagaagtgagctagggattggttcagagtgaacataaatg

SEQ ID NO: 5301 - DNA, 3000 bp, Unknown
  misc_feature (1)..( 3000): cDNA_ID_2161213_gDNA_ID_1620777_Annot_ID_167782 3000 nt of promoter + ATG
tttaagcaaaacgctgatgagtttatctgttctttattgcctggaatttctcaccctcaagtccaatactcacaaggaggattattagtgaagagtggaggaagtaatatgcaacatgtaacatctttgtcttttttgttactaacatactctaattacctaagccacgcaaataaggtggtgccatgtggcgaatttacagcttctcctgctcttctccgtcaagtcgccaagcgtcaggtaactaaactaaccaacattcctctgttttagcataatagagagattcattaacgtaagtgtttggtggcgtacgttaacataggtggactacatactaggagataatccaatgaaaatgtcgtacatggttgggtatggttcgaggtttccacagaagattcatcatcgtggcagctcggttccttcagttgtggaccatcctgatcgtatagggtgcaaagacggatctcgttatttcttcagcaataatcctaatcctaatttgctaattggcgccgtcgttggtgggcctaatatcaccgacgattttcctgattcgagaccttactttcagctgactgagcccactacttatatcaacgcacctcttttgggcctacttggttatttctcggcccattattgatttcacacctcgaactcgaacgaagcatgaaagtctatttttgttgtgaaacatttttagttgattgttaccgattagtagattcactagattctctaaatctacgaacaaataattgtataaattaatcgagtacacaataatcaatttttaatcatatgggagttaggaaaaacaaagagtaataatgagagaaagggggagacaagagtaattaatattttgatgaccaaactaatcaaaaatcaggaatttgtcttttggactttggtcggctgctttacgcttaacacaaaagaacgctattttgtctcctccacgcaattacctcttctcactctcagacattttgtcaaacagatggtgctcgtttctgaatcagcttaagaactaacaaggagacagacactaagcttggtttttctctccgattagacggaggaaaaagtgaaaacgaggggcttagacgagtgatgtgatagagatggaaggagttgagctagaattagaaagaagaagcaagttcttgaacagtttgatacagaagaagaaggctaaagaacagcaagatcagaaagatgagttcaatgttcgtgttagggcttcagatatgcctttgcctcaacagaacagagcctttagtttgtcgcgtgagattttgaatgctactccagggaaggctgataacaaaagactcgctcatgccctaaaaaaggttagatcttttgtatctctctcatgatttttctgtatttgggttgaattggagtcattgaagtctagtacttggattgagttttgaattttgacacagaatctaaaagtattgagctgcttttgggttctagggctacgtctcaaagtcgcatgctttttgtagaatgtggttatggtcttctctttcttgattggtttgaagatgtgatgaatcttgaatttggattttcgtttgtgtacttgcatattgttgaacttcatggatggtcccatatttgttaggttgcatttgactttgttccattgttgttgtcttttctatttgtagcttcggttagtctacttgactaggttgtttttgtattgcgaggataactgtagtaggagtctcgttgtgaaatgtcttgaaactggatgttcttgttgtttattgagatgattttggagctgtcttaggccataactaatgaggcatagcatgcaccatctgctaagcttctgtatctttgctgttagaaattagttgctacctaatgataactctgaagcatgcttgctttaggaagtgagccttgcctgaatacaaccttttacaaaggacttggttcgacaccccatatatagagttgtccatttatgcagttgtttctcgtgaggatattgttccttcttaaagcggctttgataattagcttttgattttaacttatggagcgaaatggagcagttccctcaatttatgcgactaggtagaggcattgattgatccatacattgattttatgaagtggttgagtaaaacaatttagtgttcacttatctgtgtgcagcttacttgtttgtctcagtgttcatcaatctcttaataatggctacctccctttggcttttaggattgacatacgagtcaatttctgctgttgtcttgttttatcttcttgttctggtaatatagatctcttatctcgaaatagatcttcatatgtttcttgtctctatgttttctcctaaatccagcttctatgttatccactgaagtgaatcttagactcccatctgtctaatgacatgttgcagctgatttaaaactatatattcacgaaacagttttccatctgtcttccatttcaggacttcgattcagcctacggcccggcatggcactgcattgttggaacaagctttggttcatacgtgactcattccacaggaggattcctatattttcagatcgacaaagtttacgttcttctcttcaagactgccgtggagccgttagatcaaaaatgagataaaacgttgatgatcagagcatcttcaatttaatccttttcttttagaattctctgtcttgtatcccacaatgtaattctgcctaagacaaaatctttgtggctcctattgtgtaattagaagtcatcttctctactgtgaatcgtttcaacttcacaatgcaaaatattgttcttctctttctcaaattctaattttgtttttttcgttgttgtgttgttgttgttgttgacattttcttctcttcaaaagagctttaaacccaaaacctctaataccaattttgctcctccgttttataagcatcaaagaaaaaaagaatcagtgaagaagaaaaaaaa

SEQ ID NO: 5302 - DNA, 3000 bp, Unknown
  misc_feature (1)..( 3000): cDNA_ID_2161225_gDNA_ID_1620777_Annot_ID_167785 3000 nt of promoter + ATG
tttaagcttgggatgggaagtgcactagcgacgctttgtgggcaagcgtacggagcagggcaactagagatgatgggaatatatcttcagaggtcttggatcatccttaactcttgtgcccttcttctttgtcttttttacgtgtttgccactccactgttgagtctcctcggacagtctccggagatctctaaagcagccgggaaattctccctctggatgattcctcagctctttgcttacgctgttaacttcgccaccgccaagttcttgcaggtaacaacatcaaaatcagtttacttgaggtaaattcaagttgtttggttatgagattgattaattattataggcacaaagcaaagtgattgcgatggcggttatagcagcgactgtgctgttacagcacactctattgagttggttgctgatgctgaaacttagatggggaatggccggaggagccgttgtattgaatatgtcgtggtggttaatagatgttactcaaatagtttatatttgtggtggttcttctggcagagcttggtcagggctctcttggatggcgttcaagaatctcagaggctttgcaagattgtctcttgcctctgcagtcatggtttggtgagatatcggaacactttggagtcagatcgatacataaatggttcattgatgggtacacctagtgacttgctgtttgttggtttcagcctagaggtttggtatttcatggcgttgattctgtttgcgggttacctcaagaaccctcaagtctctgtagctgctctttcgatatggtgagttctaagtccctgtgaaagcttctgttttggttaggaacggaattaacggtttggttatagcatgaacatattgggatggccgatcatggtggcctttggcttcaatgcggctgtgaggtatatcacaaagtctcttaacagaaaagaaaaaaaaaagcttaatgattggaaaaaatgatgtgttatatgtgcagtgtaagagagtcgaatgagctaggagctgaacacccaagaagagcaaagttcttattgatagtggctatgataacttctgtatcgatcggaattgtgatatcagtgactctcattgtgttgcgagacaagtatccagcaatgttctcagatgatgaagaagtgagagtactcgtgaagcagctgactccgttgctggctctcaccatcgtcatcaacaacattcagcctgttctttctggtagtttctctaacaacactcaaaaaccctaggctgcttaaatttagcatgattgtgtataagacaaaatgtgttttggtttttgatattggtacaaaaggtgtagctgttggagctggatggcaaggcattgttgcatatgtgaacattgggtgttactatctatgtggtataccaatcggtcttgtgctcggctacaagatggaacttggagtgaaggtaagtaaaatctcgaaatctaaccttaataaagaacttgcatacatgataagcttcaagttgatataaacacacacacaactacaggggatatggacaggaatgctaacgggaacagtagttcaaacatctgttctacttttcattatctatagaaccaactggaagaaagaggtaaagaagcaattgtcaaattctagtatcagtttcagtgtttgtgtattaaagtttatgcaaaatgtccaggcttcattagcagaagctagaataaaaaaatggggagaccaatcaaacaaaagagaagagatcgatctctgtgaagaagatgaaaacaattcaaatggtgaaaacaatcacaggaaatgatcattaaacaagtcattgcagattcgtaataaacaaaacaaccatcccagaagaagaatcagttattcccaaattgatcaagctaagctaagactttgttgtaagaatctaaacactattgtgacattgagtttgaggtttacccagacataatctttgaaaccagtgaacataacacgcaatgatcttgaagaacatgacaacattgcaaatgcagagatgaatcagatcacacaaataatcccaaaatttccaaataatacgaagcaaattatataatccaataccatagattaaaagatctctgattccaaaatccaacaaagctgagttcaataacatgaaataaattaaaaagagactgaattgaaaaaaaaaactaagcagtgagaacaacagcaccaccagcttccttaatcttcttctcagcagtcttagagataagcttagccttcacaacgaaaggtttgttctcaggcaaatgacctttccccaaaaccttgaagaaaccatgctgcgtcacatcgatcaacggaacattatccttgctcgatttcgccttcacgtcttcaggaacaagtgaccatagcttgtccaggttcacgattgggcaaaagaacttgttacgaagcttgtggaaatacctcataccaactttcccgaagtaacctggatggtacttgtcgaagaggatcctgtggtgatgcatacctcctgcgtttccacgacctccgggatgcttacggtgcttaccgatacgtccatgtccggcgctgacgtgacctctcttctttctgttcttcttcaacgccgtcgccattttagtatcagatctagggttttgaaccagaaatgatcttaaagggtttttatatagagaggatttagcagctagggttttcggagaaacagagatagtgtattgtcttttgggctttttaataatttggcccaattataccacaggttatttatgttattaaattgggctatgaggcccattatatgaatccctaatatcaggtttagttaaccacttcacttttgagtttttcgacgacagttgatcggcgccgtccttgacagcttctccttcttctttttcttcactcataaaccctaaagtctcgcccgaaagctaaaccctttagctattttcaagcttcaccgggaaagatg

SEQ ID NO: 5303 - DNA, 3000 bp, Unknown
  misc_feature (1)..( 3000): cDNA_ID_2161229_gDNA_ID_1620777_Annot_ID_167787 3000 nt of promoter + ATG
ctctccaagctgcaaaacaagctggaaaagtgccagacgttttctactgtctcaagctcttagaagccacaggaatctccacagtacctggctctggatttggacagaaagaagggtaaagaatctgctactactgtttctttcttgctcatctgatctcttcttatgaactcattccacttgtggattttgacagtgtgttccatctgaggacaacaatcctgccagcagaagatgagatgccggagatcatggatagcttcaagaagttcaacgacgagttcatgactcagtatgataataactttggttattcgaaaatgtgattacttcttcttctgaacgactattgtgttctgctacactctttaaagctaaatctctgtagtacactctttctctttgccctattctataaaccatatctctctctttgtgtctcttttttttgggtgtaaactctctcttgtgtctctatttctattttcaattggaaactgattaagatcttttctcaatgaaatgaagtttaggccatagattattttttttaatcaacggtgatagcctttttttagtgtggcaatgtgaaatttgtaattatgctaattatattaaagaaaataataataatccatgtcctagtttgtttttgattatgaaaaaaaaatcgtctttaatataattttattaatgtgataaatccaaagatatatgtatttattccctgtctattcttcttgatactttgaatttctgttttctatatttcgtgtaagttatgaattttgcgggaaaagaggtgcagagtaataacaagggtaaggaagaaaacatagaatgagcaaagacggagaagaagacaatctgtaatggagagaaactgatcaagattctctcgccggttaagtgtcaggtgacgatggttgagaagaagccagagaaagaagatgaggaataagaataagaagagtgcgcaatgcctaaagcagaggagtttaggatttcgcagccgcttgaatgtccaccggctcccaaacctaaacgcagaagaagcagagattattcttctctgtaaactagcagtttttcttaatagataaataattagttaaataataattggttaattgttttgagagacacatgtctacatttgtcgcttattgattggttgatgttttcttaatagataaataattaattaaataataaaactatatagaaaaattaatatttttatttgctagattctcaaatgtgtgtgtcaccgatgaaggtgctctgatggatttaggtattgattaattaggacatatcttactttgttttcattcttaaaattattgtttatgtacaaacaaatcaaaaaattatctttagatttagtgactaactagcgcgatgcaattcaagttaaagataatctgattaaaaacgaaaaattatatgttagtatttatctaacatcgacattcttcagaaaaataacataaaattatgtggtgagttaaggtttcaaataggggtgtcaaaatgggtcaaaattcatgggccaactcaactcaactcaacccatgaaccctaatgagttaaattttttgactcaaatgagttgatgagtcaaatgagttattggatcaatttgtttgatgagtcaaatgagttgggttgtaatggttaatggtttcaattgtttacccaattaacccatcaatttttgtaaaattgaattaaaccaactaaaatctctaaaccaatatcaatttaagcttaaccaacacatctaaaccaatttaataaaatcaatatttttccaaatttcttaaatatacaagcgatgaaattgagaaaaaataaactcgtaatttttccaccaaaaaacataaatccgtgattttctcgccaacaaagtaaacccgtgattttcccgccaaaaacgtaaaaccgtgattttcccgccaaaaacgtaaatccgtaattttctcgccaaaaaacaaaacctgtgattttcccgccaaaaacgtaaacccgtaattttcccgccaacaacgtaaacccgtgattttcccgacaaaaatgtaaaaccgtgattttcccgccaaaaacgtaaatccgtaattttcccgccaaaaaccaaaacctgtgatattcccgccaaaaaccaaaacctgtgatattcccgccaaaaacgtaaacccgtgattttcccgccaaaaaacgtaaacccgtgattttcccgccaaaaacgtaaacccgtgattttcccgccaaaaacgtaaacccgtaatttttccgccaaaaacgtaaactcgtgattttcccgcataaacgtaaacccatgattttcccgccaaaaaacgtaaacccgtgatttcctcgaaaaactatatgttagtatttatctaacatcgacattcttcggaaaaataacataaaattatgtggtgagttaaggtttcaactttcaaataaggatgattttcttttgttgtgaaaattattcaaacataaaatagtatttaaataatatattttaagaaactataattagcctttgattaatgaatgtaaattttgtacagtttttggctcaattaatgtgctttgcaatttgcacaacccaattctaagcaaactactattagaaaagattaattttataataatgctcaattgctcattgttgaatgatagataccaaatgacttgagttcagtcagctaatttcagaaactaaaattgggtgataaagttcactacaagtttggagactacgtaagaatagttagaccactttgtcctcgtacaatccactgcatctctaaattgtggtacgatactagaattttgaaaagctaaaaattatagtacctaacataaatttgtgaaaaaaacaaaaaaaacctaacataaatattgcatacaaataaaactctatatatgcgttatgcatgcatgtctaagaaattactatctctcttttgctagtaagacatg

SEQ ID NO: 5304 - DNA, 3000 bp, Unknown
  misc_feature (1)..( 3000): cDNA_ID_2106101_gDNA_ID_1620778_Annot_ID_167821 3000 nt of promoter + ATG
agtaccgccggtcaagtcagcgggcagacatttcgaaacataacttatcccgccaaacaatttcgccatccaactcaagggtacgctcatcatttcccggccttataagtacctactctcacaagcccaccgaaatgtgtcttaccattagtttttgggctgaattgtaccctcccgtacaaaagcccctataattcaagctttttgaggactttgtgatatgttttctcctgtcacaatatttaaaatataagcaaaaatacattaaaataaaataataagcttactaaaaaaagattaaataacatgattcagaaacacttccataaatttagttatagatgaaactactgcgtgatatttttaagaaaataaatgcctccataaaattactaaaaacatactctaaatactttatttcatgtatcaaaggaaaataattagaacaatataactctacaattgttttcttcccatatgttaggtttaaacatttgtgatatacatgaatgtctagcaaatcattagacgtaaagtgtaaacactagtaaatcaatatttataaaatataagaatctactaaaataaataccataattttatgataaaacggattcgagttctactctgtattgtaaaattatcacatctaggctccgaatgatgacgtgcgattcaactacggataaagtgcggtgtggttttaatagtaacaaaaatatatacatatacatacatggctggtcccgactattcggagaccaaagcaacaagttatatattttgggattattataaaatattttaaattttggaggcctttttcttagaactgaatatttttggaggcctatttgcaaataagttttggtgtaaatttttgaaagaaaaatggggtcatattcaaatgtttcatgtggctcccttaaagactagtcttgtatgtatatatgtagatatttttgttactattagaagtatacgatactgtgtggtctgttctctattcggaaccctagtctgaccctttgttcaaaaaatcggccgcctagccgggcgcctaggcgctaatcagatgggatccacgacaatttttttcaaatcgagaagattaatcgttgatccgatttttatccgtatagacccgcctaaatccgtctagagggcgcctatcccaaattttttttttctaaaaagaaaatttaaaatttaaaatatccaacttatgttcgtaatttgtatgaaaaatcatatatttgaacctacaatcttattttcatatgtttaatataattttaaaaacaatattatataaatttcttaattataatgaattaatatgttttaaaaatattaaacaaccctaaaactaatccctgattaatttttgtataatctctgatttttttgttaggcgctaggtccactcttactgcccgactagcgcctaacgattttttgaacaaaagtttgaccagataatataaaatgatgaaatctagcttgacgagataataataaacttttcgcatggatctgcatttttttgagtaaaatagaaaagtggaaaaatgaaaaaataaaataataatatattaactgtttttattatataaattttacttttacgcaaaattatatattaaacgtcacataattaaaatcccttaaatctttatcctactgtatgttctgaatcgggcttttgtattttgattcgtgaaaagtctttcacttcaccggaccgaagatgattcgtgaaaagtccacatttcacatttctcaattcacacttgtgctttcgaaatgggcttttaactttggtcctaaagactttctctcatctatatgtctctgaattctaggacacagtcaacaagtcaacgtcggtaagagatcccacaacaacatctacacagacacgtgtacactatctctcactttttcaccgacacgtgtcggttctttcacctacaagtaaaactctctccattatcttcaataatgtcaaaaatgtcacacacacacttagtcatagtaatacccaatttccacggcacctatttgccatcgaacaaacaataaaaaactttattagttttcacaattaatacttttaactctttcccgagagtcgtaagaagagaaaaaacaaaacttttttctttttcgttgaagaatttttacataaaagttttgtagattctctgatcagaattgtgtaaaaggtattctctttttttttacttgttgaagaattaaagtaagtaaataattgatttcttattggagggacccttttgttgtcatagaatttactctgctgcgtttttttttactgttgttgctttgttcttgttgtttggttgtatattgttgatgctctctctctctcgttaggtgaagtagatctctcttttctctttctctttctcctctctctctctttccttactcagcttttgtggtgaatattgaagaaagtttctctggtgaataagagtttgttcttatttttatgaatttgttctgttttcttgttgatagtttttgggtttgataaagttgtttcctttttacttcttttagtatctatctttccaattctagtaacttcactggttcttgagctctttcaactttttgtttcagatctctctgtgtttttttctgatctttctccagtggtagcttctgagttagtgattgtactttacttccatacttcttgttcttgctcatagattttagctgtggttttgtggagttttagctctcagtgattgttttagttttagttccttaaacatgttttgttcatatgggtttgttagatctttgagttttcttcatttctttattatctctcttggatcttgatacaaaagtatgaatctttagattgcttcaagaaaaaaagttttaaagactttaagagattcttagatacatagaatttgaagatcttgtattggtttttgtgaaacagatatttgttag

SEQ ID NO: 5305 - DNA, 3000 bp, Unknown
  misc_feature (1)..( 3000): cDNA_ID_2106758_gDNA_ID_1620778_Annot_ID_167833 3000 nt of promoter + ATG
gaccttttcgacatagcttcttgccatatctccaagaactcctccatcaatttttttgccattcccattgatgatataggaagatactccacctaaatagtacacacacataattataggtttcaaatgaaagtagtgcataatagcataatggcataagttgatagcactaaaaattcgtataatgaaaacttgttgcatggaaaaccgtagattatgcaaattttcttaattgacaaattttctgcctaatcacattagaaaccgtcattatgtgtgttaccaatcatagctaataacctttagttactgagttacattacaaactccaaattatgaattaactagagtgttagataatcattaacattgattattaatatatctcaacgtactcaaaagatataaaatttgttacctccatgactacgcctctaatggtctcagcatgagtaggaacaactttaccaactctcaaacgaaaatccccaagttgatactcaagcccttcaaagtaaaacgagagtttgcatttgtaagactgaaggctctccatgatcatttgaattgaagaatctgcttccacgacgatcctttgcgacctgatgacgaaatagtacttatctggctcctccggaagcgaaattcctacaaattcacgcgggaactcagcttgattcgcctgatcttgcaacatgggtttgtaatagttgagagtggctttccatgttccctctttgacgccattgagactctctatgctttgtgttacttcgtttaggatttggctgctaaatgttgatccctgatttggttgccaatgcaaaagcctggaaaagtattcccccaaagaaatttgaaaaaaggttaacgtattataaaagaaattacaataatggttatttagtttatgtaatcatcaaacctaccatttgacgggcatggctaatggaggtacaacaaatttcacttgacaacaaaattaaaaaaaaatgatctctattaatttacaataatacacaaacaataatatcttatataatatagttgtattcagatatataatttaccaaaaaacaaaatgataaaactttacaataaagcaaaaaattatttaatcaaaaaatactttttgatagaatttcaatcagtgttcataaggaaaatacatttaaatgctcaaatggagttcatttttttaatcatttctttcatttgaaatagaacgtggtctatatggaaaggaaaatttatttttaaaagtaatttacagaccaaaaataatacatatgcatcaactttggaatcataatacaaatttcattttttaataaataattataacatagagaataattagatattttagtgcatgtgcacaattacataagtgtactcacccttatcaagataaaagggaagaaaatataaattcttataagaaaaaaataaagtaacttttgactttaaataaaaaggaaacaaatctaagaaattaatgttataattaaattatttaccaaaattaattgaaaaataagaaacatttttttacaaaaactaaagaaattcattagatctgctatgagtatccgtttgggatcacacgttctgtgatagtagtagatcgacaacagattaactaaacgaatcaaatatgaaatatatcacttcttgaatacaatctaaatataaaattcatacatctcggataaacaactcaattctgcttctaagtatatttagtttataaaacgatgctttttatctttatcttatctaaatcattttaaaaagatgagttgaaggcatagtaaagacttttaggcttaataatcatcgagccataaaaacaaaatacaagattagattgcgagaaacacttaccgatgaaagagatttctggtgatgatcttcttgggaatacgtagtataacgaaaaattaagactcgtacactgcattatatagagaaaagcataggagtttgtttgttttactaagataaaacgacctcgtttaaactacctcatttaaaacgacttcgtgtaaaattatgtgtttcttaaaatgaccttgtttttaaaaaggttttcttaggaaatgagtggtgaaaacatgaatgaatctaaccgaacttatccaaattcgaataatactaatagtttaaaatcttataaatagaattattggaactgaaccttaaatcaaatttaaattttatgaaactgaacaaaattaactgaacgaatcaaaattcctaatgtatatatctcatctaatcatctaaataaaaataaaggtttgattcatgtttcttctcatctttcgttcattttttatgcatagtcatgaaacattaaggtttcattccacccaatgatataatttttttttatcctagtacactcaaaaaatgaaaaatttatatagaaataaattggaaattgatacaattatataattgaatgatacgcttttgcttaatactagtcaagatgaaaaaataaaaataaaccaataaaaaaaattgagctgaaaatagaggaaaaataattacttagttgataattatttgtttgatataatgacattaaattgtaattttaggtaatcactttttgttgatatttaaaatacgtttttaaacaaaaacaaaaccgaaataaaaaaccaactcgaacaaaaaccgaattgtgtcaaaccgaacagagaaaaaaaaaagttttccacaagtaaaaccgacaaaataaaccaaaccggatcccaaaaaccataaccaaaaaattgcattaggagccaaatatttccgccacttaaaacatgccacgtaggcacgaatcgatcgatgcaataacttttgtaacggctacaaacttctgatttcatttttgaaattcttctcttccgtctcttttactaattcccctttcttcttcttcctattgaaaccctaaattctcttcttgaaatccaaatcttgtttcaagagtaaaccatg

SEQ ID NO: 5306 - DNA, 3000 bp, Unknown
  misc_feature (1)..( 3000): cDNA_ID_2138913_gDNA_ID_1620778_Annot_ID_167839 3000 nt of promoter + ATG
aaaaaaaagaaattcacgaaagattttataaaattcatgaaggatttaagaaattcatgaagggtttcaagaaattcagaattaaacttttttttttttgtaacccttccttaatttcatgataatttttcatgaattttgtaaaatcttttctgaattttgtggaaactttcaaggaaatttaggaagacttctacaaaactaaggaagggtttcacgaaagatttttttttgtgaaatccttcttgaattttgtaaaatctttcttgaatttcgtgaaattttttccagttttcgtagaatccttcctaaattttcttatgtggaaaaaatttgacggaatgttttgacaaaaattgtttttggcgggaaagtttttacggaattttttttggcgggaaaatttgacaaaaaaaaattcacggaaaaatttgaaagatttttttttcacggaaaactttgactgataatttttttaattaggtgctattttaggaagaaaatgttttgagtgctatttgtagatattttcaaatgaggtgctatttttggaagaaaatgttttgagtgctatttgtagatattttcaaatgaggtgctatttttggaagaaattttgtgtgctaattgtgtcaatctttttttttttgttaaccgatattaattagagctcaacaaagtcaattcacgtaaaatgttgtttacatatgtgatatattgtggttcaatataattttttttgtgcaaaattatccgtatttatatttgcactatgaaatattaaaggtaaataaaaacttatgaattcttctttattaattccttcaaatatactgagaataataattcttgtaaactagagaaattttaacattaacctatttttctattttctttgggagtttcctattaaggtaactttaagaatagaaactagttatgtatttaaaacgatacaaactaggatatctaaattgtattaaaaagattgtacattcaaaatttgtatacgagatcttcaaattttgtatataaacatcgaattatataaaatatttttaataactaaaaaaaaatatttgtatctttggcggtcaactaaacctttttttatagcatatatatatgatatataaagtttctttatgatataattatctatctaacatttaagattgtattaaagtttcgaattttatgtctacgtaattttgtttcctttcattttatacacaatgttgtattgtttgtacatgaattcttttcaaaataattttttagatatcattcatataaaatagagctaatgagataataaattaccttgaaggcttgaacattgtcgagacaaaagttgaaaacagaaggacaaaagatcactgtcaaataattattaatacatcagaaaaataattaaaaacgataatattgttttcagtattcacctacacataatatgaatatcatgtttacatatttcgaccttttttgatcggttctaataatctatatctcaaaactaaccaatctcatctagattccgtcaaattaagtttagtctataattacgaaactaaaaaatattagcaaatgggaaagtgctagagtcattgcactagtttattatgtgaaacacgaagaaacacggtggcgcgtagaaatcacctagaaactacgaagaagacgtgaaccccacgtctctctttcttcttcttctttctctatctcttcccattacaaaactcaagaagatgttaaagtacgaaacatgtcatacttcaaaagaaacgaaggaacaattgtgtttgcgtttgcgagcatcgggttcatagcgttttatatcattaattactacattcggcgatgcagaaaccgtgccgcagcagccggggacattgaggaagctcgaatgagtccgaggaggccaccgcgaggacttgacgctgaagccatcaagtcgtttccttcattcgtttacacggaagctagaggaattgagccaggaataggcgagctagaatgtgttgtgtgtttgaatgaattcaaagacgatgaaacgctgcgtttggtaccaccttgtgtacatgtgtttcatgctgactgtgtagacatctggctttctcatagctccacatgtcctatctgtcgtgctaaagtagttccttaatacgagtctcttaattagccttttactatgcattttgcgttacatagttctccctttgtaaataaattatctttatagtgttgatattttaccaaccgtaatgatgatactactccatggaaggaaataatctacaaaggaattgaggcatattgaattattcaatgtcatgatgatgatgatgaattagactagaaaatgacaaaaacatagtttatctctttggttacttgttcatgtattacacactaaacacatctatttggctttggagagggaccacctatcatgctgtgtacaacaaatatgtatatatgtaagttacaagttaatgaaacgttcggatatatagttatataccatactttgaaggctttaattagttactcatatgatgtaaacatttgttatggtgcgaataatctagcaccaaatacataaaccttattggtccgtcacattccattgagaggacgtgaacatcagagggatgtgactgaccaataaggattaggtcaaaactgttggaaaagtcttgttgcgtagatcaacaagttaatagagagggcatgagtaatgtagtacttgttctacgtctatagtgacgtaaagacttcttcaaaagtcaaaacgttagaggaagaagccaaatcaatcattccgaccaaaactaatctaactaaacatagtagtaatacaatatgtattgtcgtgacgagtacaaaccaaaatgtgtttagtattataaaaacggcttgttcgtattctcttctctcgctcaacacatgaagctcaagtgatccaccgtggttagcaaaaggacggttcacatc

SEQ ID NO: 5307 - DNA, 3000 bp, Unknown
  misc_feature (1)..( 3000): cDNA_ID_2138932_gDNA_ID_1620778_Annot_ID_167834 3000 nt of promoter + ATG
aaccttttgcgttgaaggctttaagtgatcccacttgctcagcaaggcttggcacgattggtcgtggatgtttgcctccaagaagagacgccccattatagtttcatctttgcttatgagtgatcccaaaactgaatcaagcaaatcttcttctaacggtgtagtacagttttcaacctttagagagaaatgaaaatacagacttctgtcagaacacaaagatactatgtttccagctgaaatgatgaaaagtagcaactaatagatacatcttctgactaatgttgacactaacagatctttctaatcttcatttgtttgataaaatatgctacatctcaaggatacagaaagataaatcatggatggaacaagcaatctctcaagcatcatagacaatcaaacacttatcaacagcctttatccacctcaagctatcaaaaacgcctaacaatactgtatatatgaataatatgaaaaacccatttgatatatcagaagaatccaaagttttattaccctcagaaagcaaaacgatatggactgacaattataaaaaccagaaacataatgtggactaccattagagtctctctattaagtgcatctactggataatatcaacaattgtaagactttctgcaaaggaacacaacatggatacttatgaaatgataatacagagttctgtcagaccacaaagaaactatattgaaatgattataagtagcagctaatagatacattttcttactaatgttgactctaacagatctttctaatttctatttgtttgataaatatgcacctcgtattagtaccattaaacattggatggaacaagcaatctctgaagcacatagacaaccaaaaacttatcaactacctttatccacctcaggctattgaaaacaactaacaatagaggatatatgacaaacccatttgatatccacctcaagttatcaccttcagcgagaaaagcgatatggaaggacattttatatttcatagtactaagagaaacttaatgtggactagcatagtctctctctcaagtgcatcatatctaccattctatgacttttctgcaaagagactcaatgagaagtcaaacttcatgagaacttagataaatcaagttgtcaacttaacaaagaaaaccaaatgatggtaccccatgtgctaattaaagagtagagagaagacaatagcacttgagtaaccatttcatcaagaacaagctaaccaaactataaaccagcaagtgcaaaaagcaaactaatttactcgagggcaatgcaattctaaacccaacttaacccaattaaagaaaatttagggttaatatgaagaaactcttacttcaccatctccgatttgacgcttaaatctctgcatttcctcagacattcttccaatttcatcctccaattcacgaaccctagcttctgcttctctagctctctcatcagattcattcccaaactccatcaacgcatcacgatcttgatgataaagcaaacactctttctccaatttcttacactgactcaacaaattcccacactcactagccaatttctgattctcttcaacaaacttcttcaacgcttgcgcattcatactcgcttcagacttataaaaaaaaaaaaaaaaaaaaagattcagattcaaatcaatcaaatcccagaaaacgaaagatacccagaaagaaattactaaccctaacacgatcgattacatgatctttctcctttaatcgcgaaatcagaccctgatactgttcgcgaagacggcgttgagattcttcagccgtataaagcttcttctgaagagattccatggagatcggaagacctaaagaatgatcaattgtatctttgatatattcttcgacttcttgcgagagatttgttctcgattttgtttctgcttcatctgaatcaattctctcgctccgcatggtttactcttgaaacaagatttggatttcaagaagagaatttagggtttcaataggaagaagaagaaaggggaattagtaaaagagacggaagagaagaatttcaaaaatgaaatcagaagtttgtagccgttacaaaagttattgcatcgatcgattcgtgcctacgtggcatgttttaagtggcggaaatatttggctcctaatgcaattttttggttatggtttttgggatccggtttggtttattttgtcggttttacttgtggaaaacttttttttttctctgttcggtttgacacaattcggtttttgttcgagttggttttttatttcggttttgtttttgtttaaaaacgtattttaaatatcaacaaaaagtgattacctaaaattacaatttaatgtcattatatcaaacaaataattatcaactaagtaattatttttcctctattttcagctcaattttttttattggtttatttttattttttcatcttgactagtattaagcaaaagcgtatcattcaattatataattgtatcaatttccaatttatttctatataaatttttcattttttgagtgtactaggataaaaaaaaattatatcattgggtggaatgaaaccttaatgtttcatgactatgcataaaaaatgaacgaaagatgagaagaaacatgaatcaaacctttatttttatttagatgattagatgagatatatacattaggaattttgattcgttcagttaattttgttcagtttcataaaatttaaatttgatttaaggttcagttccaataattctatttataagattttaaactattagtattattcgaatttggataagttcggttagattcattcatgttttcaccactcatttcctaagaaaacctttttaaaaacaaggtcattttaagaaacacataattttacacgaagtcgttttaaatgaggtagtttaaacgaggtcgttttatcttagtaaaacaaacaaactcctatgcttttctctatata

SEQ ID NO: 5308 - DNA, 3000 bp, Unknown
  misc_feature (1)..( 3000): cDNA_ID_2138885_gDNA_ID_1620778_Annot_ID_167845 3000 nt of promoter + ATG
ttacgtattagttataaggatagctcctcaaacatctttcaaattacttgttttcttatcataaatttcgaaaaacttagatatatttaatctgcatattcatttagtttatttcataataaacgtctaatttttaggtaaggaatatgtgtagcatgtttggattttatgatcactttagccactaagtggatctcaaaattaaaaagaatatattgaattaaaaagatatagaaagaatgatggttcaagttctgactaattatactctcatattttagttgttatgttgaattaattactaattatgtattagttattttatgaagtctaggtggcaagctctcatgtgctgatgtgtcaagttgtgggagagagttaaccttctttcatatatatgattaaaacatcaaccactagatttttatatgattgtgatgccccttaaaactttgatatatttagcgccttggatttatagatcacatgtaactggattctgaaagctaaagtcgtgagtttttgtgtagaatttttataaaaaacaactttaagaactttaccccacacacaagctttagaaatcattacaacgcttgattagtgttgttgtagtcaacatatgtcattatatgattaagtataagaactagatatgcaacgagattcagaaagttaagtcgtatatgtatttgtgtagaagctccaaaaaaacttctataacatcacccccatccacaaagctaagtaatcatacaacaattcaatcattaagcatcaattcaatccatatcatatatatttatgcataagtctacacttagctaatatctcatctagaagctaacatttaggcaaccaaatcaatcaaaaactctagatctacaaacgaaagaaaataaacaacaatcaatcttgtttagatgagttccatgaactacatgtaaccacatgaaacacataaccctaattcacattggtctggatgaacgagaaatcgctacccttgaccaacccgatctcgatctgcctaagctttctctgactcgtactaatgatggatataagcttcagaccaaaaaaaaattagaaaaatattctaaaaatattctaaaaataataaaagactaagggcgggtaacacataccgattatccgactaacttgactcttagctatccgactaatgataccgaccaccacagtttctctgacgaagcttaacgacctaattagtttgcttatacgtttaagttataataaaatgatgcatgaaaaacagtattgtttgtataaaaatcaaataatataaaaaatcatataaaagacaaaaaaaaaaatagactaagaatatcaaaaacttacaccttattacaaactgtacacaatcaatcataattttataactaaaaaacaacaaaaagtattatatacaacaaattcatcggtttatacaaaaagaacaaattattaatcttgcagtatatattgaattatacgtcttttaaataaaagtattataaaaaagaaaaataacaaaatgatatttagttttacaggatgggttatatggtaggacagattttgggtcgaaattagtttgagactgtataccatgggtaaattcttaaaattaacaatcaaaatacaatttatacaatcttaaacactagacaaaacaactataatttaaaattttgattataaaagatcgacccccagtgtatccacaatcaaacataagtttataccaattaaattaaaatacaacaatatcataagtttataacaaaaaagatatatatatatcatccggtgtacctttggtcaaatcctgttattatgtaagtaagctaaacttttgatattattaatttgtcttaaacgtcatactcaaacacgacgattacacttaaatcccccattaatctttgatattaatatatatatatatatatatatatatatatatatatatatataattacatattgttatttacgttattatttgttttacgattatatttattttgggtttttatgcaaataaaagggtactacccatatttaagttccaaaattgaaaaatattatcaattaattgaaatttgccactattttgcaaatcacaattatacaatatgtcaagctctattaataatttttttttttttcagtcgaatacggataaagaatttagaaaatattttaatatattaacaaaaataatcaatagaattaagattaatagtttaatatattgaaatttccgttataggaaaaggaattctcaccttttttatataattttttttaacttatgcatatatttttttctgatagagttatacagcttttcttatatttatctttaaatatattaataaatttagatttgagacatgatgatatcgtgatcacatgagttagcaacttgtaaaattcaacttataataagatggtcacattaaataaaaacacatgtatgattagaaatttccattttacaacctaaattatatgtctcttttataacaataataataatgcgtctgttaaaaaaaaaagcgtcttttacattttataacccttggtcttctctaacttgctaaattgagtgctaaaacaatattcgagaagcattcttgtactcaccaaaatcttcacatttcttttgtttacaaataaacgtactaacaattcaacctggaaatgttctgaaagaccattagctaaacccaaaaatatatgcacgaacatagatcattactttggtagttacaacttacaacttagtagcataataatttaataaagtactactggttacaactttaaaaaggaaaaggacatcttttactttattaggacagctttttgagttgtaaatttagagcccaacattggattcctcttctttgaccattcctctctacctgaataacccgttaatctctctctgtccctttcttcttcttttttcaagaacaataaaaaa

SEQ ID NO: 5309 - DNA, 3000 bp, Unknown
  misc_feature (1)..( 3000): cDNA_ID_2140457_gDNA_ID_1620778_Annot_ID_167843 3000 nt of promoter + ATG
gttgtaaatgggtgtttcgtctaaaatacaaatctgacggcacacttgaacgacacaaagcacgtttggttgttcttggtaacaatcaaaccgaaggtcttgattacacagaaacttttgctccggttgcgaaaatggtcacagtccgcgcttttcttcagcaagttgtttcacttgactgggaggttcatcaaatggatgttcacaacgcgtttctccatggtgatcttgacgaagaggtatacatgcaatttcctccgagatttcgtactggtgacaagacaaaagtatgtcgtttacgcaaatctttgtatggtctcaaacaagctcctcgttgttggttcgcaaagctcacatcggcattgaagaactacggttttattcaagatatttcagattactctttgtttatctttcacaaaaacggagttcgacttcatgttttagtatacgtggacgatttgatcatcacgggtactactattgctgtgattacagagtttaaacattacttaagctcttgtttctatatgaaggatcttggaattttgcggtacttcttgggaattgaggttgctcggagtcctgaaggtatctacttatgccaacgaaagtacgcacttgacattatcacagaaacgggtctccttggtgttaaaccggcttcttttccattggaacaaaatcataagcttgcttttgccactggtgaaacaatagacgacccacttcgataccgtcgtctagttgggcgcattatttatcttgcgactacgaggcctgaattatcatatgttattcatattctctcacagttcatgcataatcctaaaccggctcattgggaagctgctcttcgcgtcgtcagatatctaaagtctagtcctggtcaaggtattctcctacgtgctaatacacctttggttctctctgcctggtgcgattcagactttggagcatgtcctcattcagatcgatctctcaccggttggtttattcagttgggtggctctcctttatcttggaagacacagaaacaaaatgttatttcccgctcttctgccaaagctgaatacagggctatggcagaaacagtgagtgaaatcatatggatccgtgaattacttcccgctctcggtattccgtgtactgctcctaccacactccattcagatagtttatcagccataagtcttgctgctaatcctgtctatcatgctcgcactaaacatgtgcgtcgagacgtccatttcattcgcgatgagctcgtcaatggcactatcgctactaagcacgtctcaaccacttctcagctagcggacattctcactaaagccttaggacgaaaagagtttgcagactttcttgccaagcttggtatctgcaatctccatataccagcttgaggaggggtgttgggctgtgtggccttagcccatttatattgtataaattaactaggtctaaacttatcgtgtatataaaggcattgcctcttgccgtaatcaataagaatcttcttttcacaacctcgattgattcttgacaatatatataactaggaggaggcgtaaaaggagaaaacaggtaattttttgctcttgtacctttgatatttttactgaaagtgaagcttatggtgattacacttgtggtctacaggagcagaacattgagagtgggtcgagtattggaaacgcttcaagatgttcttggaaccatatgggacttcttgcattgtgatgcctaataaagaaccatatgatgatgttgttcgtattgttgggtttctcttttactttctgttgtctcttttgtagaataaataatgttttgggtaatgaatgatttaacttgcttgtgaccaaaaaaataaaataaaaatgttgttttgttacgagtcatttcgattgcagatacaatgtaacagtcttcacacattgaacaaaacaaaacctaagttaaacaaataactgtttctttaagtctttaaccatgaatctggcctttattagtaaatagtaatagtggttattgtaacatgagcaacatacgtcatactagccaaccaatgtctctcttcttaaactcatcgaactaaagagaggtcaaatcctcatacttactcggcctcgatgtgaattcacgttataataagaaacaaggaaaacacaaactaatcattttcttagtcctaggtgttcggttttaaaatttagtatcattcaagtattttgaaatcttcattttggtttggatccggttcttttgtttttaaaatttagtatcaatttggttatttttccttggatattttgattatttttgattattttcggatatttttttgttatttttgagtattttactttttctatttttattttaaaatttttgattttttgatcaataaataattaatattttgggtatttttggttaccaaaaatatttcagttcggtaccaattataatttttttttgttatataataatatagtatacatccaattatttttaaatttttgattttgttcgattctttttgcttcggttccaattcagtagcttcgattcagtttaattgcctagacctacattttctattagaactgacacaaaaacaaaattggcgtcgcttataaggtctacaatatatggttggcctctggcccaatagtaagcccatatattaaccgacgtcggtttatagccccgataaacacaaacaatatagataagatagtttcttctacttcaaaaaatggatgctttcagaaatttccagaaattacgggtccaattgagaaaaacgcgtatcgtcgtcttcttcatcaaaagcgaacaatttcgaaaacaaacctaacgaacaaaaatcaaatcttctctctgttaaaatctcaccgactagagaaaagctttgttttttccaattaaagttacattttttgtttgaacaaatcactttctgtgatctacatttgtgtggtcgtgaaatca

SEQ ID NO: 5310 - DNA, 3000 bp, Unknown
  misc_feature (1)..( 3000): cDNA_ID_3076533_gDNA_ID_1620778_Annot_ID_167840 3000 nt of promoter + ATG
aaacagaacatcttgaagatctaaagaagagcctaactgaacactgccttgttttgtagcggttgtaaaacgtccatcaggaagtttaatcaaaacaggaggcatatcacaaacattacggagaaatgcaagagaaccagtcatatgatttgtggctccagaatcaattatccaagattcaagaaaatacttaccagactgatgatcatttaaggtagatttccgttcctcaagaatcgtttgtaaaattttccattgtgaatcattcagcccactaagtcctatgcgatcatctgatgtcaatggagaagtgagcgatgaattcgtaacaacattggcagccattccagaagaagcgacatgattaatagaagatccacgaccatgactctgttttcctttgaacgaacttaaaccaccacgtgaagaagatgcagtgtttttaagacgcaatttttcttcgagccaaggaggatacccgattaatttgaaacattgttcggcgagatgaccaacacggccacaattactacagactctgttttctgaagaatctcgaggtcgtgaagtagtttggaccgcgaagctaacaccgtcaaccctctcgttatgtaagcgactcaaggatttggattcttcgtcttgtgtcaaagcattgtaagcttcctcgagagaaggtagtggcactcgagagagaagagccgacttgacagctccgtacacagattcatcaagtcccataagaaactgatgcaatttgtcttcttcacgttcttttctgacgtcgtccatggttttagcttgttggtaatccgccaagctacaccacagttgagagagacagccgtagtaagtttcaatggccactcctttttgacgacaggttgctaactctgttttgagtcgctgaacatgttgtccattcttgacaccaaagcgtttctgaatgtgtgtccagagctcatgagaatcgtcgagatgagacatagatgtggaaacagtttcatcgatggtgagcttcatccatgaaaccacaagagcattgttggcagtccaatcttcgaaatcgggatctgtctcaactggttgtggaatagatccatcagcaaacccaaatttctttctagcttttaacgccaaacgaagatttgtggcccattcgtcgtagttgggtccacgaagcaacggtttggagatgagagttccgggattatcaccggatgtgagatcatatggcgagattgtacgccttgtttcagtcctagctggtgtggtggagctagcgagagccaattcagtactcatgatgaacggagagtttgatgcaagtattaagtagagaagttagaaggaataagaaagcgatctcttatagcggaaggagagatcacagaatcgatcacaaaaaccttttagtagttaggtattgtgctctgataccatgtcaagaatcaatcgaggttgtgaaaagaagattcttattgattacggcaagaggcaatgcctttatatacacgataagtttagacctagttaatctatacaatataaatgggctaaggccacacagcccaacatatattgctcataaacaaacttttcaattgaggcaagtctcaacatgttttgatcaaatcgacgcttttctaaaccactttgttttctctttttgcatcgtgaaccttccttgatttggaccaaacttggaatataagagataacatattgtttacagtttccgtctacaagattcagtttttctaagtatccatcctctccgacgatgctaataaatgttttgagacaattagagtcggggtcaaggtttctaccgaaacccatgaagactttcttctcttcgtctacgaagaaactatgtgatatctttatcttaggtctcgtatcaattctaaataacttgctccacgacaccgtttcggcatcaatcttagtcgtaatccatatctccaactcagataacgctgaaataaagctgcaagcttctcttctttaacacaagataaagtcacatctacagcgctgcacggtagagggagaagcggcccgaatctctctcttgtaaaatcaaaacagataatgtgatctttgtgaccctgtgacctcctttctttagcacaccagtaagtgtttcccttaatagaaacgccactggaagaacaatgtacaccccagtgtggagtgacatcaagagttgtctataaacccgagtcaaaatcatagatttcataccaaaaagattgtgtttcgggtgtattgtagaaataatctagaaacctcaggaacttaaaggtacgacaagattccttatcttcgtatccaagagcataactaaacctatcaaatccattcggaggttgagaatatcggaggttgatccaccttgtatgcccccaatacggattccaaaccaaaaccctagtaacgtcgtctttcaagatgcataacaacaaaccctcaaagtggaaaatattagatatactcacttgattgtgaatgaaaagttgacctttaacctctatagatggatcaaagtcgacgacaccgctcattaaacaaagtttgtgaggcatcatcatgatcatcatagtctctccatctcttgttggtgttgtcactttaccaatgtgcatcttcgtaaaaccctcacttttggataaattgttccaagttttgcaagttaatctcaccgctttcatagatttcaaaggaaccctagaaatgatctcctcgatcaaatcccttggaagattgtagatcatcgtcgtcattgtttcaactttcacaacgaatgatttcttgcagcttagggaaaggaaaaaggtatacacgacgacaaattataaccctaaataaatttgggccactagtgggctttcagaatctaattgggcttaagcagacccaatttgtatctggcgcgaggttttagtttctgcggaggaggagatgatcgacgattcgtctcttacggcggagatg

SEQ ID NO: 5311 - DNA, 3000 bp, Unknown
  misc_feature (1)..( 3000): cDNA_ID_2140446_gDNA_ID_1620778_Annot_ID_167829 3000 nt of promoter + ATG
actttgcatcatcatcatcatcatcatcaaaaaaaacttttcatcatcaattactaaacaaactatatggaaacaacttaatctcaatagcagcataaaaagggtaacaagttgttccaaattcaagtcaaacgaatgaaatgcgtaaagtattacgcatcattaggttcaatttgctaaatgtgagttcaagttcttagctttctctacttcttagatttcatatatcaaaattcaaacaacattgcgtcatcatcatcaacaaacaacttttaatcatcaattactaaacaagtatacataggaaacaacttaaatgaccaaaatagagttcaagtccttagctttttctacttgttagattccacatatcaaaattcaaacaacattgcatcaagaaacaactttttttcaatcattgattactaaataagtgttgatgaaaacagattggattgaaaaatgaaacctttacgagtgtggaaaccaggaggtttacagttttttcccttgtaaaagtctctgggagctcgtttgggagagagaatatcaagcgaagaagctctctttcttcggaatgttcttccaatcccgaataacaaccctaatgtcatcttccaaaatctatcaaatctggtaaacaaaatatgttgtagaatcgataaaaatggaaactttcgaatgtatcaaatgttgaagaagaaatgtcagagatttgtagaagaaaggtcagagaaagggtttaggggttcttttaggtgaaaaggcccaaaactaaataaagcccattttcatacattcacttatttgtttataattctccaaattacctttaaggggatgtattcaaattagaatttaaagtgatttgagttttcttgagttttaaatgatttaattgatcttagggaagtttatatgatttttgtaaaatccattcaaatctcactttaaaccatgggatttggatttctgtatttttaactaaagaaatcctctcaaattctccaaaataattaaaattcaaatccacaaattgttttcaataacagtaaattttcaggtggattttgaaatcattagttcaataacactgaatttcatgagttttttaaaattcatgtttgaataacatatgatttataaattctacaaaagtctcttaaaatttcacttgcaatacacctcagattttacgatcacttgtgatttcagatatgctttagaaatgtgaattctagtatgcttagacttgctcaaatatgcttagatctgcttaggttttacttgttgtgaacttgtaaattatactttagtttcatcggaattgttgtgtactcgtaaatttaattttaaattatgttttaaaaatgtgaactctaatattttctcatgttgattttatatatgcttagatctgcttagactcgagtagtatataccaaattgtgatttgcttagacttgcttaatttataaattgtgatttcactcctacaatattttttttttgtcggtacaaagaaggtagttgaacaaacttgttctcaaaacaaaagtagtttccagaaaggctagtatagtttcagaaagacttatgctcaaaacataagtcaagtactattacaaacgtctagtttccgatacgaactaactctgtgagaatctctgcagttgatggcataagaagagggtctacagaggtcatcaaaattcctttgacagcgtacaccttttgatccattttgaacacacattggaccactttgccataccctccacgacctaggctaccttcctctataaaatcgtcatgataccttgaaggcggtggacgaatagactttgttgaagcgagtccaaccatccaagataaaagggattaggctttgccgactcgaacctgaacacaaaaatactcgaatattttaatcgaaaatctaaattttacccgaaccccaaaattttacgcgaaaattcgggtatcgcttctaaaatagggcctaaaaatctatatccgaaccgacctaaacctgattagacccgaaccgaaatcgaaccgatattttaaatttatccttttagatcctaaacttttttacccaaaggacctgtacccgatcgagttttatctgaacccgacccgcttactcgaatgtccacctctacgagtgagacatgaaaccctctcttccactccgagtctttcctctcaattgaatccgagataaaccggtttaatctccaaaccaatcccatattcttgtaccaaatgttggtttgcttcttcgtacaagaagatattttccgggaaaatgacaaacagagaaaatctccagaaaacaatgaaagctatacacaaaaactcgcgcttccgttcacgtggcaatcacttccaatgaacgattctccttcgtttctcccaaagtcccatcacaatcaaaaaccttctctccgagaatctcactcactacaaagagtaagattcgattcaaaaacaaactccgatcgttgaagcaacgaagatatgcttacttcaccttcttcttcttctacatatgatccattctcttccaatttctctccgtcgctcactaatgccttctctagtagcttcaccattcccatggggttagtcaatttcactctatcttcctcttcgaaatttgagttctgattctgaatttgtttggtattcgtagattgaaattgagtaggagagtcaccagagctcggatcttctctcgtaaggcacgtcttcttcgtaatccctaatctcgttcatgttcttaagtttacattccaaaaaccgaattagacgatcttcattgtttcatcgtaggtagattaaggatcgttcaacacttaaggtcacttgtcgtcgcgcacacgaacgtgtggttgaggtaaatctcttggtttagttttttgctctttagcggattttgaattgtgtgataagtgcttcttctgtgtaattttctaggaagaagcatctaca

SEQ ID NO: 5312 - DNA, 3000 bp, Unknown
  misc_feature (1)..( 3000): cDNA_ID_2155073_gDNA_ID_1620778_Annot_ID_167822 3000 nt of promoter + ATG
gtaaatcacactcaatttatattgtagttaatcaagctcaacaacactgatgagcagcatctacgcactcgatttaacatcaattaaaatatgagatcatcgattctaaagtattagagtatttgaaatagagaaatgatctctaatagcacataatcaagtttcacaaaaagcaccataaactctttagataaattctcacaaatagcacaattttaagttttttggacaaaaatagcattaaaattttttttgacataaatcgcattcaaataattattttatatttaattattaaaatttaaaattcaaaaaattcaaaaatacacaaattctttaccaaaaattcccgccaaaaaattcctgacaatattttcccgccaaaaaaatttccgtcaaaatttttccgccaaaaaaatagaaattcatgacggattttacaaaatttaggaaggattctaagcaattcaagaaagattttacgaaatatagaatatattttttttgtatcccttcctgaatttcataaaatccttcctgagttttgtaaaatatttcctaaattttgtggaattcttcaaataatcattttctgaaatttaggaaggattctacgaaattcaggaagggtttcacgaaatttttatttgtgaaagctttcctgaattacgtgaaatcattcccgaataccgtagttaccttcttgaaattttttttgcggggaaacttttacgaagattgttttggcgggaaaatttgataggaaagtttttggcgagaaacttttttacgaaatgtttttttgtgggaaaccatttgacggaaaatatttacttttatttatttattttagttaactaatcgtttatatttaatatttaattaaagttttgagtgctatttgttgattttttcaaaagagatgttatttttggaagaaaaaactttttagtgctatttttgtaatcctcctaaattttaatcaaaccttaaatataaattaataattaagaaaatacaaatacgaatacacaaatttatcgccaaacaaagattattaagtttttcatatgtatttatactataaattgttttgtaaagcctttaatttgtggactatactataaatttttcagtagggcctttaatttgtgggcttttttttacatacaattatataaactaaaacctaaatgctagagttaaaaaaaagggcgatttgtgagtcaacttaatttttgtacaagtaaaaatcatagtttttgaggttaattgttagttttgcttatgaatttattgttattcttcctttctatcgtggcaaaatttgtaagaaaaaaaagatgcaaatcttgtgataatgtgattagttaaactccaattttagaatggatcgatcactagctttgttaaaatatgagacacaaactttcatcaaatttaacgtatttgaccttgatttgtgttaaatatttgtcgcaatataaagttgtaaacgttatataaggaaatgttcaatctctcttctttttttttgaattctttttaactgaatttgtagatgttatataaaaatatgacatatgacaatgttttataaacatgagtatatttgtcacaatgtttaacataataattttgaaaagagagaacaaactgcaacaatgttgttatataatacaattttccattaatattgaaaatatgagatttctatgggatattgcacaaaagctaaattacaattcataagattaataaaaatctttaagtacaatgtatcacaccaattctgctagttttagaaaaatataatatcttttttttgcctttttcataatgagtcaaatttatgtttatggaggatagaatctcaatgttaaaaaagagtaacaattcataaaattaattaaaatatttatgtgtaatgtatcacactatttttgccagctccaaaatgttacttttagaaaataaatgagaataggatatttgttttttgtctttttcataatgagttaactttatgtttacggaggatagaatctcaatattaaaaaggggtaacaatttatacgattaattaaaattttatgtacaatgtatcacaccatatctgctagctctaaaatgtaataaataagaatataatatatattttttgtctttttcataatgggtcaactttatgtttatgaaggatagaatctcaatgttaaaaaggggtaacattcattagattaattaaaatctttatgtatatacaatgtatcacactattttcgccagctctaaaatgacagttttcgaaaataaatgagtcaactttatgtttatggaagataaaatcttaatttaaaaaaaggtaagaaaatcttctatataaattggtcaaacttcctttcagtcttcaattcaaatcattgttttttattactaaaaggaaatataggatttaggatagtcccccaaaatgctaagtttcaactaatataaaaagaataaatctaaattacagctcatctctttaaatgaaattgtaatggacagtgtatcacaagatttttgccagtcctgaacgttctaaatctttaggcgtttatttgttctatttataaatatcaaatcgtagctttataatccattcatagtcctttgctcttgttttactactctcactaatttttttataaaaacaattcttagctactagctagctccatttataatcccttcactcaactttcttgtttcactattctcactaaacgtaagttttcttgcatcatttttctaaattttattgtcgatatcaaactagattcgaaggatttcaattgaaagtcttatgatatttaattgttacgtcgatataatctatgtgatgtagaaacactcatttttaggggtctaattacatctattcaagcaaatcttttatttaaagtgtgcatgctaatgatttggataattttgtttcaaattagggttttctcggaa

SEQ ID NO: 5313 - DNA, 3000 bp, Unknown
  misc_feature (1)..( 3000): cDNA_ID_1025318_gDNA_ID_1620778_Annot_ID_167825 3000 nt of promoter + ATG
cggagccgtacaacgaccaatgttaagagcgaaacccccacaccactctcccgcactgtttcttagcactcctcccgctgtagccagacccggattaccccgtgatgccccaccagtattgagcttcagccacccatcgttaggcacaccccaaccaaccattacttccaccctaccgcctatccccgaacctcctttatgtttactagtagcggtagttacttccttagccgcatccttaataaacctcgttctatcccgacacttaccacgtttgtcaaacacgttatcacagcgccacttccaagcccaccaaatagccatcgtgaaaaccgtagaccatacactctcatatatttcccggtcatcacctaggttatcatgctaccattcgatcaacgactgtgcaaagaaggatctcctccgccgctggggaatgatacgatcccaaagtcctgccattgcgggacaatcccgaaggatgtgaataatcgtctcacttccccccttacagacttggcaaacatctgttatacacagatgccttctaaatcgctcagcatccgtcattagagcttgattcccgactaaccaaagaaacatttttgctctctccgtcgccaccaccccccatatgcgactaaaaagaacaacacaacatatacaacaaaacatagaatatcaacattaaagaatataaaaaatatcaacaaaacatatacaactcgcagtgtattatatatttaaaatcaaataaaataatatcataaatttattaatcatctttacaaaaaaagatttttagtttaactaaaatataaacttacccgcggtataccgcgggttaatatctagtgcaaacatatttagtaggagtatcataaaaaatctcaaacattataaataatacttaaaaattccttatgataccatatgagtatcacccatatacatgctattattgtgggtaaaaatagatagttttgcgcaagacctattaaattatgaatattttgattatttgttccataattattaaaatttgaacatttttgttgttagcgcaagattcaatccttgctttggggaaaaattaaagctatacgtaatttcactgatcgtttttggaaagaaacatggaaattaaaaggtgagctttttttttagttgctgcttctctattgatgagttcctagcgttatgtggaatctagaaactttgtgattttgtttataatctatgcttactcttttctcatgtttacgcttctagatgataaacaacgaacacgttggaataagtcctacaacatcttgtttgggatggagccaggaagttctgagatgaatctatcttatatgcccaactacaaaggactttgttgatttcatgtttgaaaagcaaaagcctatccaattcttcactccaacggttaattttaaccacattcgcggttctactatatatccttaatgaaatgtagattctaggaccttaaaattgtttttcctctgtggcagagaactttttctacatcgatgcccatgaaagtctcttgacttcttgcctcctactattttatgcatcctaaagcgaatctcgataaggttgtaatctctattatatccatcctaaacaccgtttgtgtattctccatgtgtttgattccttttgaatgttttggttcctagctgaaactccaatatgaggggttagagcattagttattcaacctaaaactccattatctctgactcaaagacctatcattgtctttagtgtgactccaaattatgaggctttctctctaccttgcaagatcaaacttgaaagaaatcttgataaaatcctaacttcaggaaaattgtgtatatacatatgtcgtttaatcgatactctacatgtttgcttgtttaacaacgatatgtgtgtacgttttgtgcatactattttcagcaaatagtttttttcatagagaaattaaattttagtaaatacacgaatattataattatgatctcacaaaaaagaaaaaaaaaaccgagatcttcaaataaatataaaacttacttacatagacatgcaaagccttcttgacatgcaaatggatgttgtccatgttcctaatagaggggatgaaaccaatccacaaaatttatttttactaaagtgatgaggacttatagccttagaaatatagtaattatgagtatccaaaacagaacagttggtcttcttaaataaaaaaaataaaaaaaataattagatgtttataataatatcttattataacagttggtcctcttaatttttttttaaaaagagataattaaatgtttataataatatttgtaaattaacgatgtcggctcactagatttacgatgattgacgtatttgtttgtaaattttatgaaattacgttcattaaattaaatatttaaatactaaagattaacagctaaagaaatcttaatgaaatattgccatctttgggttttaaattttctatttttcatatttcatatcggatatccgattaaaaatgaaatcagtaagtataccaaaatacaagcgttatatttattgggcctattcgggccattcaataattaattcacccacgcgcaaatgagttaatccgtaaaataggctttaaagcccattcaataaacccgtttcgcaggaaaaaagcccattaaataagtaatttccagaaatacccttttccaatcattgaaaattcaaacttgacctaaaaagtatctgaaaagccagcgccttttttcgttacgaatccgtgtttttgccagctttcaatccaacggctctcctttcttctcacaatccgtaatcatcgctccccactcattcattataaacaaaaacaaaaatccacggagccgataaaaaaaaaaaaaaactctctcagatctgagaatcatttcttcttcttcttcctcactttgttcatcatcttcttctccgatctaaacaaca

SEQ ID NO: 5314 - DNA, 3000 bp, Unknown
  misc_feature (1)..( 3000): cDNA_ID_2997251_gDNA_ID_1620778_Annot_ID_167826 3000 nt of promoter + ATG
ttcacctaaaagaacccctaaaccctttctctgacctttcttctacaaatctctgacatttcttcttcaacatttgatacattcgaaagtttccatttttatcgattctacaacatattttgtttaccagatttgatagattttggaagatgacattagggttgttattcgggattggaagaacattccgaagaaagagagcttcttcgcttgatattctctctcccaaacgagctcccagagacttttacaagggaaaaaactgtaaacctcctggtttccacactcgtaaaggtttcatttttcaatccaatctgttttcatcaacacttatttagtaatcaatgattgaaaaaaagttgtttcttgatgcaatgttgtttgaattttgatatgtggaatctaacaagtagaaaaagctaaggacttgaactctattttggtcatttaagttgtttcctatgtatacttgtttagtaattgatgattaaaagttgtttgttgatgatgatgacgcaatgttgtttgaattttgatatatgaaatctaagaagtagagaaagctaagaacttgaactcacatttagcaaattgaacctaatgatgcgtaatactttacgcatttcattcgtttgacttgaatttggaacaacttgttaccctttttatgctgctattgagattaagttgtttccatatagtttgtttagtaattgatgatgaaaagttttttttgatgatgatgatgatgatgatgcaaagttgtttgagttttaaatataggcaatctaaggagagctattttcaaagtttgatattttaggtggaaagctaagaacttgaactccaaatttggctaagtgatcgtaaaaacgtgaaatgcttgacgcatttcattggaaaaatttgttgcctttctcatgctgcagttgagatttaagctgtttttatgaactcttgtttagtggttgatgattgaatgttgttcttagtgatggaattagtaactagataatgccaaattgtttggaagttagatatatgtaataaggaagcaatttacatgactttaagagacctgattctttaagaggaaagctaagaatttgaactgaattttggcaaattggtcatcatagcattgttgtagatgtatatcataaagtatttgcatttttccgttctttcttttactttttctctaaatttgtgacaatggtttgcatgaggatatgttgtgcagccagataaattgccaaactacgtagtccctgatttgactggctttaaggtttttattctaccctaaactcttctgttacttttctttgattcctcgatattgaacatgagaacaaaacaatagtgaattccttcggatatctttttacaagtcgtaaacttgtaatggtttgaagctccttaggtttgtgatcctgatgatcttattcgttttaggttgtgttaggaacctgaaatggaatgcttacttcttgcattaaccttgttgtgttttgcatgccaccctaaattcttctgttcctttcctttgattcctctatatagatagccgagtatgtaacttgcatcctaattgaacattagaacaaattccctttttaaaccgtttacatgtcttactattcaaagctccttaagcatgtgtgatcctgacgattttttttccggtcttaagttttgtgttaggaacctgaaatagaatgctagcttaatgtataacgcaagctttgttgtgtgatctagctttgctgatggaacatttgtattttatagctgaaaccatatgtatctcagtgccctttagacgtcaacaaaacaaacgagtcaactgaagcttccaagtgacgaagttagaagaaacatgtttttaactttgaagtcttcattagcttaaagttaaggactgtgttattctatcatccttagatatcttttgttactcaacaactcctagcaagttatttcgagattgagttaataaaataaaaactttgaattgaatccaatgaatcttagatttcaatatttctccacttctcaattccctgtttggtaactgctactgaatgtgtgtaccgtttctattgtaaccaacaggtaaaacggtaaattaaagcgggacaatgaataaaaatcctcaaaaaccccaaaaaatactcatactaatttttatttgcaagtttaatacccaatatttttggattggaatcaaaaatacttcatctaatatttatggtcataaaatacctcatatatttattattggtagaatgaaacccgcacaaaattcatgttttttttctcccgtttctctaattctagccgacgtagatgatactccccgcaagtaacatgtgccttataatgtgatcgcgttagttcccagctttgtctagccaccaagaatcatcgtctatgccgcctgccgtcatagctctagggaggagctgagagtgagaaggacaagggaaaaaatgagaatctctgaagttggattgggtgttttactgggattagtggcattcgataagttagtaacaccgaattgtatatatagattaaaaagtatgagattcaaatttaaccccgttaaatagttccgttaacgtccgttaagccgtaggttaattctaacaataattaatatatgaggtattttatgacagtaaataattagataatttatttttataccaattcaaaaatattgggtattaaacttgcaaataaaaattagtatgagttttttttgggatttttaaccacaaaaaaaatctttgaccttttaaaaaactcttattgaaaaaaaaaaaaggagttatatgatgaaaccaaatggacccatatgattgggagatttggataacagagaatccacaaaagtgtatccttcacaaaaccaaaacacactctccattttcttcagacaactctttctcctttcttctctcttctctgtctcatcacaaaccagaaatg

SEQ ID NO: 5315 - DNA, 3000 bp, Unknown
  misc_feature (1)..( 3000): cDNA_ID_4479748_gDNA_ID_1620779_Annot_ID_167853 3000 nt of promoter + ATG
atggaaacactatgccttttatctttgatactgtataaacatttgtctctttttagctttcattttctggttacactttagagtgttaacacatcttatcgttgtctttctcaggtatgggatttgatcaaactagctgaatatcttactcagagggatgatatagacccgaaaaagataggaatcaccggtatttcgctaggaggtcagttatacaacaaattgagtagcaagatttgtattaagagtaattatatatactaattttgttcattgttaaagcatattacagggatgcatgcttggtttgctgctgcagctgacactcgctattccgtggttgtcccattaatcggtgttcaggtgcttaacaagatagcagcaactatgaggcctattcttccttgtatgagtgagtatgaggatggtttcgtaattcaaaaaacttgtcaatgttttgtatgttgcagggttttagatgggcaatagagaatgatgagtgggaagcaagagtcaacagtatcaaacctttatttgaaggtcagattttgaaaaacatacaaaaaatatgattcaatataataagtatgaggattataattaattcctttgctttttttcttcttctatggttccagaagcaaggattgatctcggaaagaacataatcgacaaagaactagtcgagaaggtgtggaacagaatagctcctggcctagcttcgaagtttgattcaccgtactcattaccagtgattgctccacggcctctttacatccttaacggtgagcacaatcaatatatatgtatgatctcactaactaccaacaaacttacaagttttctcggatttcatatgcaggcgcaaatgatcctcgatgtcctcttggcggactagaacttgcgttaaagagagctgaaaaggcgtataaggaaacagcttctcctggaaacttcaaggtaaatcactgatctaacctttaaacactattgcaaccagatagagaattgaaaaagaaaaacttttgatgtttcgagagagcagttcaaagcagaagatggagttggacacgaagcgacgagtttcatgatcaaagaatcatcagactggtttgacaaattccttaaacaagaagatatgacaacttgacagattgtaatattgtgaactaataaagaagaatcatcttcttctcgttaataatgtattcactctcgcaaatcaatatcattacaaatttcaaaaaaaaaaacaaaaaaaaagcaagaggatcatcatcatcatcatcctttcttaggcatagcggcgaggcgtgtatacatttgtgccattgaattgaaccctctcacatcaccagatcttagaagattcccttttttccatagcaaccacaacaaaagcgtcagtagaaaaaaaaaacagttgcttactataaaaactaggcatgggcataataatcaaactgaaagaaccgaatccgaactgaagcaacccgaatccgacccgaaatggtaaactactcaaatagatcctaaattctagaaccaaagtaattagaactgaacccgaaccgaaccaaaatattttgcgtatccgaaatatgattatatatccaaagatattagttatttttagtttgaataatcaaaaatacccaaataaggaaaaatatataaaaacaccaaaatatccggaaaaaaagacaaaaaatatctgaaatattcgaaataaaatattctaatggatcctaaacttcagaaccgaacccgaacctgaaccgaactgaaactgtttcggttcctatatggatcctaaaatcgagaacagaaagaatcggaaccgaactagaaccgaacgggaaccaaaccgaatacccgaacgcccatggttacatttttgaaaacactaaactagcattttgtacctgagtcgcagttaagaggactgtccggctcaggatgagccatcaatgctatgatagctctacacacagactgaagcgtccaagcaggactccaagcattcttcaaaatgtcgagacatatttctcctgtctacaaaattcccaagtactaactaaaaaacctgcgtttccttttatcacaggagaaggttgttataaaaagagatgcaaaccttgaaatgaacattaggatggaatatcttggtcaagaatcgaacttgaggaggttgcaaaggataaggttcaggaacagaaaaagcaagctgaaaaacaccgccttcgtaaggagtctccgaaggtcctttgataagagcggtccatttgaatatgttggtatcgtcacagatcaattgaatatcaggatctgctactttctctcgctgtacctctttgtattctttaaacagtcgcgctcttgatgcctattacatcaatcaaatcaaatcaaatcataaacatacacagagaatttgcaacaaaacaaaaaaaaaattaagcaatttacctgcatctctaatttcccaaagagaacgaattgtcaactgcaaaaagatcaatctaaaatcaagaagaaataaaccctaatttcttgtaattcacagacgcaattatcagatcccgtaacaatctcaatgattaggtgaaaagtgttttatacaagaacagtgataattagggttaagcaatgactctgctttaagatctagaaagaaagacataggagggatgcgaaactataattgaacataaagaggacgaatcaacgaagctttacctgcaaatatgagagcgagagagagagagagagagagagagagagagaatagcgatgattatgtgaagttttttttttccgaaccatagaaagttttattaaaatgactttataaaaaaacataaccggatgatagaaccggtggtaataaggaaacgaaaccggatgatagaaccggtggtaataaggaaaccctaggcggtggtagtgagttaagagctaacattgttgcggccgctaagaattgatccggcgagaatg

SEQ ID NO: 5316 - DNA, 3000 bp, Unknown
  misc_feature (1)..( 3000): cDNA_ID_2108769_gDNA_ID_1620779_Annot_ID_167874 3000 nt of promoter + ATG
aatggggagtggacaatgggcatcttacatctgggccgaagcttgtttccacacaaaccttaggatcaaggactattccatgcagctcaaatacccccagtttctatccgagtatgctgatgagtacaactgttattctacactgctccaccggaaaacatatatgtcagagccccacttttacttcggaggacctggccggaactctcgttgtccttaatctcatgttgattttgtcaatgttcattctcctgtttttttgttagttttatcttcggaggacctggccggaattttgtttgtcttctaatttaaactaatcagagaagatcttatattgatcataatcttttaatttttttcattactaacaaagcctaagaaagtggaaaacacaatagggagggtaaaagaaactgagccaaatcaaaaggaagtctctaaactgctaatcacaaattgcatcgagtcttgatgccgcggtggaaagtttcaacctctacatgtagaacaaagagacatgttgaaaaataaaatgtgataaaataatttttccgtgtatacataaaaaataaaataaactagtttcaacctctatataagtatatattaccgtcgacatcaatagtaataaaaaatactcaaatgaataaaaacaattctgtggataataagttccaccaaaaggaaggatcaaccataagttcatgacttttgggattatctttggtagttaatcttagtttcatagcacaaagaatgagccaaatgtacgttaaatatgcatatttttattaatttgtatatatagttttgtgtatgtttcttatcaacttaaaaaagaggaaaagtaaaatcatatatatatatatatatatatattatataattgaattatactataaggagaaggcaaattttaattgtgtctaagttactatatatatatatataattatgtacatataattaattttgtattaaattaaatatttgctaccctttatggagcttatataccaaattttgtattaaataaaaaataaataaatagtctttaacctttataaggtactgaaaacctttaattcgtataaattaatatatatgttttgtttcacaataactaaaaaaataagtaaaagtagaaacaacagatatgtaagctctataagtagtaggaaaaatgtaattaaggatccaaaataataatatttatattttatttgcaaccgaaaattttatagacaactcgcattgaaaatgttctcaacttgtttttataggaggcaatacttcttgcggtagggttcaattatattggtgctcaatcagggaattgtccgatgccattttccagtggaatttgatagaaaatttaaaattaagcatcaaaaagttgtctgatggcattcatcggagttgtcttgaatcaccatttttccgtttcatctcctaacgtctgtttttcacttaaaaagtctccaattccagtataacttcgtaaaacttgtacaaaacaaccgaaaaatacattaaaaacgaacaaaaatgtgacaaacaactcaaaacaaacactagacaaaggacataagacactaaaaacacaatataccacatacaattttggagacacccgcacaccgctcttcacctcttggactgtcagtaacattatgacatgactatagacattacattcactttcatgaaatttacaactactctttggatttgggttgcagaaagatgcatacagtaaaacagctccatcaacctcttatgctcatgtttcatgcacataagtactcaattagccataggtggaagcttagaccctgtttcgactttcgagtagctcggatatatatgcattatatcacatatcccttagcaccatattttctaatttaatttacaatatcactcattgccacaagtgtataaaaaccatagcaatagaagggtatcaaagttcaagtaaccaattaaattagaacactagaaatacattctatcatccaatctaagcaatcaagttaaatcattagaacaatattgaactaccgccgaagtaagatctcgtctaccggagatattgtcagattcttgcctccgttttgtatttgttgttttgatttgtaaaactttggctcaagtccaattcaggtattataatatttttaaaaaaagaatattgaactattaataaaatcttaacattttctgttggtccctagtacttttgatgggctctctatatcttcgcttttgtatgtttgaagcattaaggccgaattcatttaaaactcaacttctataccaaaaattttattttaaattttatgtaattaaaataaactaaccaattttttaaaaattactattttaatcacatataaaattaagttttaatttatctttctatacaaaaatatcatcattaatgaaattaactaatttattatatttttttaatcattttttcacttataaattttatctaaaactgaatcgattaatttcttatatctctaaagatatccgtatggtaacaaaattgactccaaacatttcttaagtcgatttctaaaaccgctccaaaagaccattgtgcattaaaaatactaaaaatctaaaatttaaaatattctcaataacaaacatttacgaaccactgaattttattttattttaaaaataatctataacataataattgttttatctgttttctaacacaaattattctaaatacatgattgaaatacatttctaaattggcgttttatagactatagtattttgacaactttgttttcaatattggcgtttcattattttggtgaaagattcccaacttataaaaaaaaaaaacgaatttttaattttcgtcctaatcatttatttcctaaccaaagaaaaaggcaaatcgcgacccgtctctctctctctctctctccttgaaatcgaaagatcaaaaaagcgacactgaaaatg

SEQ ID NO: 5317 - DNA, 3000 bp, Unknown
  misc_feature (1)..( 3000): cDNA_ID_1809665_gDNA_ID_1620779_Annot_ID_167873 3000 nt of promoter + ATG
ccgttaagatcactagtaagttgtaatttattattagaaaaacaaattaaaacctaggttgcctggaaattcgttttgaggtatgttttccgttttcgaaacgtttcggaaatagagactcgtcggaaacacaaaaaatgttacgaaaacacgtttttaaaaaatctatttttggaaatacgatggatccgaactagtcacacgacaaatcctttttattgactttagaaatttaataaactaaattagaaatattaagattactaaagtatataacttattttgaaagactttgagttttaagatcttttgacaaaccaaatttgatgaaactaattaaaatgagaatgaaaatgttggtctaaattaaatatttgaacttaaacattttaatctatatcttttagaattttaattaacttatttaatattaatgtcttggacttgtgttgtttaagccatttttaatataatttcatgctaatatacatatatatatatatatgtaaatatatgtatatatatttccaaaatgtttctaatctctaattttagaaaaaaccgtttctcatatccacataatcgttttctttccatgcaacataaattaaaacaatataaaaaaaacttcttattttcttttggtaaacaagacttttgggcaactggtcttcaacaaacatattccgaagcaggctaattcggagtatatgagtctggagatcctttaaactttagactatgtatgtcctctgcaaaatttactctctggtttgtgaatcacctgttttaactttgtttataagttcgttttatggtttctgtaagattttactattagctacaatacaaaagattttgtaaattagggaaatttgcatttataacctacaaaaatattataattaagtaaataacattctcaaaaaaagcaagcaatattgtttgtattttctgtaataatgccaatactatccctgtttgaaatacacgcttttcatcttctcccttccatagaaaaccaactattttctttcgccaactattaacttttgaacataggtttggctctaacaaattccagtccaccgtttatgaagcttttgattttgccaacgattaacagaggtatattgggcacaaaaacaagacagttaatttttggaaatgacatttaggttttgctcgaaattgaattagaggttttgatttacagaggcacgactttagattttgttggggtctttggtttttttaagagactttggttttggtttttgaaattcaattagtcgagattctcgctaataagcgctgaatttgatcaatctctgttctctgtttccttcatttgatttctttttttcggtctctctaatttattggcgtcgttgtttccttatcctgaaccaataaatcgattttgattttgagaaatttttgagagatactattctattttgtgaatatactatttacgtataccttgtactatatacgttttaaaatgaattgtttgttttgattaaggatgttaagtgatttgattagtgttttatattaaaagtcttgggttccctatatattatcttagggtttagtatccttccatcaaaaagtatttaattgattatttggattcatcggaataaacgtttctatttaaacaaatatatactattctatctttctatgatgatctgtatagaatttgatatcactattcatttttttaaaaaattcgtttccgttttttaaaattcaaatcatattagataaacaaaaaaaaatctgtttttacaataatattattaactttaaccaaataatattgttaaactaataaagtaaacaaaattaagaggggtgaatatatattagtcatatatatttctctttcctcctgctagtggcttctctttctctccaagcgcatccgtgggaaagagttgagtgtattttcacaactgacatgtgctatcaaataaattacatacattatagtactatatatttaataactttttcaaaaaccgtcattttttgcaattcaccctataaattaacactttataaaaactataattaaaaataaaatgaaactacatgttgatatacagagcaacacctcccaatagaggtttggtgagtaattattatataacaatagtatcaatttattagaacaatcgaatcatattctagattctttcatcaatttttttttaaaatcattctagattatagataactttgactttacttccgacttttcaaacggcacatttttcttggcaatatatttcagagaaatggcctattaattactctttgattttttataatgttcgcgtctttgaattgaacaacccaacttttagcatactagctctttaagcacacttttatttttttcacaatttggccaataatgttctagaaggaccgcatatcatatgattagtcattattggtgcttaacggagactctgttttttgccaaattgaaagttttagatttcatgctaatagataagagtgatgttttaaaacatatttgaaaccaaagttccaaactaataccattagtaaaaatcatttacttataagttataagccctcgtcatggcccattttacatggttttggattttagatcgtaaagagaatacaacaaaactgtagacaaaacgaaatcaaaatttcgaatcaaaaagttgtacttgtacagtatataagtaactaatcgtcaaatgtgtatccagttaaaatcgtcacatatgtagatacaatgacgtaatgagtacccaaacatcaaatctctatttttattacaaaaaaaaaaaacacatctcatcgatgacttcacctactcttctctataaagacttgaaaaaaacttgaaaacttcttcaaagtttgtatccatttcacattcacagtcaaactcggttgccgaagaaatttcccggcaaaacctcaacaaacaaaaattagaga

SEQ ID NO: 5318 - DNA, 3000 bp, Unknown
  misc_feature (1)..( 3000): cDNA_ID_1809653_gDNA_ID_1620779_Annot_ID_167870 3000 nt of promoter + ATG
gtatgagaccccacacggctatgaaccatgttaccatatattctaagtgggtttttaatttgataaccacctacctataactctaaattagtctattggatttttctaatgatcatcatataaatttattctctttatataatagtaatcgttgtaaataatatatgtgtgtctcccatcaatccgcatcacattcgtagaatcatacacgtatgtaaacgcatttttgacatacggaaaccatacaagtaggatctgttaggtggttattaattcaaaataaaatctcttttcattagaaaatataaagagactacttttataaaaagattgggattgtagttccttgccaaccacccatataataatactccccaacaccaaaaacacaacacaaacttagaaaaatggaagaagaaaagagattggagctaaggctagctcctccttgtcaccaattcacttccaacaacaacatcaatggatctaaacaaaaaagctcgaccaaagaaacatcattcctttccaataacaggttctcttaatctcttctcatgaatgatttgaatcattcttgttcattgtagatgtcttatatgataataaaataaaaataaaaaacaaaatcctggtaattctacagttttcggagattagtttgggtttcggtatctagttatcaaaaagtatttgtgtatatgttataactagatatggctaaaacagggttgaggtagctccagtggtgggatggccgccggtgagatcatcccggagaaacctaacggcacaactaaaggaggagatgaagaagaaggagagtgatgaagagaaggaattgtacgttaagatcaacatggaaggagttccaataggaagaaaagtcaacctttcagcttataacaactaccaacagctttcacatgccgttgaccaactcttctctaagaaagattcgtgggatctaaacagacaatacactttggtctacgaagacactgaaggagataaagttctggtcggggatgttccttgggagtaagttttaaatcaaacaaaactaattccatttttttttctggaactgaatatgaacttactttatcaaaaattcattttatatctatctacttttgtttttgtcgaatttaacaaatatttttagtatgagttcctaaaaagagtttggccatttctcatcagattattattttcctttaaaggtcatatttttggatatttatctgataataatttgaatcattggacatattaatgatatagtttactttatttgttaggatgtttgtatctactgtaaagaggttgcatgttttaaagacctcccacgccttctcactctcacgtaagattacaattcttacgaaactttttcatacatctcatcacttaattactgccttgaaattaacttatatatttatttattttttcacagctagaaaacatggcaaggaatagagagaggttggccaaaatcatcagttcgatggtttgtttttaatgtaatttttgtggaaactaatggggtttggctttgatttactggttttctttttcacttatgtactaggtttttgcttgctatgttatttcttgttttggttgtaaatatgctgttcgtttaagaaatcgggggttagtatgttatcgtgtgtataaaaatagtgtaagcacgtaagttgattacaatgcctgatatgattcatgccttcgtttcgttttttagtagggaaaatggtatttaattagcgaaatcaaaccgactcattttatgtttttttcagagaggtaaaaatccagagagcctgtttactatgtatgagtaaagattacccgaaataatagagaaatagatacaagaggctatccaagtttggtgggttcgagttttataacaccatccaaaaaaaattgttgttttgtaacacacatgagtaccaattgtttatttcacaaaagacaaaccatttatttcatgaactgtaatcttgttatgttcatgaattatttcggtataacatgtaattaactcgagtaatatcttaaaatagtatttagagtaaagatagtagggagaaagatactttatttttttataactcatataattttaaaaatttcatacacccaaaaattgattatggagtatggaaaaaccatgttaaattacttaaattttggtggctaatactactcgaactcagatggtgaaaacgactttagacttcattaatataaatatatatatatatatatatatatatatatatttatatgagtttttacttattgtcaattggttttggaattagtaatctatgaaacttaacatagtatcagtctatcagaggttgaacattcgctgacccgttaatccaacttggaaaatggtccgattacctctactaattgatgatccaaagaaaaactcaattatgtcgagataggtaaaaaaacattattttaaaagaaataatgaatttaaaattagtaaataaaatttaaaatttaaaaattctcctataaattttgtgtctcacaactttctttcaaactttttttcttcaaaaatataccgtatgctgatgaaatttttatctttaccaattaagaatataatcttttgtttccatctcaaatcatcatcatcacctccaaagcgtttagcaaccccaaaaccaaccacttggcgactacacagtattttactcaaaacatcacaagtttctatgaaacgtaaaacgatgagtttagtaaaaaaaaactagagattatagtcagaaaaactataataataagaagataacattaaacggatagattcatgtctcttttttgaaatccaaaattgggtaaaatccaaaaaccaaaatcttgccaaatgccaataagagcaaaaatccaaactttcctttctcttcactattacacaatgaaatcaacactacattttcacatcaaaatcacattccttcc

SEQ ID NO: 5319 - DNA, 3000 bp, Unknown
  misc_feature (1)..( 3000): cDNA_ID_3076589_gDNA_ID_1620779_Annot_ID_167855 3000 nt of promoter + ATG
aacagaaagccaaattttttcccttgtataccatatgagcaacaagaaactcacaattcagtattgtattttttggtaatattggtttgtagcatctattaatggcgattttcatatagtaaaaagagttgacatttcaagtttgtttacagtaataaaaaggtaaaaaaaacggccaattccagcatgaatttacagaaaataaatccaaaacaaatataaaatttaaattcggaaaaaccttaaccggtcggttatcataaaccaaggaaaaaaaaaaacaataccaccgcacgtgtaaaacactcggagtctctctcctttagcgccaaattccgctcgtatcctctaaaaacctagatcgatcttaatcaaacgatctaaaccgtcgattaaccccttttcatctcaaccgttagattttgttgatcaaactctcatcaaaattcaattttttgatttttcaaaaagatctcaaagagacgacgacgaagcaaaagaagaagaagaagaagagagagctattcaagcttaaagcataaaacaatctctgctccttatatagttcttcactatggaagatttgagtaatcagaatctcctcccgcgtcaatcagatatctccatccctgcggagaagatggattcgtttcaaaagtcgctagaacctccgccgtgttctccggtgaaatcttctcaacaatcagaaacggaagtcacaccgcctcagaaaccaccgcttcaccaatttggtcacaaccaagttcagaagaatcgagtgaggtaaaaattggttaatttctctgttccatcaaatctatttcaatcttaaggaattagcatttttgattgtttgattatgtagcaatcaagatccatcgacctcacgaagacataatgaagttgaatcgaaagagaatactccaaataaacaacaaaaacattgcaattgcaaaaactcaaagtgtttgaaactgtaagtatctatttttgttaatagagtttaaaaacatatttttgtttatacagagtcttgttgatctatataggtattgtgaatgctttgcttctggatcttattgtaatggttgtaactgtgtgaattgtcacaacaaattggagaatgagtcttcgagacaagtagctatctcggggatcttagagcgtaaccctgatgcgtttaagcccaagattgctggtagtcctcatggaatgaaagatttgcaggtttgtgatcttgttacttgaaaaaaaaaagatgtaactttagggcttgatggtagttttataacttgtaggagaatgtgcagcaagtgttgcttattggaaagcacagcaaaggatgccactgcaggaaatcaggatgtctcaagaagtactgtgagtgttaccaggcgaatattctatgttcggagaattgtagatgtcaagactgcaagaactttgaaggaagcgaagaaagaaaagctcttcttcatggatctcaggtctcggatacctacatacaacagatgaccaatgcggctgttaaccgtgccatcgacatgtctgcttatctgtaccctcctgaatcaagaaagagaaagagcaaggacatttcagattctgtagtttcatcatacggtgtccaataccagagggtaaatagtacaattctgtgttgatctcatggtctttagcttcagtttttgcattgaaagcataattctttgtgtttttctatttccaattaggcaaaccacgttagaagaaatggtgaaaattctctattttcactccctaacaacaaggccgtgtccggatctaccacaagtgcttacaggttggaaatatcaaactcatcttctctatgatattgcctatttgaaactaccgtgatacctgactaatggcttctataggtcttcttggtcaaatacattccaaccacatcatgtcagagagctatgttcacttttggtctcaaactcggttgatgtagcaaataaattgtcaggtacatatcatgccgttagatgtacaagatgataggttaacgttcctcatataataaggtctttgataagagaatgtttgttatggtgaaacagacaaagggaggaagaacgacaaaggcccttcttcacttgatggagcccaaagagttgctaatgagatcaatgactcaccagattgtgtccttgatgctaatagaatggacgagaagcctatatctcccgcaacacgtgcattgatgtgtgacgaagaacatgagatcgggtcagagaaagagacatcggcccgagtgaaaacaagccaagagaaagaagacacagacacaagctcggggatttacttagagcaagaaagacagatattgtcaatcttcagggactatctcattcagctctcaaaccgtgcgaggataaatggtaaccttgatatcgtatccttgttcagatatttacaagtagaggattgtgctaatttaagacattattttaagcaggtaaaaatatcaaaagcaacacaaatccaagttgaaagaaaccagaagatgaagaacaaagccatcgagactcaaattagggacattgcttagggaatttttttgattttttttttaggatcatactcatttttaacatatgatccatgtcacattttaaaaaaataattaggaagattagacataattaaaatttaaaaatggtttgaagtttatgagtgaaaattgtcactactatatcgcaaaacagagaatcgaagataatgggctttgcatcgttgtttagttgataatgggctttggaataataaaggtccaatcaaattacatgacccgacccgacccgtccgagaaaaatattctgtcttcttcatcaatcaacggtttaagacttaacactgcaaacaaaactcaaaaccctaggcacacactctctctctctctctatcctcaaagcttcttcttcctcgatatcgattgagagaaacttcgttctaagattcgaaatcatg

SEQ ID NO: 5320 - DNA, 3000 bp, Unknown
  misc_feature (1)..( 3000): cDNA_ID_2140933_gDNA_ID_1620779_Annot_ID_167856 3000 nt of promoter + ATG
cttgatctcattattatcgtttagtgatagctgcttactcattataccattcaaccataatatttttatgttttcactaggatagaaataatgcatgaatcatatatcattgaaattcgatcgcaaaatgaaaagaaaacgtacatatctattgaaaactttgacaaaaaaagtaaagatctactgaaaacttctttgtaaaatacgagtgatataacacaaaaatttccatttttcgtaaaagaattaaaaggccataatagagcaccaactttttttgttttgttagagctagtaagagtcatcacgccaaaaaaataaaaataaatatatataatgcatagagtaaacaaaaatgctattgaataagttcgaatatctcggaataaaattaagtataacctttaaaagagagaatgaacttttttgacaaacttaactttaatttttaccttttttcttgcttgccatttcaagaatgctctcaattattgtcttgtgaaagatattggatagtggagtccgatatagtaaggaaaagtatatactatgtgcaaaaccttaattttatatgttttgttccgacaagacaatattaaatttttagctttatcaaagaagttagaaaaagctgacattttattgttagaaatttttgtaaccaacgtccaggtaatagttgattattagaataactaacttagaaataatgcagccttcaaagccgtttctatgtattgttgcttttaggtttttaattatatagatgttctagaaaagatgatatcatgcattccaaacttctttttataaatatctccatttgatatgattacttctattaattctaactattatataagtcgttcaatctttcaatattaaatgtttataatgtgtattagagtcaggcattcaatctttttatacatatcaaatcatgactatatttaaagtgtgattagagtctcctatgactcaaacccgttatatgcaatattttgaatagttttgaaacataaaagggtttcacggcatatatcatgttttaagatcttgtattaagtttgacatgaaaaaagaagaaggatatgtactaatttttaaagactattactgaaattaatgtctattatattgagtttatgtttgattagtgaaatcggttacggagaatgttcactggaactagaagacttagaacatagaaagaaggaataaagaccagagagccgaggcggtggttgatggaaaaagaaaaagctcttcaagagaaacaagaagaagcatgcatgtagagtagtatcacgatccgtttttagcatgttcgaggatcatattcaatatcattgtcaattttgtcggctttacgaaattcacgttctcaagctataatcaattttataaataaacttgatagcttccatgaacattttcagaatttccaattttcggatagaaaatgtatataatgtaaaattgtattacaacgtaaaccatctactacgggtttaattacctctaaaatgactatgaagcaagttgactattttcgggataaattacatttgttatgtggcacttattataccatcaccatttggactatatacaatgtttatgaggtcaaagttgataaaaagaaatttaacacgagtactcatggatcttagggataattttttaaaattacggtcaactctaataagaaattctagtaatggagatcgagtagaaatgatcaatgactgtgggaaaaataaattccgtcaattctcattagcaagaaataattcgtgcatctatatttacacctattattgcagaattggcaatataaataaaaggattattacatttgataagactatttaaatttgaaatgacattgcaacggtgtttgaatgatatgatggcacagtaccacccgtttttaatatatatatatatatatatataacacttttggactaattctatttgaaagtttctctagtatgcgtcttccaatttccaaattatattcaattcgacatttacagtatttttgatatcttgtttatcaaaaaattgctttttacaaccgcaaagttcggatcagaaccttctaatttccgcgaagtcttttgtgactacccttcattccgtggatttgaacccataacttccttattagtgtttttgttgtgtttcaagaaagccactagatcaaaagcaacttggtgctagttgaatgtttggatgatctagactcaccgattattcaattttatgtagtgataccaaaatggttcattctcaaatgcaaatgaaaacatgtctattggaagatcaaacgaggagatttcagaatgtgaaacttatagttggccaaaactttggtccttattcaagacttcaagtccatgcaaattcactagcacgaatcctaaacaaattgggcaaacaacaataaaagcatccacattaatcaaaaatgccaaaaaaaaacacatgatctcgataccatttcattgccactttataaattgggccaacaactgttttctcgtatttttttctttctccttatgactattccatgaagcttgcaatgtgaagttacaattttcttcttaacatttttcactttgaaatgaaaatgaaaatgtccctactaatagaatgatgtcaaaagtttccacggtaagtctcgaaatccactgtttttgttttgttgtaaaaatacaagcccgttaatatgcgaagtgggtttaaacccttgtcgtctccttctaaccggttagaatccggttcggattgtttaatcctcgatttaatttttattataccgaattagaccaaaactgaattggtcgtctgtacttttttctcaaatcataaacttaaaagttaaaaccctcaatttgtccgacggtgttacgcgacggctatattcggcggcggaagctttttccatctcactctctttcgactaatctttccgccgtctgaagaatg

SEQ ID NO: 5321 - DNA, 3000 bp, Unknown
  misc_feature (1)..( 3000): cDNA_ID_2140937_gDNA_ID_1620779_Annot_ID_167859 3000 nt of promoter + ATG
ccaaaatgctaaatcttaataatatattgatcttctaccaaataaataatggagataagaagctaacgtagaaatgccgaaaaatgggttcccatgcgcatataaaaaatttggcacgttaaatcgtgaagagatagatcattcatgtctcctgacaattaaacgatattctaattatccacaagtcgcatctatcgtgatcattgttttgttagctgaactaacaaagtaggtaatgattctcctcttccaaatcatgtgatctaaagggcataaccaaagtaaaccggggagagatgttgaactaaggaggttttggtttggtttagcaaatagatgatcatcatttgataagggattggatttcagacatatgacttccgcaaaacatgaaacaaatattgaaaaatccacttacaatatccttttgagctaacaagggcacaatagaaacactaattccgatatcaaaagcttgtctcgacaaagttgaaagctttcttttatcagaagctactgataagtgtggaaccagtgaaccctcttctttcagtctactagtgaactacaccatataagagacttgatcaacgagaggcgtctctatgctctccaccattaattaaaccaatccagaataatgccccaattcattaacctcgctattttacacattcaagctctcaactaactaacataaagtatgtttctgagcgggcggaactacactttcttgcaacaaccctaggctacaagtcaatggtattgcacgcattataagtaacaagaactatacgtctctaaactttcgaccaattactaaaacgaagcttagagaaattcagaatgcatcaacttgttcacatccctctcctttaaacgtaatgcagctctcaactaaccaacataagggtctgtttctgagttggcaaagcaacaataactacgctggttacaatgatcctgcaaaataagtgacaagaactaagcaatgacagtttcaccaaatggctaaatttacgagcttccaatctgaaaaactctgaatctcaacaaggtatggctcaaagagacccaattttgaagcccatatttatcgtagcccatgataatccttcaagcccatatttatctacattaaaaggtgctattcctaatatttttacaaacccgtttttatagagaacttttgtctttgtggaaaacaatcattgcacactactatttttttaaatcaaattcattaaataaatgtgtgtatgaaatggtagtttcaacaagtggttttaaaaattaaaactaaagtttatcatatgatatattcaacagaaaatatcagttttaaaagaaatacttaatttgatactatcaaacagagaatattataaattttgatgtgatgtcacttgtcaaccaccatcttgtctacatgcatgtaaattttggttttcattacaactctgctgatttggctttgtcccgaaatgatcaattttcagtttcccgaatttacgtatatcgataacatattaattgccgcaacgtacaagcaacccaaaccttaatggcatcccattttactcgttgcaaaggttttcaatacaatgtcaacgaattcaatgtatttgtgtcattctcgataatagtacgaaaagattaagggtacgttagtccatatgtaatgaaatgtcaaatgttaaaaacagagcattgaaaatatcttggtccaattcggtttggtttggttagtttcaatacgattgattgtctctcatttttgattgttcggttaaagttcggtttagctttaataccgttttataaattcggttgagtttaagattagttcaattgaaagaactaaaccgagtcaaactacattaattggattcagttggtcaacgtaaccaattttgtttataataattgaaagaaaaaaagtgtgatacaatttttctagtctgtaacttttttaacacactgtaataactgaatttttttaaaaatttgactttagaaatttatttaaattcaaaatttaatgacaaaaaaaacgattacattaaatttccataaaaaatatattttaaatcgaaaaaaagagaagaatcttttgtgacttgagaagacgaagaaggtacaaagcgtgacggctctaactcaaagtcctcctaccatatttcctaaattaccctctctcttaatttctaataccctaaaataataataagttcttgattccaaagagagtccgttgggtttctcgtaaaccagagatactcattaggaagaaaatcagacaaaggagaaactattttttgtcatctcttgtttggtggtttatattttggttgtgagtcctgtgttgacctataagccgatcaatttcgacatgcctcttttgatctttgtttgacttctgatcaacttctcaactttgtaagcttttctctgattctctctatctctgttcttgttgaggcagagcatataaattgtatataaaatcatatagggatcattacggttctttattctcttttaatatattgcatgcaatgatgatttctaaaaatatgaaaaaggttttgtgatgattctgattataatcattacagattgagaataacatagaaaatcaatcgttgactatatcagattcaagaattatgttgcattatgattgttactcttaaagattgatacttgagtaacaaaactcgaattttcctctgtaaaattgcttcaagttagctctaaaattcacaatttgtgtaatgttcataatcgaatttgataaattggtttttaggcgttgaccatattagatcatctatatgtcatattgaattatcattgttgttgttaaagattgatacttggagaaacaacaacattcaaatctcctagactatgctctgtagattttagaatcagactgattgatcataaatattgatacttttgagtgtaacaggtacttgcaaggcttgaaaaatg

SEQ ID NO: 5322 - DNA, 3000 bp, Unknown
  misc_feature (1)..( 3000): cDNA_ID_4359668_gDNA_ID_1620779_Annot_ID_167867 3000 nt of promoter + ATG
cgtgtatgtttaagggtttagtttaaaatcttgtttattctcaacaattttaactcaccaacaaagatgtacgtacattattatacatgtacgtacataacatttttcaaaagtacgaggaacaactatactctgaccatataattttatttaattattatatatgaatagatttatgatgaaaaccccaaaagatattttatctaatcaaaataatcaaaagtttctaatgtacaaactcaataaatattttgtatgtcgcctttacaataaaacaacatctaacatgtttatttctattttaaataatattttatttattatcatttgaagacaattcacgattagcaatatcatataaacatatgtgcgtaacggtaataatatatacgtacacggtagtaatgtgtacgtacacggtagtaatgtgtacgtacacggtagtaatgtatgtagtaatgtgtgtgtacgtataccgtaaattacatatacgtacaaattttttttttaatgaagggtataattgtaattttgcactcgtcttcaacctctgcaaccctaattttgcagccgcttgttaactcattaacatccgaaactcctcgccgccgactactcttctttatctccgccatttgagtatgaacaataattcaagaaaccagaaaatcctctttttgttatcctttatcacgagctcgatcgaaatttcctcaacttaagcaacgaatagaactcgcacagagcctcaatcgaactttcactttcgatcggagtttgtgtttcgtcggaattgttattcgtcttcgacaaacagtttttgattttctttggttgttagaaagttaataacgtatttttgatttaattttaaatttaaattttggtaatcagaaaaataaagaaacgaaactgaaccgcctcctttcatttctcgttccagggcaaatttgtccatttttggctgaatggctaaaatctggttgggcgagcccactttgtctctttgtgaaagaaaaagtcagaaaggtgtcaacggtgaaaatttcttttttttaaacgggaaaaatgtcgttttatacgtgaactttcaaaaagtggacattcaatacgtgaactttgcggtcggccaaataaaacatgataaaaacgttgacccgccatttaacacaaatcaaaatgttgaccaggccaaaatcccgagacgttaactggcattaacagatctgataaccgccgtaagcagacgttaattgtttctgttaaagtcgaaaacgacgtcgtttcacgaaacaataaaatccccaattcaattttgaaatccctaattctatcatcttcttcactcttcttccatagctaattgaaatcccaaattcttctatcttccatatcttcttctatcattttctttaagtttgatttcgaaatctctaattttatcatcttcttccattgtttgatttcgaaatcctaattcttccatcttcatccatctttctagctccgtcgattaccaagtatctcctccatgtgaatatacttataccaaaagtggtccacgtgaggaagaatcttcacagctcaatcccaaacgttcctcgcatggttgacgtctttgttccatagcttcattaagcaaccatggatgataaaagatgatatgaaagctatggaagtttgattaagttagaagatggacgaattagggattgaagatggaagaagatgatagaattagggattttaaaattgaattggggattttgctgtttcattttatatgaaacgacgtcgttttcgattttaacagaaacaattaacgtaattaacgtctgcttacggcgggtatcagatctgttaatgccagttaacgtttcgggaattttggcctagtcaacattttgatttgtgttaaatagcgggtcaacgtttttatcatattttatttgactaatgtcaaagttcacatattgaatatccactttttaaaagttcatgtataaaacgacatttttataaacttgacgaagaatctatctacctccaagatttgttattaacggaacttgataagacgttggcgtgtaaattttttcataatattgtggtaccgatgaaattcaaaaagctgtcactgaacggtgattaatatcgtaataaataactaataaattgtcgaacgattctttttttctttagtaatgttgataggcttatagctaatcgcctaatcccctacgtgtgaacactagaaatagcctgaagagacaagtttactagtactatgccattgaaatgcgtgacatttacagtgatacaaaattactattgctttcctttgttagtttagcaactaaaatttaattaaatggcttctgacaggagtatatttaaaggcttaaatttgatttgtgacaatttaaagtcctttatgatttgtgaaaaattttggattcttttttaaccaagtgattaaaacttatctatatcaacaatggtcttttataactctcttgcttttgtgtttaggtacatttaacgaaagataaagaaacaaaaagtgacgaagaagggtttaattgcaacacttgatactttatggtttaaaatacatcccaaatttagtgagtgatttgtagtttgacaaatttcgaagaagggtttcattgtaacatttgatagtttagggtttaaatcaaatctcaaatttagtaaggtaggtttacataaacaaaaccaagaagttgtgttttgttttgcaattttctcaaagacaagagtacgagactcgtcgacgtctttcttcctcaacttcgacaaaagaaaataggattatttcagaccataagtcattgtctccgcctacaaaatcggcgattattaatcacattgtcttcttctatgtttgatccactttaatctcttcataaacatcatttttcctctaaaagctttttcctttactcatcttttctcttctgatcaaaattgtgaata

SEQ ID NO: 5323 - DNA, 3000 bp, Unknown
  misc_feature (1)..( 3000): cDNA_ID_2140943_gDNA_ID_1620779_Annot_ID_167861 3000 nt of promoter + ATG
atgcaagaatgcgatagtttacttatataatttcatattcccaattgattgcatcacattgaagatgttattttcagggttttgtgaaaaaaaactctctaattcgctaatttttgcaactttaccttctatctctagaaaatacagattaatcctacgaaatccaaaataatatgcaatgtgacccttatacgtatattgtaaacgtttttctggatgcaaacattagatttttaaaattataaagatagatatgaactcctcatctagagaattttgatttgacatattatttgtaaaaaaaaaaaatcgaacttgactatagcaaaaaaatatcaaattgcatattatttttgactttgtatgattaattcacaaaactcttattttaaaacaaacattttattctcttatatctaaaaaatatatacattgttttataacaaagcaaaatgcaaaaatatctattcgatagcagtcatttaaggttttcacgacactatagtcgaaggtctttttttgttgacggttcttcacttgagtagcttttaattaagtaatttagttaagggatttaaaatagataaatgatattcgagagttttttcattaaaatccatttgtgtgttattctaataattaatcatattatttgggttactctagtgatttatcctccctagaattatggttaatgcacaaataagtgatcagtagatacaatcactaagttaaaagaaccttcaaaaactttctgaagttttaatatcctcgtctttttcttatttttgttatcatcgagttcataaacttaatacgttctaggacttatgtacggtcttgtagattgatcaggtatatatatatatatatatatatatatatatatatatatattcgctctaattgcatctggcttttgtttatagtacctatcacttctcttcatgcatgtattgggacttctttaaatattgtagatgggttttgtattaattagctacagttattacattagtaattctcatttcgtcttttgaagtgattaccgtgtctgaattttaggaaacgggattggattctaattatgactgatatttcatatttgtaacgtgtagtggttactaggttaatagtaagactaaaacttagggggtaactaaagaagagaatgttttgaccggtcatactatttctgattgcctgagctggaaaattgtcgtggctaaaagtgggaatcggaaaaaggaataaagggatttaacatgggattaggaagaagggttaacgtgtttataagataacaatagttaaaagataaataactcttaatatattcttatacaagtcccgagatatattgttcgatgtggtagataatggaactcggccaatagaaatatagaatgtcttgatattaagaattaagtcgctttccattttctggttgtatagttagctaatttagttgcctatttagggttattaatgatttcttagtttagttttcttgaaatgggttataattaattacttatatctaacgtgaaaagttttttttttttttttgtcttcttatttgcattgttgagagggtttgttcttgtcgcatccattactgataaagtttacgacaaactgctaaaagataaaatcacttaagacttaagagcaacagctattcaatttttttttatcccatttggatagcctaaaagtctaaaactatatgcaaagcaataaacttaactataatctagctctaccaaaaatgtgaagataagaaaatattaaaacatattcaagttcgagtgtcgctagtaattactaccaacatgaataatcacatactcgatcagccattttatgtcatataaatatatttttgttttatactttctataattaattctctagatccgaatatacctcaaatgtacatgatttgatacactatcattttatcaaaaaggtctattgttatcgcctaagcttaaaggtggtgtcggtactgccgatatccaccctgatcaaatctttgatacgttgttgtttcagtttttactttttttccttattttgtggaccgattggcccgtataatacatactattgttaacctatttgggttcagttaatatatgccgtttaaatcaataacaaagagaaaaactttattcttataggtattacattctaattaaaaagcggatgaacaaagaaaaaggaaaaagaaggtattataccaaaaccggtgactcgatccagtttacaatacatataaataattaatgtggatcggtttcaactttcgcgtaatggtgtcgacgcttatcgagtgttggttgatgataatcaacggcgtgatcatcatccatcacatgcacgtgcgtggtactttctgtaatttgaagcaatcttatgactcttttggtaaagttgtccccaccactataccataattgcacatgtttgattcaattaatcctttaatgaagtcaaaaacatttcccacctttgtgtttgtcaactaaccaaattctaattttcccaacaaatttatggcttagtaactaggaaagtgtaaaaataaataactccccacaaacgtgactacacatgtgcttgtacaagcatgtaaacaaactaaaataacactaataattacaatttaacaaaggaaaaaaaactagtaaaaataggaataatagtaagtagtgagtgtaaaaagaaataattcccataaaaactcctttgtcttcgtcaaacttttccgaattagacctcttgtccccttcaagcgcaataaaagtgaaagtaaaataaacaaaagtttatcttttctacagagaaaccataactttctctaactttactcctttttaaactcacattttcccctcacttcactctctcctctctccaaagacctccgacgagagtttaccggaaaaaaaaaaaaaaaaaacaactctttagttttaatcaacgaaacttatg

SEQ ID NO: 5324 - DNA, 3000 bp, Unknown
  misc_feature (1)..( 3000): cDNA_ID_1828345_gDNA_ID_1620780_Annot_ID_50328 3000 nt of promoter + ATG
ggactttcgtctatacaaatgtgagtcacgcatatcatgctagtaaattttttctttaatttttatattttgtatacatgttagtaagaaaatgtatatattgatggaacagtcaggtggaaaatcatgttacaataatgactgcgacgtaggaatgatactcgttcgtcaagattttcatcttggtatggcattattgccagtgtctgttcgtggtgctaagacaactcattatgcaatcttcggtctaatcaaggtttaaataattaggagtatgacacagcattcacaattttatgcatacatatttgtgtgtttcttaaactaatgaaaaaattcacctattattttcgggtaacaggaccaaataaatggaaattggtggttgcaatttggtaatgctgcagaggaagttggattttggccgtcgagtagatttcatcaaagctctggaaatttggtggagtggggtggagaagcgtatagtgcatcacagccgagtcctcaaatgggatatggatattttcttgatgctagtatgcgctacgatgcatatatcaaacggatatctgtaatcgacggttttaataacattgaccgcaaagtggcatataccgaaaaattcgtggacgatactcgtggctaccaagttgtagacgactataatattcccgcatacccagaagccggtcatataatcttttacggtggtccggggaatatctaaatatgattaattacatctctgtggaataaaaattaataaaacattacattgacttgattatacaataaatatcgtcatcatgcgtttcttttggattttaagattataaatgtttgtactaaaagaaatatttcgaactagatcctcgttgattataattgattcctggaaacaaaacaaggtaaaaatagggtgaacaatctaaaattgcttagtgactttggtaacactcaccaagttataagtgtgaatattttgttgtctacgttttttgtttactattctttttcttctccattttgttatatcttgaattttatttaaaattcagtcacaaaaacgaattaattacttagatgttatagaaaagtatgaatattactagaatatcatacatcttttaaaagttactcatatattttgagtatttgtgtaattataattaacacctttgattagctaatattatttaatttgtttttaattaagaaataaataaaaaataattcacatcaataatccacgttaaaaccgaaaataattaaaatctttcaatttcccaatatttttagaaaatataattggaaccaattgtaaaaatgtaagaatatttaactaataagagatgtactcgacgagttaaaaatttcataataaaaatttataatttaaaaacaaggtaaaaataaaaatagtatttttgtgagataaatcatatatatgaaagttgaccaattctctccatatgattgacacatcatcactttaacatttgccatgtgtccactgaataattaatgtaagctcttcaacttttaatttatagattaatgatatatttattatttaattttacatatttaattgtactaatactaaatttattttgttattaaatgtttttcaataaaataatttgattggttttctcatactcaaaagatttttttctgtaatcttaactcaaattatgagtgtatagtagtcatggattaattaatagtttgaatagtttgcatattgttatatatctatataataaatcgccgagggtgaagagtatgtaagaagtttaatcatcaaattcttaggtttcgagaatcccaatattaccctctatttaattagtttaagacgaacattgtttatgaattgtgtgtataatgcattgttgagaatgttgttagaaaaaatatattttaatactaagaataattacttattatataagtaaatgattagataattaaaaattatatttaaattaaacgatacaaaaaatttgaaaataccgcagcatagcgcgggtgattaactagtgttactaataaatatagaagaacggttttataaaatatgttttggaacacataaaatataggaatgggccgaatggccttgtgtgtggagaaaacatttgttactatagtgacgaaaaagaaaatactcccgtgaagaaatttaacagcttgtgttacttacttacttgtttagcactttggttctccattcaaatatctgaaccaataataatagaccaaaaaagaaccaaaatcctttttgtacctgctttgtctgttttataatgtccatggctaagcccaatttttgtcgggaaggcccattatcaatatatattaatttgaaggaaaaaactaaaaagggatttaaaaaagagagaaccaaatcgaatttctaaaacactcaatggatcctagaatccttgaaccgaactatccaacaccgcagagaacaacacaaagcgaatcaaatacccaggaattaagagcgaaccggagaaaaccagcatcaaatgtcaaaacctttctttttctttattttactacctcttgtgctctatttccagctcgagcaggcaatttgtattggtcatcatataggtttgaattttaatgaattggtcaaccctgaagtcaacgagatatttcgttttgtgaattgtggttaaacaaaattttgattttgagattaaaattgtagtagaagtttaggaaatagtgtagacttacttcttcatggcgaaaaaggtatgacaaaaaccataagaaccatcgtgccgtctttggcttgagatattacactacatgccgttttgtgtacaaaaaaagcaatgttacaattccgacgaatctgtgtgtcttgagagcagagagagtccaaagcatcactatcgtgcttctttcggcaaccgtgtctgagacagtgagactccgaggaaaactgaaggggaaatagatagagcgagagacatg

SEQ ID NO: 5325 - DNA, 3000 bp, Unknown
  misc_feature (1)..( 3000): cDNA_ID_1828334_gDNA_ID_1620780_Annot_ID_50331 3000 nt of promoter + ATG
agaaacaaaaccaatatatgttatcgatcgatggagaagtagtgactcttttgattcttcgatagtcaaaatcatcccagagagattgaattgtttctttaagcagcgacgactttgtccttggcggcattctctcctcctccttcgagctggctcaagtttcctttctccttgatcagctgaatatgatgatgcttgcaatatagcttaccctcgtgagctatgtaattcgaagggcttatcgtgcagcctccatgtgtacacttgaagcagctcttgtggtacaatgttccattcaccgatacctacacaaagtccacattataagcaatgtttcagctctggtttaagccaagaacagatcagattcgttatggaaacaatctaacaatcttctttgacacaacttgattctgatcaggaaagatttgagattggataccttctcaattggatacacggttttgtcgcaaccaacgcatttctctcgtgttccaccaaacatattcgaaactttggttccagcaggtctctgttaaacttctctcatgttaaatgttaaaaaaattcaagaacctcaaaaacagaaaaagggttttgttctgctgtccgaaagtacctctccctccaaaggcctatcaggtttcccaatctttggtgtccctgtacatatatatgaatcaaactttagatagataattccaaatttgaaatccccactcacaaagcttttcacattttgatctgtttttggtaatttaccttcgaagcttttctcaagacttccagttctcttgaagttttgatcgaaatgtggtctgcagtagagaactccttcaaaggagttgtaattgctaagctgactcatcaagaagaagaagaagaagaagaagaaacagaacagtcaaatctttagaccaatcagtttccatagccaaaaattcaaagatttctacttaattgattggacttcttcatctacatatatatctactagatctacttctggattaatgagaaatcatcacaaactagaatcaaagatcaaaccttgagagttcctttgcaatggtgacatcggaaacaagctttgtggtagacccggttatcggcggttaacttgtcgacaagataaactgttttgtcacatgccatgcatttctgggttgttcctgcgaacgccattcttgtaagagatcagactaaaagactcaggaaaaaagaaagaagctcaatagtcttgagagagagagagagataaagaagaataagatgaagatgaaagaaagagattgtcaattattgttgcttgttttaatatggggaccagatatattgaaaaatgaacatgcttcttctttttaaatatttaaagtaaaattcttttaggaaaaattgaaatttttaataaaatgtcacaaacaaaaaagttcaagatgagtatcgaattttggatgcaaattcgaatatttggtgtttctgacaaccctagcattgtttttcgtggttgtctaatccacaaaacaagataagcgatgaataaataaataatttgaacgttagcaacaaaactaaaaactgtactacaaaaagaaaaggtttcaacggcattttttgtgttcttaattatttttgtccaaacttgaagtaacccgtcaatatctgtctcctagatattttgcttatattttttttacattaattcagttcttttatatctagagtcaggtaattatttagagaatgcatgcagttgcttgacagtgcgtaagatttacacaaatttttctcaacagtgaaggcaatgctcaatagtcaataactgtttgtaaggaaatagaacagggaaaaccaactggaaagaatctttgtctggttttagataatgattaaaagctgtattggttatgttgaattagttggaaatctctaaatatctatacactatttattttctttaatactatatgttgtgtagtgtgtatatgaataatgaaaatatctgaaacatgctttaccataaaggcttttgatgagctgtagtattgacataattggttgaagagaatgagtgatcataatgatacctaacatcttttatttaatcaaaaatacctaacgttatttttatttgctactataatagactccaaccaatttattagtatcattttatacagtttctaacatttttgccactgcttagatttatgggctttccctttctgtctgcatgggcctcctctcttatattaataatctgacttaatgaaaacttttaaatcttttgtagtttattttcctctagatgctaattttagcaaaatgaaaagatgtgtgatggaaacgtaaagttaaagcaaaagaagatggtgaattggtgatgcaatattttagtcatgtgtcattgtttacatttatgatatattttactttaaaatacttttcttcattttcaatttttataaatcttcgtagaacacatattcacaaatgatgctactttggtgatcagttactaaaaaataccgaaattgattttagaagatagagacgtgaatctgtttgccaatattaattgggctcaacttaagcccaaattatataaggaaagactacctagtaacgaacaagtagcaggtcaactgtccgagcgttggccaaatctctctcacttccacaggtttctctctccggccaaatctaacctccggggaacgtcgttggtcacttatcaccggttagaatttccttcccgctttatcccgtaaacttttttcccattgattccgatcgtttatgttccttcaccaaatcgataaagtttgatctttttccttttcactattattaacagaccaatctgtttacacaagaaatctacagtaacttatcacttgaaaagttttgataaatagttagtataataatttgttaattgtgtgtgtaaatttgatttcttgattgtgtgtgaattgtgatgaagagggaaaacaaaaa

SEQ ID NO: 5326 - DNA, 3000 bp, Unknown
  misc_feature (1)..( 3000): cDNA_ID_1843230_gDNA_ID_1620780_Annot_ID_50334 3000 nt of promoter + ATG
ttgtttaatggatcagagtatacagttggacctgatcagagtggaatgatacttctaatacccagtatcgagtgacgtgacggcaactgattcgtcaggaaaaaacagagaaaaaaaaaattctaaaaaatcacatatacccatactttatgagtatcatctataaccataaaagatcattaaaaatcattgaaaaaatttaaataataaataatactaaaaaatgtttaataatactttatgagtatcacttataaccatgctctaaatttatactcgtgaacatattaaacgggcctcatctggcccggcccataatttgttggctaggcatagggaagcgttttggcctttttttccaaaaacaatttttgctttgatgaaattaaaactattaatacacaaaaaaaaaatgttcacttttacttttaggcgatggcgagaggatgtcagtaattgggttactgaatcggaatactgttattggagtcgttcgttgtgtttttacggtcaatttggttctattcagatatggttatctccggttttggatttgaaatctcagatacagcggcggattcacagagttccccgagtgctgctgcgactgatggttttggagccgatttcctagcatgtatgaatatgtcctgggacaagttcgagacggacaaataaacgagaccatatgtttgctgcagctgacaagtctcactcagctttcttgttgattgatgagatataagagcagatgggattagctggatatgtgcaggaaactgagatggtatgcatataagttaaacaaatcgttggagcatataagcagacacaaacaatcagttgtagccgcagaggcattcctttgctcattgtgagatttggcagatctggagcactaaccattcgtagtctattgacaatcacacctgattcttatcccaggtgattttgctacaattgtgggaagtttggacattatgcttctgaatgtaaagctcctagcaacaaaacatttgaggagaaggccaactacgttgaagaaaaaattcaagaagaagacatgttattaatggctagctacaagaaagatgaacaagaagagaatcataagtggtacctcgatagtggtgcaagtaatcacatgtgcgggagaaaaagtatgttcgcggagcttgatgaatcggtgagaggaaatgtggctttaggagatgaatcgaagatggaggtaaaaggtaaaggaaacattcttattcgattgaagaatggagatcatcaatttatttccaacggttactatattccgagcatgaagacaaacatcttgagccttggacaactcttagagaaaggttatgatattagattaaaagataataacctttcaataagagaccaagaaagcaatctcattaccaaggtgccaatgtcgaaaaatagaatgtttgtcctcaacattcgaaatgacattgcacaatgtcttaagatgtgttacaaagaggagtcttggctatggcatcttcgattcggacatctaaattttggaggattggagttgctttcaaggaaggaaatggtgagagggctaccttgtataaatcatccaaagcaaggttgtgaagttgtattcaagtttaaagcaaagtaataaaagttctatttcctaaaaaactctctcaaaacacttaaacactttctccattacctctaaaagaattttactctaacagatttatcttccaagttaatagctttacttgaaaaacgattccttactgatattcaaagcataacacgtctaggttcatggatgcactctataatttacttgacggttctattgacgacaatacaaagtttgaagatgagtgccgagctatttttggagcacagtcatatgttcttttcacattggacaagctagttcagaagtttgttaagcatgtaagcaaaactagtgtcttgtcttcttgactctctacttccattctctctctttcatctgatcactgggatggtttttggaaatgcttcagctccatgcagttgcatctgatgaaacagacaccaagcttctgcaactacatgcgtatgagaactacagaaaactttgggaagatgatttgatctagtgtatcatgagaatgcatgtgccatcctccatgaggcaaagatataccaaagagcaacactccaatcgttacattggttaaccgctggagcgttttggagcccgagaatgccagctcatccactttagagccaattggtcagatagaagcgagcaattcaaaaataataaaaatgaaaattaccgaacgacgtcgtattgataaatgggggctgtttggtagtacgtgtaatgttgttctaaatacgagtagggaagaggcgtaagataacaagatgcgtaggagaaaggaaaggattattgtcacttgcctgcgcaaattagggcttctccttcgcaagactctcttcgccagcttaaatcagtgtactctctctttctctgtctctatctcttgcaacttctctgtttctaatctcttcacgcatttgtgtatcaaggagtcattttttaacagaatatgaacatatttgaaaattcgaatcatgcgagttttattgaaagcttatgttcttgtgatgatttcaaacttttcgaaaacagcgactttcaaatttcttcagaaactatgaaaaccctatcttgtaattgccattatcggcatccaaaatgtgcttagctcggaaaattcgaattgaattagcttcgaaagctcctaattacattagaaaattcaatctttatacgaaatttttgaattctgaatctttctagcttcgtactcatgagtttaaaagcttgttacagattatgtagcacttcattggagattatctggttattgtagatagtaatgttacagagtctcataagtgctgttgttatgtgcttgtcaggcaaagtgctgaatataccttaggagctaaatg

SEQ ID NO: 5327 - DNA, 3000 bp, Unknown
  misc_feature (1)..( 3000): cDNA_ID_3076619_gDNA_ID_1620780_Annot_ID_167914 3000 nt of promoter + ATG
cggttattatttcggtttagatagaatagtagccggtttaatttatttcgatttgaatttgaattttgggttacctgcaatttgagtacaagaaggtgcaaatggaggagctttgacgatcacagagggaaacacgtccgctaccgttacttaacggtgtgaatacaggggattcgtctacggaacagtcaaggagcgtaaaaacggtgtcgtcatggaaagaaaacggagcgtcccaatccaacccgaatccatggctgggtcgggtacatgcacacgtagacatggacggatcagtgacgtagatctcttgtttggcgtagtcgacagaagtgatagggtaactgcctgtgtgggtggtgagcgtcaaagtctgttggtcagggtcacacgtgatgtaacgtgtgaaacgtgggtcaccgcaacctgacccggttccgagcgggtacttgatgggtatttggccgcatgttttttggcaggcttgtgaggagacatgagaagagaggaagaagaaggaaaagagaaagataaagaaagaagaagaagaacgcttcaaactcatttgctagacctttcagggaaagtgtgaaagaaaagatgtgaagtatatatgaattgtgtgagtgaatgtaacctaatatagatgcaatgctaagcgggatactaaattgcatatgtgaatgtacatttatatgcaaaacataggcgtttatttttgtcaatataagaatataaattagtttatatatagttttttactttttttgttgttgttaaatcctagattcttttggttgggtctattatctatacataccatcatatgacggattacaacattagataatgtgcaaaaccaaacatagaaaataatatacaacacataacattagaattccatatatcatataataataggcttgattatatacacgaacaattttattgggaaaaatatatctggagatgatttatataaaattaatacaacatataattggtaatattatattagtttatggcattcaaagtttgggcaatgcaaatgtcccattaagctacatattgttattgcaaatttggataaagatagttatgttggctctttgagtaatcttttgatctggatcggatataatatttctcactcgcgtgttcttgtaacaatcttctttaactagaatattattcgaccaaagtttgtgaaattgatggtgtagtaggctctttgagtaataagtgataagaatgataaaatttataaacaaaatgaaaagtatgggcatataaaagtttatttaacacagtatattatttagacaaaatgtgcctttaggtgtcccaaactcaccaggaaataaggcctagaagacaaaataatattgcaaaaacatcactaatgttaagtgcccactcatactaaaagtccccacccaaccaaggaaacgggcaagataagggaattagattcaagagaatatagtaaagaaacctaaaggctaaagttgttcaataattctcaactttaatttgtttttaattcattgtataataatgtaaatctgtaattataactagtgaatatataatgcatcttgcaaaggtattattctaattggtattcttctcatgagattgttctggaagccgatcaatttatctttttatatgtatatataagataattggtgtttatttaaaatgttgacacaaaagaaaagacgcttctcttataaaaataagaaagaaaaaataattaaaagagatgcgaccggcaaataaattctgcaatgagacaaaataattgattctatttttgttttgtaagttgtaacacattactaattccaaaataaacaaagttgtaaaacttgaataactagcgacaccatcctcggaatgtaacattggaatatataacatataataagagtaactttgtataattatgtcaatcttgcgtgtttggaaatcaagaaaataaaacttgaattataagaatgggctagtgagaaatgaaaggaacataaaaaagggattatacatccacccaaactttacagcaatattccagaatctgaagtcacataaaactcataatttcaaaatcatagtatatctcaggatttgaaagaatcaacaacttaactaattaccacattttcatactgataaaatgactaaaagatatgtatgacctctttcttatgaagtgttctcatcttgtttgttttttctttatcaaggaagtttcaaatcattttgggcctgtattttttcccgctaggggccgacatgtaatccatttgtacatttaaatgatagccgtacttataccattttattaatgttaagaaaatgtgagtggaaacaatgagcgtatgaaaacaaacaaaacaaaactgagacgaatattttttttgcggtttttcgtgactgcaattcaatgttcacatttcgtgtggtcctgtgatgcatgacatgtttgttttttaggtggatttgtgtttgtcttccctgatatgtaattatcatttagtggtttcacttctttggttttatatcacttgattagctgccaaaaacaaacccaaataaacatcacatcgttactcgttaaaacaaagatattaacttatagtactaataatatatacaaatttcttaaacatgaaatacaaatttaaacaagctaagtgaagctgccggagtttttatggtttcaattgttgccacgcatataaagaaatgccgtctcgtcgaccacaataaagactaataacgttttcccacccgtttaatacacgtgtcaacctataattggcaattcttcgctatctatcaccgccatcaaattcacctaccctcttcccttccatataataagtaacaatacaccgatctaacataaaaacgcttcaacgtgtcaaaacattacatttccactctcacattcagacgcaccaatcctctgttttggattttgaagagaaaatg

SEQ ID NO: 5328 - DNA, 3000 bp, Unknown
  misc_feature (1)..( 3000): cDNA_ID_3076623_gDNA_ID_1620780_Annot_ID_167913 3000 nt of promoter + ATG
ttagattcaagagaatatagtaaagaaacctaaaggctaaagttgttcaataattctcaactttaatttgtttttaattcattgtataataatgtaaatctgtaattataactagtgaatatataatgcatcttgcaaaggtattattctaattggtattcttctcatgagattgttctggaagccgatcaatttatctttttatatgtatatataagataattggtgtttatttaaaatgttgacacaaaagaaaagacgcttctcttataaaaataagaaagaaaaaataattaaaagagatgcgaccggcaaataaattctgcaatgagacaaaataattgattctatttttgttttgtaagttgtaacacattactaattccaaaataaacaaagttgtaaaacttgaataactagcgacaccatcctcggaatgtaacattggaatatataacatataataagagtaactttgtataattatgtcaatcttgcgtgtttggaaatcaagaaaataaaacttgaattataagaatgggctagtgagaaatgaaaggaacataaaaaagggattatacatccacccaaactttacagcaatattccagaatctgaagtcacataaaactcataatttcaaaatcatagtatatctcaggatttgaaagaatcaacaacttaactaattaccacattttcatactgataaaatgactaaaagatatgtatgacctctttcttatgaagtgttctcatcttgtttgttttttctttatcaaggaagtttcaaatcattttgggcctgtattttttcccgctaggggccgacatgtaatccatttgtacatttaaatgatagccgtacttataccattttattaatgttaagaaaatgtgagtggaaacaatgagcgtatgaaaacaaacaaaacaaaactgagacgaatattttttttgcggtttttcgtgactgcaattcaatgttcacatttcgtgtggtcctgtgatgcatgacatgtttgttttttaggtggatttgtgtttgtcttccctgatatgtaattatcatttagtggtttcacttctttggttttatatcacttgattagctgccaaaaacaaacccaaataaacatcacatcgttactcgttaaaacaaagatattaacttatagtactaataatatatacaaatttcttaaacatgaaatacaaatttaaacaagctaagtgaagctgccggagtttttatggtttcaattgttgccacgcatataaagaaatgccgtctcgtcgaccacaataaagactaataacgttttcccacccgtttaatacacgtgtcaacctataattggcaattcttcgctatctatcaccgccatcaaattcacctaccctcttcccttccatataataagtaacaatacaccgatctaacataaaaacgcttcaacgtgtcaaaacattacatttccactctcacattcagacgcaccaatcctctgttttggattttgaagagaaaatggcaagcagcgacgtgaagctgatcggtgcatgggcgagtccctttgtgatgaggccgaggattgctctaaacctcaagtctgtcccctacgagttcctccaagagacgtttgggtctaagagcgagttgcttcttaaatcaaacccggttcacaagaagatcccggttctgcttcatgctgataaaccggtgagtgagtccaacatcatcgttgagtatatcgatgacacttggagctcatctggaccgtccattctcccttccgatccttacgatcgggccatggctcggttctgggctgcttacatcgacgaaaaggtattcttcttttcttctttcacttgctcatcaagattttattaattaaggtttgttcgcaacaaataaatttttatctatagtgcagagtttttgcaaagcaaatagttgtcttaagtgcttttgtggttactagttaatatatatacgcaaaacatagcattttgtggtctaaaataagtatgtgaatggaaacgcaaatgtaaatataaacaactcaggaaaatatgttagtttcattaattacaatgttaagacttaagacataaactgatctttatttttcaatgttggacattgatcaacatgaatgaagtggtttgtcgctctaagaggtttcctaaaagccggaggagaagaagagaagaaagctgtgatagctcaactagaagaagggaatgcgtttctggagaaggcgttcattgattgcagcaaaggaaaaccgttcttcaacggtgacaacatcggttactcgacattgctctcgggtgcttcttggcttggttgagagtcaccgagttagcagtcagctataaaattcttgatgaggccaagacaccttctttgtccaaatgggctgagaatttctgtaatgatcccgctgtaaaacctgtcatgcccgagactgcaaagcttgctgaattcgcaaagaagatctttcctaagccgcaggcctaagttgttggtggactaggttttgtatttgtgggttgggttcttgcaagaataaattaagagtgttattgtttttagatggctttatctttgtgtgtgagttttaatcaggcgtacgttaaacgttacgtatgtatcaggtttggtgaatgattttatttaggttatgttgattgagaagtatttttttttaattattgtatatatctaactcgctaattcctagaagaatcaacaatcacgtgaattggtcctattgccaggatttaatcgtttcattgttggccacacttcaatttctcaccactcgtttacaaggctgtaccacgtgtcgaaatttaattcgtatatcttcattatccgttacctaaaccctctaatggaaacctaccctcttaagctttcatacgatcttcttaacccgcaagcttccctctctcttcgagtcggttcttaatctccgggataaaatg

SEQ ID NO: 5329 - DNA, 3000 bp, Unknown
  misc_feature (1)..( 3000): cDNA_ID_1828299_gDNA_ID_1620780_Annot_ID_167911 3000 nt of promoter + ATG
gtctgtgcatttccaagattgatatacacaattactaatttaatactctaattctctagattaatataagtggtttggtcgatcggtttaattattgtatctgttttttttgtcggctaaataaagtaataattctttcttgtttaactttaagtacgaaactaaaaatgtttgtttctgtttcattaattaaaaaaatacatccaaatttgtcccaatatgtaacttctgattaagcaatcaagagaatttttgtctaataaaaaaagagggggatatgaaaatgatagtgatcaaattttttaccattcaccacaaagatgaagttaaagataaagtaataataaatgccacgtggctccattaagaacaattttctcattctcctttgtcatgttcttcttctaccttacacgcactccactcttcgtttcctttttctctcttccaatttcagattttactggcaaaatatctcgaatccgattccttttttctcttctgcaatctctttgaaatctcaagcttctcttcaaaatttcgattacagctgaagattctctcgattttctggttttgactttttttttgtttggtttggtgaaagatttggatcaaatgggggtggattactacaatgttctgaaagtgaatcgaaatgctaacgaagatgatctgaagaagtcttaccggcgaatggctatgaaatggcaccctgacaaaaaccctacgagcaagaaagaagctgaagctaagttcaagcagatctctgaagcttacgacgtcttgagcgatcctcagagacgtcagatctacgatcagtacggagaagaaggtcttaaatccaccgatttacctactgcggcggagacggcggcgcatcagcagcagcggagctactcttctagcaactctgagtttcggtattatccgcgtgatgctgaagatatctttgctgagtttttcggcgaatccggtgatgcttttggcggagggagtagcggaaggacacgtggagatggcggtgatggtggcggtcggagatttaaaagtgcagaagcagggagccaggctaatagaaagacgccgccgacgaacaaaaaaacgacgccgccggcgaataggaaggctccggctattgagagtaaattggcttgcacattggaggagctctacaaaggtgcaaagaagaagatgcgaatttctcgcgttgttcctgatgattttgggttagtttctcatgatcctgatctcgtgaatgccattggtcaatttattcctttgattatagtgaatgattaggttatgccatttgcccatatgatcttcacaataagattttgtagctattaggttctctagaactgttgttttctctgtgattgagcttctggtgaaacaaaatgagctttgattatgaccttctgataaaatctgtgttacagaaagccaaagacagtccaagagatattgaagatagacataaaaccaggttggaagaaaggcacaaagatcacttttccagagaaaggcaaccaagaacctggtgtcactcctgcggatcttatattcgtggttgacgagaaaccgcattcggtattcaagagagacggtaacgatctgattctcgagaagaaagtctctcttatagatgctttaaccggtctcaccattagcgtaacgactctagacgggaggagcctaactatcccggtgctggatatcgtaaaaccgggtcaggagattgtgatcccgaatgagggaatgcctactaaagaccctttgaagagaggagaccttagagttacctttgaaatcttgttcccgtcaaggctaacgtcagaacagaagaatgacctcaagagagttcttggtggaagctgatgagttgacgtttagttttcaagtaagctattgatcttctttaacaacggattccacaggaagttgctagtcatttgagtgtacatacatttacgtttttcctttgtaaacttgtgttataagaaaaacaagaaaacccaaatcgaataagactggatatgcgggatctaataatggctgccacacacagaacatatcgttttgaggtagaacttggcctatttgactctgtatgagtagtgaaaagcaaagatagaagcgagaagttttcttggtgtgagttggttttgtggcgatgctcttgtgttacgtattctggtttcccaaggccctgtatatacagtgaagtatgtctatctgttgggttacgtcttttctggaaactgtgtagccttgtaaaggagagacgttgagattcctgttttgttcttcaaattagtgagtgaaatatctcgtttgctttctcatatttgttcagctcatgagaatattgcgaacggagaagcaagagattcaacagaagtgatttgaccgaaatttactgacacaacattaacgcccttacatgttgttaccgtaacatttgttcaataggctctgactcagtcgtgacaggaaaagataatgaaaaggtgcctatgggccagttgactcttgagttgatatatccattgccttcgaattatccagagtttttatttttagtcctagtcctgtcatgtctttacgagtacgtcacctcttatcttcaagtgtatgaagatgagttcacacaattttgctaatgaaatgtaattattttcttgtggaaaaactaaataattgcgcgtgaaagaaagagagaggaacctgcgttttagtttgtaagcgtatgaatggtgtctaagtcttctgcttacgaagtcaacgaatataaaagtttcaagattacaatgagtgatagaataaatacaaattggaaaagaagaagaaaataccataagccaaaatgtcaaagatactgaaaacacatatacatggtctatttgagtcatcataaaaagatataaccacttgaaatctccctcccagagtaagaacttccatactttgctctagatttcttgagaaaagatg

SEQ ID NO: 5330 - DNA, 3000 bp, Unknown
  misc_feature (1)..( 3000): cDNA_ID_3076627_gDNA_ID_1620780_Annot_ID_167909 3000 nt of promoter + ATG
tatttcttctcacatatttactgaataaattgcagcttatacgttacattgttggtaagaatatagtagatatcacgtccaagaacaagatgggttttgaagcttttcaacttctccctcgagaagcccaagactttgagttgttatcaaggtggctgagatttggtaccgagacttcacaagagctggattctgagaacaatgtagaacaacacgaaggctctcaagaggtcgaggtaatacggttgctaaggattataggaataaacacatcagagatagcagagagaaagagaagcaaggaacaggaagtggaaagaggtcgtcagaacttggaatatcagatgcatatagaagcattacagaatgcaagaaatacgattgctatagtggcagtcttgattgcttcagttgcttatgccggtgggataaaccctccggggggcgtctaccaagacgggccatggagagggaaatccttagtggggaaaacaacggcgtttaaggtctttgcgatatgcaacaacatcgcactgttcacgtccttgggcatcgttattcttcttgttagcatcataccttacaagaggaaacccttaaagagattattggtggccacgcataggatgatgtgggtttctgtaggtttcatggcgacggcttatatagcggcgtcttgggtgaccataccgcattatcatggaacacaatggttatttccagcaattgtagccgttgctggtggagcgttgaccgtactctttttctatctcggagttgagaccatcggtcattggtttaagaagatgaatcgtgtaggggataatataccttcctttgcaagaaccagttcagatttagccgtctccggaaaatcaggctatttcacctattaagaaaaactggttttctaatttccctgtaacctgtgtaattgtgtatgtgtaaagtgttggattaagtctttcttaggaactgtgttatcttgtaaaaagagacattgttttgttcttcaagtcagtgagtgaaatgtctcgtttgctttctcctattgttcggctcatgagattactgcaaaccctaaacatgaacctaaaggagcaagagattcacagaactaaattagatcaatgttacggacataacatgaacagaacagaacagagattacactagacagtaactcttgtctgaaacaatctattctcacgtctcaagctttaagtcagcacactgtaagcagggattttccgaattccagcttctatcatggctttcctcattttttctgcttctgaccaattgctatccaaagcattgaacgtcgacaatgccacatactggccacagtgttgaggttgcagtccaataagctgtttacctactgtatttcctaattcagtattctcatgaatcttgcaagcgcccaaaagagctccgagaacagaagcatcaggctcgaagggcaaactttgaatgaaattggctgcgtcaaccaatagtccagctctgccaatgagatcaacaacgcaaccgtaatgttctgatgttggaatgatcttgtactcgctacatatagaagagaacaactgaatacctaaatccacaagtttagatcgagcacaagccgtgagtattgcaagtaaagtgatcccattcggatgcacatagcttgatttcatcatctcaaacatctccagcgcttgcttaggtctaccattggaggcaagagctgatattatcgcattccaagcgcaaactttcttatcacgaatttgatcaaaaatggtcaatgccatctccaagtcaccggcttttccatacatatcaagcaaagcagtacccaaagttgtagtaagaatgatctctttactcataacatatccatgaatctgcttccccagtcgaatacctccttgatcaaaattagcacatgaagaaagtacacttacgaaagtagcctcgttaggtgttattaccgcacgctcattctgtatcatctcaccaaaaaccattaaagctttggcgtgtaaccctttcttactaaacccgttgataacagtggtccaagagaccacatcagttacaggcattctctgaaaatactcgaaagcataatccatctctccgtttcttccacaagcgtcaagcaaactgttacaagctacaacacaagggtttaaaatatcatcaaacatcttcctcgagctctccaaatcaccaacttcaccatagaaccggacaaaagaagtctgaacaaatggatcccatagaaaaccccgtttaagagcttggccatgtaaggcaacgccataagaaacagagaaagatgagcaagctgctttaatcagagaagggaaagtgaggttatttggttggacatggcttgcaagcatatgagtgaagagagcaagagaagtcttgtattctcctgtagtgagataggatcgaatgagagtgttgtagacgcatttcgtcttccatctcgaagcaaccaatgcgttgctggtcaaaagaactgtgtgaatctgcttaatctggtttgaggagtataagaaacgttggagaagatgaagtgcgtcttcaagagacaaactgaaacttgagaaggaagtacaacgcatacaatttgcacaaagattaagcaatctacaaagcaaaacaaaaagacgagacctcgttgtagaagatggagaatgattttgaatttcaatgagaaagttacaaatcaaatatctgaaagtggagaaattgtcaatcggcttgagctacaagaggatgaaagttttctgatttcgagagctccggcgagcaatttggagtctccgaggtcaataggtgaaccaactaggggtctccggtttagtatggtttaatccatttttatttcgatttcttcactataccgtttcggttcaaactaaccgaatttgcacccctaaattaaattctgtttccaccaccgtgaagccagaggttaacgctaccgggaaaaaaatg

SEQ ID NO: 5331 - DNA, 3000 bp, Unknown
  misc_feature (1)..( 3000): cDNA_ID_3076631_gDNA_ID_1620780_Annot_ID_167907 3000 nt of promoter + ATG
accagctatgttccaaataatcacataatagcaaaattagtaacaaagcttcatctaatacacaaccttgaaacagatgtagctgacagtggaagaaacaattaaaaggttcaaatcctataaacaatctcaaatagtcacgcgccagtgtaacttggattccatcatgccgattagatctacatgttgttcctctagagaactagatctccatgatccagaatgactatatttcttatctacttatctattactctgttcttgtatacaagattaagtcactggtgaaactaagtatttgttttgttctgatccactgaagaacacaagcaagacacaaaaagttcactgtcctgcatcaaaacgtacctggctggggatctggcggtcgtaaaagggagaatcacgagagacattcatgtcgtatccaggaggcgtatgaacataaacggacaagtacttttcattgcctttaaaaaacttctcccaaagcggaagcataggtaaaggccctctcgtcagaaacataaacgccactttcggaaccctatcgtacggatactcttccttcaccggaaccatcgaagctctccagaacaactcatcatcagtcattccatgactcagattctctggccgaacaaacccatcaatgctccaacaatctcgaacctttggtttctccgccttgactcctccgtcgtcgctctcgttgtcgtcgttacctgtgcagtctcggtggatgattgtgcaattggagtaatcaggagtcgaaaaaggaatcgattggaggttagtggttgatgagaacatcctcggcaaagaattgaagtagcgatcgatgtgagaacttgcggcgagaccgatgatgattccagccatgaaaattagcaaaaacgacagcgtttgcgccagctttagtaaccctatgtgtttttctccttcctctttccctcctctcgccattgttcgagaaactcaaaacttgtctacccaaacaacaacacagtgatgatctctgttccccaaaaataaagtttcagggaaacattcttatgattcaaagagaatctgattgtttcaagcacaaatccattgcattcaatctcctcgagaaatttcctaaatttgtaacatataattaaatccaaggatcaaacgaaatcgaaaaaggtaagtggataaatggaaattggatctgtggaaatcttcgaggaaagtgagaaacgatgactgaaacagatcagaaactgaatttcatgcagagaggaagaagaagaagaagaaacataaacaaatctggtcttttgtttcttccagttgaaatctatgtgtgtgtgtggttgattttgatcttatatatataaaagaacaaaattaattggaatgttatgcttaatttaattagattaattgagtttaaaactccacgtcgaaaagcataacgagttcaaagtccgcagatcttgccagatgggaataatctattggttttaagttattgggccggagggcccacgtttaattgtgacgtggtttagtgctcgtcaactctttggtccgacatttcacttttttttttatagaaataattctagatatccagtagtcaaacttattgattatctaatttctatatccttactatttttaaaaaaattacttttaacatttctagaatttttcgattttttctgtacttattaactattagtaaaatttattgatgcttcttttggttatgttatagtattgagacaatgtattgtattctaattttgattttttttttcctttttaatgatttgtagattttgttttttcattattatatttgaaaaaatatcttcttatatcttaatcaccagaaaatctaaaaccgatggctatactaatttccggaatatatgaaatgtttatttttctattaaggatccaaagcagctaattaagattaaaaacttgggaagaactagtatcccaaacaaacaatatgatatccagatgtccaaaaggaaaaagaaatggtatcaaaagaaccaagaaatgtgcctagaaatttcatatagttagcttggaaatttctgatttttatgtccaatgtttatttattttttccttataattatacttgtcatacatcacaaagaattgtcaacattgccaaactagtcctaagatgttggaaggtatgatgatagacaacagttctaaagaagggaagatgagattcaggcaacaaaaaacacatatagttcaaaaaaattaggttggtaggatcaattattcaaaaaacatacaccaaatagattttagtaggggttgtttgtccaaaaaaaaactataatagtttacgaaaatagttacaccttgtgaatagattttttgtttgccttcccttgaggtaaattatgtcgcgagaactatatgaacaacaacgagatccacaacaacatttgattacatttttatttgaaccttcacattgatttagtaatgtgggattccaacatcatctaatgttatatgaatggatctaatagatgataaattgttaaatgaactgataatttttttttatttttttatgtgtatttcacatcacattgtttttttttttttttttttaagtaagaaaaagaagaagcacttgagaccgatcagaaaaaaattagaaagatatgatttttgtaagtcttttgaaatttgaatcttgtcccgtgtaattgtgaaatcttacgtacgtcctctttatgacctcgtcttcgctcatttctgccttcccttacgaaatccccaacgaaaaatcttagcttaacaccatcgcgaccggattccaaattccggcccatcgtctcaccgggaaagaccccgcctattgccgccgatttcggttccggtctgctcagatctaatcgagtggcttccttcttcctccagatctcttcactttgaatcggttactcgatctcgattcgcggagggcttttgctagtcgcg

SEQ ID NO: 5332 - DNA, 3000 bp, Unknown; identical to SEQ ID NO: 5326
  misc_feature (1)..( 3000): cDNA_ID_1843230_gDNA_ID_1620780_Annot_ID_167902 3000 nt of promoter + ATG

SEQ ID NO: 5333 - DNA, 3000 bp, Unknown; identical to SEQ ID NO: 5325
  misc_feature (1)..( 3000): cDNA_ID_1828334_gDNA_ID_1620780_Annot_ID_167899 3000 nt of promoter + ATG

SEQ ID NO: 5334 - DNA, 3000 bp, Unknown; identical to SEQ ID NO: 5324
  misc_feature (1)..( 3000): cDNA_ID_3076650_gDNA_ID_1620780_Annot_ID_167893 3000 nt of promoter + ATG

SEQ ID NO: 5335 - DNA, 3000 bp, Unknown
  misc_feature (1)..( 3000): cDNA_ID_2148886_gDNA_ID_1620780_Annot_ID_167890 3000 nt of promoter + ATG
gaggctgaggatatacagacccaaatccaatggataaagactaaaggaagatcaagagccttcaaaatattgatgagaaactcccagttgacattatcataggctttagatatatccacctgaagacagcctctagtagtctctccatcagcctcgaaattatccaccaactcagatgcaagaagaacattctcacatagaagccgacccttaatgaacccaacctgatttgcctgaaccgcttggtcaatgaaaagctttagccttctggaaatgatgcgagtaatgaccttataaatagtagtgcaacaagccacagggcgaaattgagttagacgatctgcccctgttacctttggaatcagagtgatggctgtagcattaaagccccttggaagattcccagagataaagaattccctgatcgcagccacaacactagacttcacaatcgcccaagcttcgatgaagaattcaactggaaacccatctggacccggtgctttgttacggggcatagagaagagcacctgagttatttcctcttccgaaggaatagtagtcaactgagaagccaggaaggaatcacaacgaaaggggagaagacctttgattttttcaacagagaatggggtgacattctctgaaggaatgccaagaagatgcgaataataagcaatcaacatcccttttatctgatccacattctcgaccctaaaaccatcatctcctctaagaaacttgataagattagtcgcttggtgagcaatcacagctctgtgaaaaaatctagtattagcatcaccttcatgaagccatcttattctggatttttgtcgaaagaatgactctaaagcagcagcaaagaagatccattgcttgcgggcaacatgttcccgacgaaaaagagtatcagaaggtgacgtgaggagttccacttgaatgtcctcaagccgagttagagattgggctgtcctttgttgaatattgctgaaacggagcctgttaagagtcctgcaacacagcttagcaacttttaaatgctgcctcaaagaaaacatgtgagacccaaccaaagtattctcctcccaagcagtagacaaagccgccaaataagaaggatgagaagacaagaaggagaaatacttaaaggacttcttagaaggaggaggctgattatcgattaagatgatacaaggggcatgatcagagtcacctggaggatcaaagaccgcaagagcagagggaaagaccgcgaaccactcaccattagctaaggccctgtcaagcttccgaaggatgggattgtcctgttgatgatttgaccaagtgaaaaacacacctcgagaaggcaggtctgaaagctgactgtctctcaaacaacattgaagatcctccataccacgcaggttcaataaggattgattgatagaataatgttccgaagcagcggctatctgattaaaatctcccaacaaaagccagggagtaacagaaagaggagaagtcctggacagcacgagaatgtcttcccacagagatcttctatctaactcagaattcctgccataaacaaaagcaaccgcaaaagattgaagaagagaaggaatcttaatgctgcaaaacataatctgatccgttctcttaaacaccaaaactgaaatggaaggatcccagactatccatatcctcccaagttcagagcaacaatagttgctatccatcctccaacccggaagggttgaggccaaaaccgagtttgcattctcttgtgccacatgagtttccaaaaaacatcccacaagaagattattagaagcaatccagcttcgcacaactcgttgacgattacggctatttaagcctctaatattccaacaaaagaccttcatattcacaacaaaaggtgaaggtgaaagcaaagctttcaatgagaagaaggaccgtcaccggccctgccatcgacgaaaccttgaagctctgtcacggggggacgaatacggttgtgccacttcttaagttctttcttttttgccttagtagacatcactgcccagcccaggggaagagggaagtttggatccggatctttgatagactctctcatagattttttagggagagtaggaggttgagaaattccagaatctgcaccaatgacaacagtaggaactggcgaattcaaacctggtctcacaacccatttcttactagccgaaggcttgggcaatagagggacctgctgagaaatgggaatcaacgggtcaacaatccgaggtggagaactgagagagcgcttctttgatctcgaacgccttctttttggtttggaccaagggagctcaggtggattagctgaagctgaaccaatgacactagtttctgaaatcccagcacctgaaggaaggttaacagcagagagagccacttcattagccccggagggatagtcttttttaaagggaagtttcttctgcaaggggatgagacaacggcttattaaatgaccatacttgccacaattcaagcacttcccatatgtgtcatattctgcccactagcaaaaattgttatcgagaataaaatctagaacatcattaggacataggaatctaaaatgacaaaggccaactagttcaaaacttcattacagtctcaaaaatttcactctttggcaaattgaaatcaaatatgtgatcatttgattctcatacaaaagcagagatagaagaagagccacaaactgagaatatttgctttagcttttgccatccaattgaattataccttttacatggttatggcactaaagtaaaacttacaaggagaatattgagaagaaaagattgggtccaacttcatttattcttcttctgtcacaatactaatttttttctacagaaagtttccatatagtgaaaagaaacaaatctctatataaagccaacttaagagaagtgttcttttataaacaaacagcaaagaagaaagagagaaatg

SEQ ID NO: 5336 - DNA, 3000 bp, Unknown; identical to SEQ ID NO: 5331
  misc_feature (1)..( 3000): cDNA_ID_1828315_gDNA_ID_1620780_Annot_ID_50339 3000 nt of promoter + ATG

SEQ ID NO: 5337 - DNA, 3000 bp, Unknown; identical to SEQ ID NO: 5330
  misc_feature (1)..( 3000): cDNA_ID_1828307_gDNA_ID_1620780_Annot_ID_50342 3000 nt of promoter + ATG

SEQ ID NO: 5338 - DNA, 3000 bp, Unknown; identical to SEQ ID NO: 5329
  misc_feature (1)..( 3000): cDNA_ID_1828299_gDNA_ID_1620780_Annot_ID_50344 3000 nt of promoter + ATG

SEQ ID NO: 5339 - DNA, 3000 bp, Unknown; identical to SEQ ID NO: 5328
  misc_feature (1)..( 3000): cDNA_ID_1828295_gDNA_ID_1620780_Annot_ID_50346 3000 nt of promoter + ATG

SEQ ID NO: 5340 - DNA, 3000 bp, Unknown
  misc_feature (1)..( 3000): cDNA_ID_1828293_gDNA_ID_1620780_Annot_ID_50347 3000 nt of promoter + ATG
tgtaacctaatatagatgcaatgctaagcgggatactaaattgcatatgtgaatgtacatttatatgcaaaacataggcgtttatttttgtcaatataagaatataaattagtttatatatagttttttactttttttgttgttgttaaatcctagattcttttggttgggtctattatctatacataccatcatatgacggattacaacattagataatgtgcaaaaccaaacatagaaaataatatacaacacataacattagaattccatatatcatataataataggcttgattatatacacgaacaattttattgggaaaaatatatctggagatgatttatataaaattaatacaacatataattggtaatattatattagtttatggcattcaaagtttgggcaatgcaaatgtcccattaagctacatattgttattgcaaatttggataaagatagttatgttggctctttgagtaatcttttgatctggatcggatataatatttctcactcgcgtgttcttgtaacaatcttctttaactagaatattattcgaccaaagtttgtgaaattgatggtgtagtaggctctttgagtaataagtgataagaatgataaaatttataaacaaaatgaaaagtatgggcatataaaagtttatttaacacagtatattatttagacaaaatgtgcctttaggtgtcccaaactcaccaggaaataaggcctagaagacaaaataatattgcaaaaacatcactaatgttaagtgcccactcatactaaaagtccccacccaaccaaggaaacgggcaagataagggaattagattcaagagaatatagtaaagaaacctaaaggctaaagttgttcaataattctcaactttaatttgtttttaattcattgtataataatgtaaatctgtaattataactagtgaatatataatgcatcttgcaaaggtattattctaattggtattcttctcatgagattgttctggaagccgatcaatttatctttttatatgtatatataagataattggtgtttatttaaaatgttgacacaaaagaaaagacgcttctcttataaaaataagaaagaaaaaataattaaaagagatgcgaccggcaaataaattctgcaatgagacaaaataattgattctatttttgttttgtaagttgtaacacattactaattccaaaataaacaaagttgtaaaacttgaataactagcgacaccatcctcggaatgtaacattggaatatataacatataataagagtaactttgtataattatgtcaatcttgcgtgtttggaaatcaagaaaataaaacttgaattataagaatgggctagtgagaaatgaaaggaacataaaaaagggattatacatccacccaaactttacagcaatattccagaatctgaagtcacataaaactcataatttcaaaatcatagtatatctcaggatttgaaagaatcaacaacttaactaattaccacattttcatactgataaaatgactaaaagatatgtatgacctctttcttatgaagtgttctcatcttgtttgttttttctttatcaaggaagtttcaaatcattttgggcctgtattttttcccgctaggggccgacatgtaatccatttgtacatttaaatgatagccgtacttataccattttattaatgttaagaaaatgtgagtggaaacaatgagcgtatgaaaacaaacaaaacaaaactgagacgaatattttttttgcggtttttcgtgactgcaattcaatgttcacatttcgtgtggtcctgtgatgcatgacatgtttgttttttaggtggatttgtgtttgtcttccctgatatgtaattatcatttagtggtttcacttctttggttttatatcacttgattagctgccaaaaacaaacccaaataaacatcacatcgttactcgttaaaacaaagatattaacttatagtactaataatatatacaaatttcttaaacatgaaatacaaatttaaacaagctaagtgaagctgccggagtttttatggtttcaattgttgccacgcatataaagaaatgccgtctcgtcgaccacaataaagactaataacgttttcccacccgtttaatacacgtgtcaacctataattggcaattcttcgctatctatcaccgccatcaaattcacctaccctcttcccttccatataataagtaacaatacaccgatctaacataaaaacgcttcaacgtgtcaaaacattacatttccactctcacattcagacgcaccaatcctctgttttggattttgaagagaaaatggcaagcagcgacgtgaagctgatcggtgcatgggcgagtccctttgtgatgaggccgaggattgctctaaacctcaagtctgtcccctacgagttcctccaagagacgtttgggtctaagagcgagttgcttcttaaatcaaacccggttcacaagaagatcccggttctgcttcatgctgataaaccggtgagtgagtccaacatcatcgttgagtatatcgatgacacttggagctcatctggaccgtccattctcccttccgatccttacgatcgggccatggctcggttctgggctgcttacatcgacgaaaaggtattcttcttttcttctttcacttgctcatcaagattttattaattaaggtttgttcgcaacaaataaatttttatctatagtgcagagtttttgcaaagcaaatagttgtcttaagtgcttttgtggttactagttaatatatatacgcaaaacatagcattttgtggtctaaaataagtatgtgaatggaaacgcaaatgtaaatataaacaactcaggaaaatatgttagtttcattaattacaatgttaagacttaagacataaactgatctttatttttcaatgttggacattgatcaacatgaatg

SEQ ID NO: 5341 - DNA, 3000 bp, Unknown
  misc_feature (1)..( 3000): cDNA_ID_1828279_gDNA_ID_1620780_Annot_ID_50351 3000 nt of promoter + ATG
ttgagccattgtgggtggaattctctgacggagagcatttgctcggaggttccaatcttggcgtttcctttagcagcggagcaacctctgaatgcgattttggtggtggaagagctgagagtggcggagagagtggtggcggcgagtgaaggggttgtgagaagagaagagattgcagagaaagtgaaggagttgatggagggagagaaagggaaagagctgaggaggaatgtcgaggcatatggtaagatggcgaagaaggctttggaggaaggtattggttcgtctaggaagaatttagacaaccttatcaacgagttttgtaacaatggaacatgatgatgtatgttaacacctatatattaatactagattttaacccgcggtatatcgcgggacgatttattttttaaagtaatatatattaaaatttgcaaattttattattaatatttatattttacaatttaaaattgttataaagtaacgctataccataaatccatgagacaattgttaaaaaactgaagttttaacccctattaaaacagcatattaataatattttaaaattttataaatatttattcaaatacatctaccatataacccaattccaaaataaaacctgttctgtaatttttttacccgtcccgtgattttttttaaagtagtagtttttaaaattgaagaattatttattatatataaaagttttgcaaattgtatcattctctaatacatttatattttatagtttaattttatatatagtaacattatacataccacataacatttttggttttatataatcttttctaaattaggatgatttgatatatttaatattagtggtctaaaaaataataaattaaagatttattccgtattgaaacggtggattaattatattttacttttttattaatgttgattcaaaaacccgtccctccaaatccgtcttgccaaacagccatttattttattaatattaattttatttatgatatgactctgaattataatataaacattttagctaataacataggagtgcaccatatttatttaataggggaatgtaccatatgacctgaatgcacttttacctaaatctaccaaaaaagtcttgtaaaaatattatagagataagaaacaatagtcggttttgatagtataagattagcaaatatattagttagcttaaattatttaaagaatacaaattgaaaaggtatattacactttattcgaatataatatcaaaacttatataacacagagattatataattttttaattgttaaatacttttttgtgctaatttttatgtgattaagatttaattgatttcgtatataaaatattaaattgttttacgaacttatttgtttataatttggtaacagagagatatttgaatattcagtatattttgctttagtttaggaaatctttgatgacccgtctttagatccaataagccatataggtaagagatgaatattgtctttaaatgattctggtaaccttaatgacgtcaataaaaaattttgtttttggttaaatttttctaatgacattatcatgtaattaattacaaaaattaaagttacatttaaaatgtacttcccaaataatatagcaggatatatttcaaagttgctatcagaaacatatatttgagcctgtatttcgaaacttgtataatgttaaactaatttgagcttggattcgaatccatgtttcgagcttggagttttgtgatatgtcgtcaggttcaaaaagtgcacttattaatatatatgggcctaatacaggcccaaaatatgggtctattacaaaccaaagcattgttgtagtattgagacaaaattaacgttggaaacaaagcattttaaactctctattacaatggttgaaagtaaataagcaaaatttactgtatttcctaaaagtgagaccatttccatcggagtatgtgaatgagatacttatcaattaaataataataaaaaagaaaataaattagagagaaagagaaaaaagtggatgaacgtttttcacaggagaaacgattctcagcatttattgacagttgtcatttaaccagtgatttattttcttcgaactgaagctgtaaatgatgactaaaaccgcatccaaaatcgcaccgcaacagtgctgtaacagtatcaaaatctttacatatacatatgtatctatgtattttcgttattatttgaactgcaccattcggaaaatatattgattggattaatttttttttttttgagatactttctatcacttttaccgtgaagatgccctaaattcagcaattaaacacgcaagcaggaagagagaagtcatcatatcataccaacaaaaagggccaatcgttcgctctttgcaagttgcaaccgtcgcgctttcgattccggcgaaattgctccatcttctagtcgcttttcagatcgagctcgtcgttttcaggttccatttctcctacatcttcttgctccacatttgattccacgccgcctattcgtttctcggcgatttcactcctgaaccctaatttcctccacgcagataatttcgacgatcggagcttccgctcttggtctcttgagagtcctttgatatcatatctgattggtcgaagaacgtgtgtccttgttcttctctttttgacatcggattcataggtatttcttcgagtttcatttcgattagttccagctttgattttattgctggatttgctcaagttttatattcattttgcatattcaatttctgagttcccgatgatttctagttgtgatgttgcttagttcaatggttttagaggttcgttaggttcctcatctctctttctctcagtcatacctgcttacaatacactttctaggtcctttgtctactactctctgtagcgcaggaaccaacttcttaagttgatgttgaattcatagtataatttacggatg

SEQ ID NO: 5342 - DNA, 1123 bp, Unknown
  misc_feature (1)..( 1123): cDNA_ID_1828272_gDNA_ID_1620780_Annot_ID_50353 3000 nt of promoter + ATG
ttcaatccatacacaattacacaaccttagatttatatatatagtaatgaaacttttttttttttttacaatgcataatgttagaaagaaaaaaacatatgaaattcatgtaaaaagagcaaaatttatattgaggaagtgtgatattctatgtgaatctcttaattaataatatagatgagtatggtcgtctagaaacagcgcaatgcgccatgccatcggcgtcgaccaagtcgcttagcagctccaccattgaataattgccacgaaagaagctcagacacgagtcacatgacccacttctcttgcatggcttaacctttttttaattttttcctaagttaagattgtcacatcaaaaacctaacttataaccattttttcctgatacaaacattatgaaacaaattagttggtaggatttcaatttatttttaaatgccaaaatgaaatttctactttttttatttaataaagaaataatatatttttttctcattcaggatataaatatatgaattatagaaaataattttttattagtgaaactccatatatatcatatgaattgatgattagcgagcgacaaagttaaggtcagagggagtcatactcctaccgacgtacttaatcagatccggtttaagaactcggtttaattcaatggttcaaattaaaagagagaaaaacaaaacaaacaaaagaacgaagagataaaataactctttaactacttcttcttcttcctcttcttcttcgttgatatttttctctcattttattgactttccgaatctccaaaaatctaacccaaaaaataaacaatagttttttttttctccgcaaaggaaaaatcttttcttcaccaaataatttgtctctttcgcaaatctcagctctctctcgaagtgcctttcaacgataaatttgtgggctttattcatttatagtgttgttttgatgatgacagattctattaccagaaattgatcaaagagaaaaacgttgctctctcttgatttcttttctgtttttttttttatataattaatttgttccggtgaatgatcgtcgtcttatggaaggttgtagctaatttctaatctatagagagagagagatg

SEQ ID NO: 5343 - DNA, 3000 bp, Unknown
  misc_feature (1)..( 3000): cDNA_ID_3015409_gDNA_ID_1620781_Annot_ID_50354 3000 nt of promoter + ATG
taatgacattcctcatcaaccccctatcaataacttcacctatccgttccttctgcactagatcaagaagagtgtttagaagccttgtatgtatcttagtgaaatgcacaacattatccctccacaagttaagccccatcggatgaacatgagtctttttggtgctctcaatataagtcctatccatatacatgagaatgtctcgaatcatctctaacgctttgttgtgctcattccatttcttattaagctcttctagaaacgaccctccctgagctgcctcgataagcttggatttttctttgagatgagaagtcatagtagcaataaacccagtatatagcttctcaccaaacttgtgcaggaccatgttgtacgcatttctgagccacaatatacacaaataattccattaacacgaaacctagctaagttccagaaacattaccagtttctacaggattcaaagaaaggcaagagaatgaaagaaattgacctgtaaagttcttcgaaactgagaccgctagcatcttgattgtaaatctgatggatcgcacgctcaagaatctgccaagttttatcagcgtatttgggatccacaacgactcgatgcttaaacgcctctatctgaaaattcctcttcttctgattactcatattttgaaacctgaatccaaaacaaatcaatctaaattcacacagcaacgaaaaaattgacgagcgagaagaaagtatatatgtataatcataatgaaaatcaggtggatcgaggaaatcggaagactgaccggagaggaaagacggatgatcgggattagggtttggaattgtattctttgcttccgtgaaaagatttgggggaaacaaaaagataggaaatggaataataatcgaaaagtttaaaggagaaagaagcttaaggctaatttgcagcgtcgaagagatatagatagagaggtatcggagaagatagatttcgaaggtggagaagaagaagaggacagaccaaacggagcggaagaaataaaagtggactctccgtctctgctggtggtttccaaactataacgtatttattaaattaaagtcgcggttgtcacattctcgtcctttggtatattggttacaaagaattgtgaaatatcgaagtccaaggatcgatccctagtcgaagccagttatttttttttttttgacattggaggtttagttagcttttatacttatgtggatatgacaaattggcacgtcggtcatttcatttaattgaactaaaaatatgtcaacttctatttcataaagaggctttgaatcccttagagtggcgaatgttgcttctcctcttttggcagaagccatggcgcttcatctagcccaacaaaatgccttagaactcggttttaggaagtcaccttcgcttcagatttgcaaacgctgatcaaagctatcaactcagaatccttcccaaagaatctctacgtgattttccaagatgttcttgctctttcgtttaatttcgatcaaatttcttttcacttcatttttagagaaaaaaacggttgtgcatatgcatatgcaaaatctgcattaaattatgcacttattgtaccaacttatgtatcggtttaagtttcggtttaatgaaatttcagcttcttgacgaaaaaaaaaaatcccttttaattcattcacaaaaaaagttatatcgtctgttacctttctcttcaccagtttaccaacctttgttgcttgcattcactgtttcgatgccatattcaatcgtctctatgcatctgtttaaaaaatgcatttcctccacaacttcagcgacactatgttctaacttctaactagtttttgtcgttgtaaacacgtcaatggatcttcttccttatccctggtcaagctcatgatgatattctttgtctttgctttcttgaagccattttctggaaagcaacgcatggtatataccatctttcttgttttaatcatacaaactttgacttggacctatcttcttacttttcattgtataatctacaaactttataacaatcttcaccttccctataaggttaacccaactagtggattattcgtatccacctcaagcgccaaaacatggtaaggatcattggtagattttagtatgattgtgaggtaggatcattgccggctcaaagttatgggcggtctaaagttttttttttttaataaaaaaattagcagaagtagttgagggaactcgaacacacaacctcttggctgaaaatgtgacataaatcgctgcactgtaaggaatttttataattttattgcccccaaatatttgtgatacctaaggttcttgcataaatgcagaacttgatagaatacggtacacactggagtctgtaactgtagaagtagaaccaagtagccaacatgcgcctcatcaagaaacttgacgtacgtttccgagacgggacaatggtttgatttatgcctttatgggtctttaacactttatgagaaacaaggatctttaagtggatttaaatatttaaaatttaagaaacaaaggtctttaagtgaatactataagagtttctttatttatttttccaatcgaatactcataattttataaatactgagacacataatattcggctagctctaaaacattggagctggaaagtttgccttacgttacgttaattggagctacaaaatactcataattttgtagttgaagcatgatgaaaagtttgccttacgttattactttttaaagcattggagctgaaaataaaatgcttgcacgaaatactaacctaacacaattaagcaaacatataccaatcacacgtcacgtctctctacccaaaacaaaatatcacacttcacgttatatgacttatataaacatattctaaactatttatctatcatccatccttcattggttttcgacaaatttgattcccacaaattatttgatatcttgaggaaatg

SEQ ID NO: 5344 - DNA, 3000 bp, Unknown
  misc_feature (1)..( 3000): cDNA_ID_2147323_gDNA_ID_1620781_Annot_ID_167962 3000 nt of promoter + ATG
tgtaagattaagttaattgctttgtaagataaacaactatacaatatatttgcactgcaaaagttatagatattaaagaaaaagggattagaacacttttaggttttaacaccaaaaatagacatagtcataactatggagagaaatagggagatcaattcgattttacatatcccatatctgaattaccatttcaggcagctttgtgctcttgcctccaaaatagttatacaagtttagcatgaaaacatttgtgacatcctgccaccagaaacagaattagaatcagtactgagttaccaattgttggtgattctctgggtaatgatgcctgcttaatagaacataaaagatgaatgtacctgcttgtattccagcgtgtccaacttcccatcctgcaaaacaaggttaaatgccaaaataattaggagatatactaaaaggagtgaaatgccatagagaaggattctgattccttatctaatcttaaagactgaatgattcacagctgcaatcgccttaatcatgacagatgcagtaaagcacatgccaattgagtgtgaaagagaagaaaactattgatattcagcattgcttatatatggcataacaaaataaaactaagactcaccagtccagtaatcaaattatgcaatgattccaaatccatctcaagtgagctgatattctcacgagcagaaataacctgtgtagcataaccacaaccacatcacgttccaaaactgttcaagacactacagatgcataacaatgaaagccaatagctctaatcataggaactaaagagaaggtaaacatcatcattatcatacctggctattgatttccttcgagagatcgatctgcttttctaccttatcatccagattctgaatcctttgtgttaaatgccttttcgcagcctgacaatcaaccaattaagatccaattttaaccctgcagcttaatatatcaccagaaacaccatacacaaagcaacaaaaaaaactcaccgcaagagtctcagaaacttgctccagattctttgtcaagttagccactgcagcagccatgttggcttttgtcacatacataaggtcagtgaatgagagtccctaatcagtgaacaatcacaaacagtttttagttcccttacaacactgaaatctcttttcaacaaaacagcagaattcacaagagaagagattgaaaacttagtaatcccaccttccaccacatataaccatatccgagagctcccaatgccgcagcaggaacagcaagggcttgtaggtttgctgaaaaaacaagagagtctgatgaacacacacacacacagagacacacttagcaaaactatttgagtagaaatacaaatccctaatcttcacataccaccagaaactccattcatgaccgttatgtgttgctgcgaagctagctgtcgaatctccatagccaaccggcgaaccttctcaccaatattgcaaaagatatcaataccatccctcaccaatattcctatatccaatgaatatgagtttatgtacctgtgcagctatagcatcagaaacatcagaatctccctcagacccttctccagatttctccattcccttcaccaaactctatcgaaagcacaaatcaattagtcaaaaataaaaaaatcaaggagagaaacaaaaaaaaaaatgcatagaatcaaaaaagtacctgcaattcacccaacaaatccgacaattttccattcttcatcatgatcgtaccagtgtaaccttgattccatcaaatcgaaaaacgtatcaggaggatatacagatcccaattagcagtaagtaaacgagcgagttagattgagcagagaaatcaaagtgaagtacctgctccggctaagagaaagatcctggataagccaactccggcctgcatcgccatagctccgactatttttacaccgccgccgacgacttgtcgagctttgtctcaaaaatcgaatttaatttaggtattaagaagacgaactcatggtttatttttcttattgcattttttttttaaacgtgctagtgcaatttacttggaaacgacgtcgtctcgaaactcaatttcaaccgcctcaactcgcggcgagaaaagccacatcgccggtgattgacttgaacattacgtaattttagtgtcgccacgtggcaaattccttttttgtttttaacagacgtaatcatattgataatcttgttaaatattttttttagtaatcataatttaataaagtttatctcttttaagtttatgtaatcaaataaatgtcggaatttttttctgctaagaaacaagttaaatgcaatggtttagaattggattgtaacagaccaaaaatggatcataaatacctgaaaaagtctaatctcaaataataatttctatgttaacataaacaaaaatggtttaatgtggttatgggagcttaagagtgtgaccatctatccattttattgctcataatccttcttttcttgttagccttgttctttgcagctaacttgagtttcttctttgcatttctctcaggatgtatcaccgccattagcttctcctctcgtttcctcttctcttttttcgcttccttactctttttgatttcgccttaaacttgcacaaacatttgactgcctaagctcttgtctcttatactattagattgtatatagtattccggtttgattagattggtttagctatttagagattgtacattggtttagatggtttagagtaattgtatatatactctcattgtaacacatttattcttcgaggaaatagaaaatcattctacaattctctttgttcatgatttctaatatggtatcagagcatttcctcacacaaatctggtgattttcaccatcgtttcttcaatttcttcttaatcacaccttttctgatcttctttcttctccgattgtctttccgcgaccttggatttgaagaaaaatg

SEQ ID NO: 5345 - DNA, 3000 bp, Unknown
  misc_feature (1)..( 3000): cDNA_ID_2992596_gDNA_ID_1620781_Annot_ID_167944 3000 nt of promoter + ATG
taaacccctgtatttactctttctttatgctttaaaacagtaacttatgtataaagaaaggagacaattgatcttaatgaaacagttttgatggattgtgaaaaatctatttgacgggctctaaacattctttccccttttcaccacccaagcacttctctgtttgtccttctgttaattgtttctggctgcaaaagaatcatctaggttttgtttcctacttacgtgaacaagctcactcaattgttaataacatgatggttgttgctggctttgggcatgatggatcataatcttagacagtcagtatgtggctactcaattgttgtcatgatgctgttaaaaaagaaagaaagaatatatatgaaactctattggttgaactcataacctaatagttcaagtgaatgaaatcatgaaatgatagcgtacctagttaaacatattcattttatgggaggaggttagaagttgagatgatgttgagttcctaggcatagattctaactccatttgtgtctcttcaagattgcaggttgctaagagaaagatcgccactctctttaaacactttgagttagcgagaatgtatgtcattagttatttctcatcttctcttcctccatagcctccccacctaaagatctgtaaatgagacaacaagcattcgggaatagtagaagaactcggctggttccatgaaggtgggagacacgtagaatcctgatatcaatacatttgctataatgttaagttcatctataaactagatgcacttgtgtttaaggggaggaggatggtatacttacagtgtcaatcgtaagaatttgtagtttaggagaattttgaagcaaatacataagtggttccaaccaatctaccaaattgcttggaacaaaataaaactccaagagccgagagaacttgatggtgttacaccacgcaacctgtgattaaaaaaaaatataacattagttggctaagcaacaaggaaaagaagaggatcggagatatgtaatcggtaccattggcttggtcaaatacaagtacatatgtatgacagaagaaagagatctcagaaacttgtgatcggggttatgaacatagccgagttttgctatatgaaggcaagaaatattctctatcaagcaatagtccaaaacgttacgtaagcgtaaaatttctaatgcaggggaatctattaccaaggatctattgagatcatcatcatcatcctcctctacctcacctacgtcaacttcctcaaccacaccttcctcatcatcctctacctcatctacatcatcatcatcctctacctcattttcctctaccacgtcttcctcatcctctaccccatccttccgccgagtagtattataatgtaactgtttcaaggtagatactttcacggtaaattttgtcaagttgtcatccttatgtcgatccaccttcaggcagttgagaacaggggagcttgataaaaggctaacaagagattcttcgtctttgtacaccacaaagcgaagactcagagttaagagagatggtaggcgaacaggggaagaaacgttcactagaatcttgttggatagacttaaatcaacgagcgtgttgcatgtgtaaaggcacttaggaaatcctgtgggttctgcggtccagaggagattgaaatctaactctttcacacctctattaactacgttctcaacccactttccgacatctacgtcaacaggacaatgtggaccgagttccacaaccaaactatctagtttcggtgccttatggagttgcaatgacttttcaataaaccaccccacgctctcgctgtcatcttctttgaattcgagtctaggcaccatcggccagacataacgccatcgtttagacaagattgaagtggcgactgcctcttttgttgggacgtgatgcaagatctgcaagagcaaatcgttaggaaaagcacagattctagtttcgtttatctgacaactttcggtttctggaacagttgatatatgctcatcgtcgtgtataatatcccaaaaaaaagaccaacaacttaagcaacccatagatgtggccatgtgggataccggatacctagctagacgccaatggaacttttttctcgtcgctggctgtgacacaaaagtgagtctatattataaagctttttttcaaaaaaaaacaattattatacaaatatttattatttgttcaaagaaaaaaaaaaaaaaatatatatatatatatatatatatattattaatgcatataaaaaaagaaactaaattaaagttgcccaatttttaaagtaaaactgcaatatagacacacataaaatatatcaatcgattctcattcttacataattgttagttttttcccttaaaaatctaatcatcaaaccaaacaaaattgttgaaaatccaaattttctagcctggtccttatatttccatttgttattttggatgaatttattttccaattcccaattttgccgccaaccttgattaatttctctacttggcttgctctaattgcttgcaccacgcccttgtaaatgtatcgattatgtttttacgtgccatgaatttaaattttttgttgttacactatttgataaaataaattgaatgtgttttgactaaacggattataatactaattaatctttttaaagttctacgtataatttaatgcatctatgatttcttaaaaaatcaaaataaaaattggtaataatgtttctagtttctgttcactacaacatacaaacgatacttattctaattgcagctaataatagaattggtttttacaagttgaattttttttaattatttgtacatgggcctttaactggagcataattaaagaccaaaatgagaaaaggcccatatagttgtagtcttagtttaggtttggagtctcacccttatattcttcgttccaaacgaaaaccctaaaagagaaaaggaggcgaaaatg

SEQ ID NO: 5346 - DNA, 3000 bp, Unknown
  misc_feature (1)..( 3000): cDNA_ID_1828377_gDNA_ID_1620781_Annot_ID_167943 3000 nt of promoter + ATG
acttaccaaaaaagtgattgtttggtttgactatgcgagtggagtcagagaattagtacttacaagttacatcttagtgctaatattagtagatgtagatcttaggattagtgtaaacttagtatcatcaaattaaatctactttatcattcttttagttatatatgtagatgatagtaatatgattaagttataaatgagtcactttcttattgcaattttactagatattcacaaaatattagctatgtaaactttctatctctgctttggctctctaaaccgttttagttatgaaagcggtttagataaaaagaaattctttatttgaacaagtacaaaatatgtatctcgaagtcgaacaaaaccatatttatttcatcttgcatctgactcgtttgattggtgtttgaacgaaatagataaaaaccttgctattttgttctttttgataatttgatgaaaccttgttacgtacggaatatgttgtttgtatgtactgcaaagcataagaatattcgtggagatgcctagttatttttctctgtaattcatacatttaagtcgtcaaaataaacatgaaggatatagattcattgaatttttaacgaatgaaaaatttattccatcaaaaactgtgtttacattatatgcagcctttttaagagagtttttgaaaagcattgaaacgtaaattgaaattgagcaacttctaaacaaatcttatcctctagatccaaacaaaatccgaagaacatcgtcgtgcttggatgaaccgttacttgaaaaatcattaatcatagctgatatcggacggatcgttcaatgaaagtgatgatctgcttgaccatgtttgtatcattgtatgctagccgcgttcgacgacggcaactttttttttctcaaaaaaagaaagatgattgtgtgtaaaattaaaggcaggcagaaaaatctcgtaagcataattataacgttaatgttgtaccaaagtgacgaaaattgatttgatttgactttttttttaaaaaaaatatttgattatatttacttgttttttttttttttttggggcaaaagattatatttacttgtttagtatgcatatttatgagtgttttgtggctttgggaatactatgcggctgagaggttaagatatggaagcaaggctacatgatatcatgaaaaatctactacttttgtgttggttgtataaacattataaatttatgatcatggatatgtaatcatttttgtagaagctacatgatattggtatattggctaaattatgggatggcacatagttgaagcttagattcaattaaaacttaacctcaatatactgatttcaagtaatttggtctcacgaacatagagatatcccctccattaccccccaaattggctgcccaagcggcagtatatcacatatggagacagcggaatcatctccttcacaatggcatctcaattccgcctccaattgttttcaagaacatcaatagcgaagtgagaaacaccattactgctagaacgcccccgtaaagtctttcgtgccttaattgctctttggatccgttaatgggttgattgatactcaactcttctttgtattattatttttcttgacaaagtttacatttgtaggttcagctttttgtaaaacttcaacacttcattctaatgatgtttacattcttataataataaaaacatagagatgtcatatttatttctatttatttatgtactatattacgacgaagtttgaacttgtgagaagttagaaaagaagttattactttctgaatcaacatttaaaaaataatagatgaacttaaatagtaaattgtacgtaaaagtcgaactccatcagctaatttctttaagtcttaccacaaaagactaatatgagtcaaacttgagacttgttcgttggaacgctgaagttaccaaaaaggtcagagtgaacaaaatcttttcaggcatttagtcagactgagatccaaactaagtggtgaaatggtaaattacactaatgtcattgccctccattggccattaaagccttctattttctgacattggtcagtgggaatagaaactgtgaagaagaatggaatagaagaaactcggattctgagaatccatttaaatttttttagtttaatcctaattagaaacctgaaagcaattgattagtgaatttaatttcgaatcttttgtagttgcagctggcctcgatcggcccttgtatccttttattaattaaagacttcaaaccaaagcgacaaaattaaagcggttcttaattggtctttaataatttttcatctcgtcctccatatatacgattatacacatacactgttcacacaaaaatacatacgtagatttcatgcacgtcaatgtgtatctatgttcgttgttcaccatatgtcacgatacacacatgtgcacgtgtgtatatatgcgtacacgatatgatgatagtgcatttttgtatcatatgcgctgattctagaagtaatggcaatgcttcattagtaattaagtatcgataacatactaaagtatcgatatgtacatatattttttttcatgataagaagaaatacgaaaggcctcaggcctgagatatagtatatagtacgttattgtcttattgattatattttttcttgatcttgtcctcgtgtttataacctttccttcagctccagttttgaatattgtttaataagtaaaaccaaagatagctttcaaacaaactttcttgggaaattaattcaaaaataaaatgaaattttaaaaactcagctgaaatggcggctgatccttcgggttcagacccctggcaaggaagcatatattgatttcaacttaagctaaaccacttcacttacttcacttcctcttctctaccaaactcactctagctagttccacttagggttcctctcttccaactcttttttgtttttagggttttagagaa

SEQ ID NO: 5347 - DNA, 3000 bp, Unknown
  misc_feature (1)..( 3000): cDNA_ID_2147297_gDNA_ID_1620781_Annot_ID_167940 3000 nt of promoter + ATG
ctaaatacatcagtttcagaaaaacttattaatgaccattaatttatttaacttcatataaacaaacgttgaatcatgtcatagaagttctaaatacgagatatactaacatattttgatacaaaaatgattaaaaaaaaaaggatgatcaaaattacaaaattgttcaaagttgattttgaatacacatatgagaaatacaaatatcggaattacctcaaaaatttttattttattttgtaaatttaaatttcattgctacgtgtctctaagatgttctttattacttgatcttttaaaaaaaacaaaattgtttcaaaaagattaatttttagttttttatgcactatttattagttattatgaataaattttaaattttaaaataaataattgaatatcactggtttagaataatagaaaaacagaaatcacaaaaactaatacatttatgatcaattttaatttttttcttttattttgtgtgctttttctagaaaatcaactaaaaaaaattactgctcatcctaaaaaacatattattcattaattaacattaaatcatactaaggaaactaaaaaagaaataaagaacccagacatcatactaaggaggttaaaaactttggatgctaactttttttttttttgacccagacatcaaagtcttaaaagcattctcatggaaagtacagtgtccgcccaagttatatcacttcttgtggcaaattttagcgggatgtgtaccaataacggacaatctacgaaaacgcggaataaactgtgagataggatgtagcagatgtggtgctctagaagaaaccattaaccacacgcttttcttatgccatcctgctcgtcagatttgggcactttcacagatacctacggtcccagaaaaatttccttatgcatctatatatgcaaatttggatcatttattttggcgcatacctttagaatttgattcatcttcatttccatagataatttggtatatttggaaagcagggaataaaaaaatctttgataatgtggataaagatcctctagagatcttacatttggcggaaaaagagtcagacttgtggaagtccgctcaacttgagcttcacaacgaaaattttggttctttcaatttggaagatcgtaatcgagtgcggcatttttctttagacaacaattattctggatatcgttgttttgtagatggatcttggaaagataccgacaagttttcaggcttaggatggtactgtacatcatcaactggagagacatcaactttgggagctgccaatctcagaagaagtttatctcctttacatgccgagctggaagctttcctctgggcgatgaagtgtatgattggtgccgacaaccaagatgtagtttttcttacagactgttcagatctggtggagatggtgtcttccccaaccgaatgaccagctttctcatcgtatttggaggagttacagagcgataaggatgagttcacaaacttttctctatctttaatctctcgtagtactaatgttaaagcagattttttggcacgaaaagttcgtacccaaccgcttcatattacatttgtaaacaacattcttcaggattgactcgtttgagtcctaattaattttcggatgacaaagaaaaaaaaaaaacccaaattattaattccacagagcaagaccaatcttaagatacatttacagccgttggatccaactagtaatcatcaggggccgtagtccgtaggattaattactacgcggtttttgcaacatatgcttttctacaattgatgggtccccatgttcagaggtatgttcttccctactggaagtaccaatttatagtttaatcaaatttatttttttgtatcaaaaactttaattttgtaaagcctccacgcgaaacttaacttctaataaactctctcaattctctatttttttttcccaattatgcataaacttattcattctggtttctggttataaacagtgtgaaacaatatattttttctggttagagtgtgaaacaatataattgtactgaattacagtaagaaatcacttttttgtattttttttttcaagctatcagcttttcattttctttatttttttcctttttattttttatttattttatcaaatttttcttagcttttattaattttataatttttccgccgattttaggttaaagaaaaaaataaaaatacgaaaatatcagacgtcgattgaatctacaaagtttcatctcctcttctctctctctcaatctcaatggctctgttttaaaaagggcaaattagagagatttctccttcaataacaaaaaatcgccagctttatctctctctttttcacatcccatggctagatggtgacgacgattcacgcataaactagggttcccccacaaatcatcttacacgtatcctctattccttccttcctttctccgtcatcatcatttttcccaccgacaacaatctctcggagtttgggtattattacttctctcatcaaccaattgtaccactagatctcccagattccttcattatctctgtatgttccttctttccgaccaatctatctctgttttgtcagatcgggcttacttttaaaaatctgttttgtttctcaatctgttaataactaatgacgttgtagtagttaaagactagtgttttgttgtagcttgttttattagatctctttcgttattcttacggaagatttgatttattgcttctctttcaagacaaagtttttatttttatgaatgtctctgttctagttttaataatataacagatttgagattctcttttgtctctttagtatatttgtcttgtttttgaactgttgttgttgttgttgttatgtctctatctacttattcaaatctaaagcttcactctcttttttttgcctcttgatctgatttggagctgatctgtgttttgttagatcaataatg

SEQ ID NO: 5348 - DNA, 3000 bp, Unknown
  misc_feature (1)..( 3000): cDNA_ID_2686636_gDNA_ID_1620781_Annot_ID_167938 3000 nt of promoter + ATG
caaaacaagtgaatattgtaccagcattggtaagggcatgaaggagattagctttctgtttgagcttgagaccagcttcgaagtaatcgtgttggtcaagctcggactcagcgcacgtaccgtgtttctcccactcatgtgtccaaaacttcataccatcattgctcggacacgacaacgttggccattctctttgtaaatcgctcatcagatcagaaacctttataaaagttttcgattctcattagttatttacgattcttttcttgtggttaataatttccgaagtcccaaaatacaaaaactattgtgttataagttaaaaacaaacccgtaaatcatcaaatcgactgtcaggattacaattttgcggccatccaccggttttgtagttaggccaaagaccgtgaattccaaaatctgcagctggtttaccggtttgtggatagcaacaactatgtcttgaatcacaatacgctccaggccactgcattgcaacgcacatacacaaacataaaatttcaaagtacaatgataattcttgtagagacatttatcgactttaattacctgtaaaacgaagtagaagaaatcgaaatcttgggcgaaactttgtacgtagagttgttgtaacgctagaataaaaatgaagaatttcatttcctcaagatatcaaataatttgtgggaatcaaatttgtcgaaaaccaatgaaggatggatgatagataaatagtttagaatatgtttatataagtcatataacgtgaagtgtgatattttgttttgggtagagagacgtgacgtgtgattggtatatgtttgcttaattgtgttaggttagtatttcgtgcaagcattttattttcagctccaatgctttaaaaagtaataacgtaaggcaaacttttcatcatgcttcaactacaaaattatgagtattttgtagctccaattaacgtaacgtaaggcaaactttccagctccaatgttttagagctagccgaatattatgtgtctcagtatttataaaattatgagtattcgattggaaaaataaataaagaaactcttatagtattcacttaaagacctttgtttcttaaattttaaatatttaaatccacttaaagatccttgtttctcataaagtgttaaagacccataaaggcataaatcaaaccattgtcccgtctcggaaacgtacgtcaagtttcttgatgaggcgcatgttggctacttggttctacttctacagttacagactccagtgtgtaccgtattctatcaagttctgcatttatgcaagaaccttaggtatcacaaatatttgggggcaataaaattataaaaattccttacagtgcagcgatttatgtcacattttcagccaagaggttgtgtgttcgagttccctcaactacttctgctaatttttttattaaaaaaaaaaaactttagaccgcccataactttgagccggcaatgatcctacctcacaatcatactaaaatctaccaatgatccttaccatgttttggcgcttgaggtggatacgaataatccactagttgggttaaccttatagggaaggtgaagattgttataaagtttgtagattatacaatgaaaagtaagaagataggtccaagtcaaagtttgtatgattaaaacaagaaagatggtatataccatgcgttgctttccagaaaatggcttcaagaaagcaaagacaaagaatatcatcatgagcttgaccagggataaggaagaagatccattgacgtgtttacaacgacaaaaactagttagaagttagaacatagtgtcgctgaagttgtggaggaaatgcattttttaaacagatgcatagagacgattgaatatggcatcgaaacagtgaatgcaagcaacaaaggttggtaaactggtgaagagaaaggtaacagacgatataactttttttgtgaatgaattaaaagggatttttttttttcgtcaagaagctgaaatttcattaaaccgaaacttaaaccgatacataagttggtacaataagtgcataatttaatgcagattttgcatatgcatatgcacaaccgtttttttctctaaaaatgaagtgaaaagaaatttgatcgaaattaaacgaaagagcaagaacatcttggaaaatcacgtagagattctttgggaaggattctgagttgatagctttgatcagcgtttgcaaatctgaagcgaaggtgacttcctaaaaccgagttctaaggcattttgttgggctagatgaagcgccatggcttctgccaaaagaggagaagcaacattcgccactctaagggattcaaagcctctttatgaaatagaagttgacatatttttagttcaattaaatgaaatgaccgacgtgccaatttgtcatatccacataagtataaaagctaactaaacctccaatgtcaaaaaaaaaaaaataactggcttcgactagggatcgatccttggacttcgatatttcacaattctttgtaaccaatataccaaaggacgagaatgtgacaaccgcgactttaatttaataaatacgttatagtttggaaaccaccagcagagacggagagtccacttttatttcttccgctccgtttggtctgtcctcttcttcttctccaccttcgaaatctatcttctccgatacctctctatctatatctcttcgacgctgcaaattagccttaagcttctttctcctttaaacttttcgattattattccatttcctatctttttgtttcccccaaatcttttcacggaagcaaagaatacaattccaaaccctaatcccgatcatccgtctttcctctccggtcagtcttccgatttcctcgatccacctgattttcattatgattatacatatatactttcttctcgctcgtcaattttttcgttgctgtgtgaatttagattgatttgttttggattcaggtttcaaaat

SEQ ID NO: 5349 - DNA, 3000 bp, Unknown; identical to SEQ ID NO: 5343
  misc_feature (1)..( 3000): cDNA_ID_3015409_gDNA_ID_1620781_Annot_ID_167937 3000 nt of promoter + ATG

SEQ ID NO: 5350 - DNA, 3000 bp, Unknown; identical to SEQ ID NO: 5348
  misc_feature (1)..( 3000): cDNA_ID_2686636_gDNA_ID_1620781_Annot_ID_50355 3000 nt of promoter + ATG

SEQ ID NO: 5351 - DNA, 3000 bp, Unknown
  misc_feature (1)..( 3000): cDNA_ID_1828385_gDNA_ID_1620781_Annot_ID_50356 3000 nt of promoter + ATG
cttttcgattattattccatttcctatctttttgtttcccccaaatcttttcacggaagcaaagaatacaattccaaaccctaatcccgatcatccgtctttcctctccggtcagtcttccgatttcctcgatccacctgattttcattatgattatacatatatactttcttctcgctcgtcaattttttcgttgctgtgtgaatttagattgatttgttttggattcaggtttcaaaatatgagtaatcagaagaagaggaattttcagatagaggcgtttaagcatcgagtcgttgtggatcccaaatacgctgataaaacttggcagattcttgagcgtgcgatccatcagatttacaatcaagatgctagcggtctcagtttcgaagaactttacaggtcaatttctttcattctcttgcctttctttgaatcctgtagaaactggtaatgtttctggaacttagctaggtttcgtgttaatggaattatttgtgtatattgtggctcagaaatgcgtacaacatggtcctgcacaagtttggtgagaagctatatactgggtttattgctactatgacttctcatctcaaagaaaaatccaagcttatcgaggcagctcagggagggtcgtttctagaagagcttaataagaaatggaatgagcacaacaaagcgttagagatgattcgagacattctcatgtatatggataggacttatattgagagcaccaaaaagactcatgttcatccgatggggcttaacttgtggagggataatgttgtgcatttcactaagatacatacaaggcttctaaacactcttcttgatctagtgcagaaggaacggataggtgaagttattgatagggggttgatgaggaatgtcattaagatgtttatggatttgggtgaatctgtgtatcaggaggattttgagaagccgtttttggatgcgtcttctgagttttataaggttgagtctcaggagtttattgaatcttgtgattgtggggactatctgaagaaatcagagaaacgccttactgaagagatagagagggtagcgcactacttagatgccaagagcgaagagaagattactagtgtggttgagaaagagatgattgccaaccacatgcagagactggttcacatggagaactcaggtctggttaatatgcttctgaatgacaagtatgaggatttgggtagaatgtacaacttgtttcgcagggttactaatggtcttgttactgtcagagacgttatgacttcgcatcttagggagatgggaaaacaactggttactgatccggaaaagtcaaaggatccggtggaatttgtacaacgtctattggatgagcgggataaatatgacaaaatcatcaacaccgcatttggcaatgataaaacctttcagaatgccctgaattcttcattcgagtatttcatcaacttgaatgctcgttctcctgagtttatctccctgtttgttgatgacaagctacggaaaggacttaagggtatcaccgatgtggatgttgaggttatccttgataaagtgatgatgctgttccgttatttacaagagaaagatgtctttgagaagtactacaagcagcatttggctaaaaggcttctctcaggcaaaactgtgtcagatgacgcagaaaggagtttaatagtgaaactaaagacagaatgtggctatcagttcacttcaaaattggaaggcatgttcactgacatgaagacttcagaggacacaatgcgtgggttttatggcagtcaccccgagctttcagaaggacctacacttattgttcaggtacttacaactggttcttggccaacacagcctgcagtaccttgtaatctcccagctgaagtttcagttctctgtgagaagttccgttcttactaccttgggacacataccggtagaagattgtcctggcaaacaaacatgggcacagcagatatcaaagccatctttggaaagggtcagaaacatgaactgaacgtgtcgactttccagatgtgtgttctcatgttgttcaacaattctgatcgactcagctacaaagagatcgaacaggctacagaaatcccggcagcagatcttaaacgctgtttgcagtcgctagcttgtgtaaagggcaaaaacgtgataaagaaagaacccatgagcaaagacataggagaggaggatttgttcgttgtgaacgacaagttcactagcaagttttacaaagtgaagatcggaactgtggttgcccaaaaggaaacagaaccggagaagcaagagacgagacagagagtggaggaagacagaaaacctcagattgaagcagccatcgtaaggatcatgaagtccaggaaaatactagaccacaacaacataatcgccgaggtgacgaaacagttgcagccacggttcctagctaatcccacggagataaagaagagaatcgagtcgctcattgaacgagatttcttggaaagggatagtacagaccggaaactttaccgctatctagcctaaataagttgaataccacaacccaaaaaaaaaaggctttactctgtttctttctttgctttatttccttatgtttgatgtaaaatcttttgaactgtacggtagtcggtaagaacgaaccaacacagcgtcactaccggtttaatcgaatatacatttgtttccttttcttttgtctttcatcagataccgtatgtgatttcagcttctggacacgttgggccggctcgaggccttttaaggcccattttaaacggttaagagccaaaaaaaacattcgcggctaaaatttcaaccaggcgtaaaaaaatcccgccaaacgttggcaacgctttgtttatagcgttttcatagcctaatcggttccattgacatttctaggggaaaaaatctctcacagtgtctgactttggttctttgtcttgtaacaatcgccggaaaattaaggat

SEQ ID NO: 5352 - DNA, 3000 bp, Unknown; identical to SEQ ID NO: 5347
  misc_feature (1)..( 3000): cDNA_ID_1828381_gDNA_ID_1620781_Annot_ID_50357 3000 nt of promoter + ATG

SEQ ID NO: 5353 - DNA, 3000 bp, Unknown; identical to SEQ ID NO: 5346
  misc_feature (1)..( 3000): cDNA_ID_1828377_gDNA_ID_1620781_Annot_ID_50359 3000 nt of promoter + ATG

SEQ ID NO: 5354 - DNA, 3000 bp, Unknown; identical to SEQ ID NO: 5345
  misc_feature (1)..( 3000): cDNA_ID_2992596_gDNA_ID_1620781_Annot_ID_50360 3000 nt of promoter + ATG

SEQ ID NO: 5355 - DNA, 3000 bp, Unknown
  misc_feature (1)..( 3000): cDNA_ID_1828375_gDNA_ID_1620781_Annot_ID_50361 3000 nt of promoter + ATG
ttggtgatcattgcgacacacttcggtttgatgatttcacttcaacaattaatgagaaccatcgtcatcatcaagacctgaaacagaacatgacattgctggagagttattattcttctttatcgtccatcaatagcgatttgccagcttgtttctccagtacaacctgatgtatgtggatagattttcccatctctgccttcttggcttgcttttttcaagctagggtatttcctctttgtaggctttctctttcactaaattaaatcgtttattaattatgcttccttgagtttttatttttcacaagcaactttgctttaatgaagaaggcatgaggtaagtcaagatgaacaagagaaaaactgaatcgagttttactatattcaaaataaagaccagtaagtatattatttctggagctgacttcattaatcgcatacgagactgtcgttgtagaattcccaaaaattgaagcatagttaagatttaagactcaaaattgctattccatagttgtgtcatgacgctgagaacattaaagtgcaagcttgatttagcctccgagagattcagaaatattatattaaccaagaaggtaatcacaacagcttatgtgatatgcatcaacaatagaacattaaagatgaattcaacaattccaaaactgaagagaagagaattgtcgacaaagttaagaactgataacagaatacaaagcttaaaaattggtcgagtaacatagatgtcctcacatgactgcaccaagtcctatcacttgaacatagccataattccaaaacagagaagaataaaacataaaagcttaagccttgggggctactttctccttagccttttggagtttcaacactttcttcacaatcttttgctcttcgacaaggaatgcccgaatgatcctgtcggaatccaaaaacaacattacgttaaagaacaccaaatttattgtaatagaaagatgactcaagtaagatggacaacaaacctttccctgactgcagaaccagacaagactccaccgtatgctcggtttacagtcctcctgtttcttgataatcttgacctcttgtactcagagggcctcaagtgagggatctgaataaacaaacaaagttattcacataatgcaaaaggaatatgccattgcataatcaaacatatatagttgggaataaactgaaaatttatgccaaaggtggatagcaaatccttatgtaatacaaggaacaacttgaaagacaaagtggcaccgacaatttagcttatgatttatgttatgtactgatgtgggatttatctaatcagcacaagaccgtcaataagcacaatactattaactaagtaacatggtttcttgaaataagaagacatgcccattaaaaatgagactgatcaatactcaaaacattctaaaacactcaatctgattgatttggttatacatagccatcaaattcctaaaaaattcaaactcttaactctatctagacctcaaatcaagactctagatacaagaaccatgtaaaccaaatcacacgaagccaaatcgaaatcagaagacttactccttgaatacgcttgccagtaacaggacatttggggccactagctctcttctttgtggtttgatacaccaatttacctcctgaaatcaacaatcccaacacacattacactatgaagaacagatcggtgattagagaattatgagactaaagcagaggagattgaagatatcaaggaagaagaagaagaagaagaaagggacctggagtcttgacgatacggtgctggttcgatttggtggcgtagctgtgtcgcgaccggtaaacaagacgctgcaccattttcgcctccttttctcttttagggttttcgtttggaacgaagaatataagggtgagactccaaacctaaactaagactacaactatatgggccttttctcattttggtctttaattatgctccagttaaaggcccatgtacaaataattaaaaaaaattcaacttgtaaaaaccaattctattattagctgcaattagaataagtatcgtttgtatgttgtagtgaacagaaactagaaacattattaccaatttttattttgattttttaagaaatcatagatgcattaaattatacgtagaactttaaaaagattaattagtattataatccgtttagtcaaaacacattcaatttattttatcaaatagtgtaacaacaaaaaatttaaattcatggcacgtaaaaacataatcgatacatttacaagggcgtggtgcaagcaattagagcaagccaagtagagaaattaatcaaggttggcggcaaaattgggaattggaaaataaattcatccaaaataacaaatggaaatataaggaccaggctagaaaatttggattttcaacaattttgtttggtttgatgattagatttttaagggaaaaaactaacaattatgtaagaatgagaatcgattgatatattttatgtgtgtctatattgcagttttactttaaaaattgggcaactttaatttagtttctttttttatatgcattaataatatatatatatatatatatatatatttttttttttttttctttgaacaaataataaatatttgtataataattgtttttttttgaaaaaaagctttataatatagactcacttttgtgtcacagccagcgacgagaaaaaagttccattggcgtctagctaggtatccggtatcccacatggccacatctatgggttgcttaagttgttggtcttttttttgggatattatacacgacgatgagcatatatcaactgttccagaaaccgaaagttgtcagataaacgaaactagaatctgtgcttttcctaacgatttgctcttgcagatcttgcatcacgtcccaacaaaagaggcagtcgccacttcaatcttgtctaaacgatggcgttatgtctggccg

SEQ ID NO: 5356 - DNA, 3000 bp, Unknown
  misc_feature (1)..( 3000): cDNA_ID_1807959_gDNA_ID_1620782_Annot_ID_50369 3000 nt of promoter + ATG
gattttttctgaagtcaacacataattgatgattttaatcacaaggtataaagtttatgttttaaagcaccgcaaattgcgaagtcgtgatttaaatgacatttttcccattataaaaaggaccaaaatgattttgattacgaatgagcaggaatcttgatttatcagtcatccaaaattaaaatggttatccggtttactcggattctttattttgaagaattgaaactttaaaatgtttccaaaattataaatattttaacattatgataaagttaaaatctttataattttaaaaactttttctaaagtttatctttaaaaaagatttaaatttttttataattttaaaacttatgaagttttaaaaattatagattgaattttacaagaaatttaaacattataaatatatatatataatatattaatacgggacgatatattacaggagaaatcttaaatataacaatcaaaattcaatgatgaattttgggtcgatattatatttttttgaagtttttcaaattttataatattaaaatttataagaaaatgataaaattatgtttaattttacggaactaggttatatggttggacggatttgggtggataataatatggaatggtatattacgattgtacaatgtccgacgttgcttaaaaaattggacaatggttcaaagccatagtataaaaaggaccaaaatgatttcgattacgaatgagcatgaaatttgatttatgaggtgtccaaaattataatggtttgttaactagggttctttattttaaagaatgaaactttaaaaagtttcaaaaaattataaattgaattttacaagaaatttaaatattataaacaatataaaagatattaatacgggacgatatactacgagagaaatcctagatacatacagcgagagaaatcttagatataacaatcaaaatttaatgatgaagtttgggtcaatattaatcttttttgaagtttctaattttataattgaaatttataataaaatgacaaatttgtatttaatttcacgggatggggttatatggtgggacgggtttgtgtggataataacacatttgattcttttataagaaaattaaatattataaatgtttatattttaaattttatactacaagtgaaattctagaattgactggtttgggttgataataatttgcgatagaactaggagtgaaatcctagaatgacaatcaaaatataattatataattaaatattaccacgggtaaaattctagaattgacggggttgagtcgatattaatatgggatggtgtactacggatgaaatctgaaaaacaacaatcaaaatacaattatacaatattaaatatttaaaaaaataaacaaatacaacttaaaactttaaaatttgagttataaaattttgtctcgcggtgtatcatacatttaaatcaaacaatagcataaatttaaagatcatcctaaaaaaaattcaattattttttatttaatgaaaatataggcctgcggtataccgcggattaatatctagttgtataaaaacaaactgaactatgtttccctaataaataaataaataaaaaaaaactgaaaaaaacaattcctgaacaattttacatccaattcatagtataacgacatatccaataacacaatttgaattctaatagtaatctctaatacacacttttttatttatcggaatatttttaaactaaattttaatagctacacgagataattgatctattgaagtattaactactaacatagattttaaggtctagttatttcacataaaaactaagttgtccaactactaacgcaattgacaaccacaaccaacaccaatattaagtatgattaccgaccaaatttgaattttataaacatatagaattttttttgccaactcataatcatatttttatatgtattttaatataaggtgaatgattatcttttgtttcatgtcatattgggcataacaaaactagtacaacaaagttgtgtgaaccactccttttatatagttttgttgttgtcttttcttccaaggaagattactagacttagacaagtggattatatatatatatatatatatatatatatatatatatatatatatattaactaatctttcaacacttgtggattgataattattcatacttttaataaaaattccatagttcaatgaatctgtaacaaaaccaagaagtgacgtgatatacttttggaactataatcatattgtgagctcaatggataagaattgattgtagtaaatgatgtcggcagttacaagtgtagttagatatatgcaataactcaaatcggacatgaactcattttaacttatctaaagagaccaccgacgaatcattttgggttcacaaaattgtacttcgatttctaagcctgaatgtgaacgcacgtttttgaatatttcaacacgtgtttcatatttcattacatgcattataacataaatattacatctttgagtctttaactagttgaccaacaaaaaaaaaaactttaactaagtctagctagttttgttactacatatataaaaacaaaaccgaaataaatatttaaaatttataatatatttgtgtggctaaatcaatcaacgtgtcatgaaggtctaattcaagttggtaaggaaatcttttgtttatgtccatttcccacgtgtcactatttgtatgacggctagagaaagacatgttgaattaactagtgactccggattatataagcaagcatctactaaaaagataggaacaacacaatttgattacactgagcaacacaaaactggcgaaccaacgtgactctaacgaagaaaccggcaatggccagtatcactacaatgccgaagaaataacaagaatcataaacgagccagaatattatcccccgggttacaacttgtctaccaccgcaatttcaaac

SEQ ID NO: 5357 - DNA, 3000 bp, Unknown
  misc_feature (1)..( 3000): cDNA_ID_2144760_gDNA_ID_1620782_Annot_ID_168002 3000 nt of promoter + ATG
gatgtagttacttctgttttctatatagtccttaatttgtcacaaaaaaagtctttgaatagtggctaatatttgagaccgaaaaaataatctcaaaatgctggcccttagcttttaaagttttatttttctcttttaagactttggtttggttttatattagagaatttccataaataaatgaaaaaagatcttaatttttcatctccagtctctactttggatgtttaactattttctaacatattcatgtgcctttttagttatgtaatatttaataaaaaattacagtgtttaactattttctaactattttcatgtgcttttttagttatgcaaacagcaaaccggagtaaaaataaagcagatcttctttgaaacatcaaaccggagttttcttattttaagttgtaacatcaaactggagttttcttatcacttgtggaatctaatggaatgcttcattagctttggacactcttcttcaatcatgaaaatggtacaacattccagtagtagatgctttcagatcaggtagatggctaaggggtaagctctctagtttctcaaatgggatgataatacctacctgcccttcagtagcttcttcttccttgattataacctttagttgctttgaggaacaaacaacagacaagtcaaatcctttagaccattgccacaatactttgatttgcttaattccatttcgtaatcataacccatttcgtaaatttaattgttaatataagaaaaatatatgattttggcattcatctatggccaattttgctgtgaatacatacttccttgtatctatttaacaggtaacacaaatcatataccaccgattcctcaacttaagcaaacggcagatcacaatcggaatcgagacaccaaatgtgatttctgaccgtaacataaatcagtcagaaggtctgcgtatagtaagcagtgagaagagagtaaaagtacgtttaccgtttgatccttactcgattcttctctctcgccattggtcctagtcaagctgaaatcaactggactcctaaacttttccaggtaagggcaaccgcgagtgaggaaactccatgtgacttgtgagatgtctctgacacaactcagaatctgcctagacttttctttgatatctctgtgtgaattagaggtttcaagcataagacatttcgtgcatttgacatcagattctacagataattccatcaaaagcttcggggccaaatcaaacaataattctccagcatttttccagaattttgctgcagatatagcaaaagaacgttccgcacaaaagagatggtgagaaacaccagcaaggaataaagagtaggctgcacttatcctgctcatgtcacaaacaatgccagtttcagaatcaatcgaacggattctgtaagcagtagctagagtaatgtacgcattcagagcaacgtagtgacacgcatgtaaccgcagacaatgaggctgtgagtcttccttgaactggatgccgtgatgcagaacactctcaatcatctcacaacatgttttaggatcgatattgtccgataaaaaatcatctatagcttcttggatataatcattcatctttcccactgcttcatctttgttagtacttccatcaaagtgaccaacggttgtcttttcactctccaacgtaagaactccctaaatggatgcatcatataacgttaactattttaaaccacacacaactaactcaaactcagccattaataaactgaaatttcactagcttttgatgtgagactacaccaaacaacagtcacaattgatacctctaaaatagagtccacataagctggaggtgaagctgcacatcgtccacagttacacataaatcgatatttcgaccacaaatctgactgtctcaatccctaaatggttaaaaaggaatacacttttaataagataaacaatctagagagtgatgatatctctaaagcacaagactttggacatagaacaaaccgtgggttgaagtaagtcaatataagatacagtgatctcttcaccactcttaatcctcttgatacttctaacaatcaactttggtccatttccattaccactgttcaaactagtaccacaaacttgttcctgcaattctaagtttgacgatgtttctgtgttggtgacatgaacatcatgatacgacgtcctgttgttgacgaaacggtaacaagagtttggagagcagctatggttaatccaagagaagcttgaattatagagagcgattccaagagctagtccgttgctatcgtgcacctcaacggcgtttgttagcacagcacatatagctgcttcttccaactctgtgtttttccggtttgatctaataacggtggctatgaagttggcggcgtggtgaatagcgacggagatggaaggatcagccatgaggaggtggtgattagtgagaaggttgttaagacggtggggagatgaggaagtgtcgacggcggtggaattgaggagatggagagatgtacggatgtcggaggggaggattggtgttatctccggtgggaattgaggggaattggtgaatgaatcggtgagggagcatgcggcggagcagtagagaggttgcggcggagatggggggagaagggagaagcaggaggagcagtgagaggagaggaatgagtcgtagagagaggaagcgagtggagagagtggcggaaatagatctgtgcggatttcgatatcctccgccgcgcgtatctccatctccgccgtatgtcaccggtttgatattttgccggttttactatgttagctacgacgtcgtttaaatggagagaaagcaaattaaacgacgtcgttgtagattgtgttggactgttggtaacgttagtccaaattggagtttatgaattttttagatttaaaaaaataaataacgtaatttaatattgttgtactatttcggttgtctccggggaagaagag

SEQ ID NO: 5358 - DNA, 3000 bp, Unknown
  misc_feature (1)..( 3000): cDNA_ID_3076769_gDNA_ID_1620782_Annot_ID_167992 3000 nt of promoter + ATG
tcgaaagaaatatttgagtcattggtggatttgtttctttttcatgaacaaattgttgtgtgcttcgtataaattaccaacaatctgtataaaatctaacatcgtttgaactgatgtaccttttgtttttctaatatacttgtacttactgagatttaagtttaatgatattgtctatgtgtttatatatatacacacataaatacatttccatatatatttttaatacatttccatattatttaatcaatattcaaaagtatgtgataagttttccataaaaggaaagatacatttaatatttttatttattaatttggacataaatttggtcaaaaggttctattctttatttttttctgatttagattggtttttcatgttaattcattattaaagaaaaatacaaactttcattctaattttatcaaataaattttatttgtagatcgtaaatacacatagatgagtaaaaaaacgctataagcatttgttaatgttttattttaaccaatattttcaaatgcccatatggcattaactatcttaaaaaattagttataaaaataagattaatgactttaatgggactttgcataattaaatccatgagttgaaaatgtttaatgggactttaacagcatcacttaggcccattagcccaatgcgacgtcacctctagttgagatcgagacaaagtgaaggtcgacgatttcaaggaagacctaggatcgaggagagaattgacatgactagtggacgaagtttgaatgacgatggtctaattaaaaaagaggcaacccctagaagagataattgtctattagctctacaataacacttaagcaaaatactctaataatacattgtaaacatcaatatacttgaaactaaatgcattacctatcctatccgaaatgaaggaaacaaatagaggtacatcacgatctaccaactgacatgaacttttgacgcctaacctgacaaacgtctcctaccacctaatcagaagttccgttgaatgctcttgggcattggttgaatgaagccaaaccctagaaagagcaaaaaaactcgcctccctagccctaaagaagtgaataggcctagtctccatggaactaaacttatggggaagatcgacaaaatcagtcatcacaacgacccaactcttaaaaggagagtcataaattacctcctacgactacctaaactttgcagagacaccatagaattgtcgcaaccaaaacgagtcgactttatcatgggaggttcacagcttggtcgtaacatagtaaattcaatcaaagcctactaacgaaaagtatattcgatctctggagggagaaatccctcgcaaggacccaactacgagatcacattcaaggaaagcaaagaccgacctaggcaaaccacatgatgactctctggtaattagaactcttagtataaaacatgatagatgatcccgagtttaaccttctgacaatatgatggcaatccactttgatgtgtttggtacgttcgtgccacacggaattggaagcaacatggttgtcacaatgcatgataacgaactgaattgtcttgactccgagatccaatatcaatgcatttacccaaatgagctcatctgttttgccatagattggtaatcatctttagcactacaccttgacaataccttctggtttttgcttctctaagtgacgaggttcccatcaacaaatatacaatagcaccagctttgatttcctatcaatcttgtgtgcggtccaatccacattacaacagctaacacggaatttttcatctaaaacaaataacgttaaataaaagtaattaaaaattaaataaaaaatagaaaaccttcttaaagtactgacacgcataatgacataatgacacaatgtgattatttagtaaatttgtcaatcaggaaaatctacataattgcattagaaaacgcaaaaactcagaattcgcattttcgcctaaaattacaattaaaaatttattatgcaaaaaaatagttatataattgcttatttatataataaattgttaatattctacacatactaaatattagcaattataaaagaaaacaattataaatgttaacatagaaattatatcattaataatatatataagaaaacattttcacaactttttaataaattttaataatcttatattttatcatcaaatattacttagactttattaaaattgattaaaaacattattttctttattaagtataataaaaaaaatataacttaatatattttattctgtcattctggaaaatgtatctaatcaacatactttaaaaataattgtattttataattttttattctgcaagttttcattcaacaaattttattctaaaagttatactattatgcaatgttgcaatcagagcctatatagttattgtgaacgaaagttgaaaaaatgaaaaaagggtttggctaaaagagacaagaggcacgaaaaagagagaaaaaaactcgatagtataagataaattagtagatagggttaaagcattgacgacgagacatagacgagagaccctctcaaatctcaagctcctttccttccttccttcgatctacactctcagattctctctctctctctttcctctctctttgtcttctctcaggcaagccaaaatctctgtctctctgtctgttttcatctctgtctctgagtatctgtttcctagcgatttggagataaaatgttttatcccttgattcgattcctgtcatcgatttcttccaatgttgtttgattgatgtttgtgttttgattagtgtcaagggaaatctttttttttgtttcttctgaatctagttcttttgaatttagaaattgaaaaagtgttgattttgattctgtgagcgggaaaaattgattgattgatgtgtcctactgtcaatttagtttaatgggtttgtctttgtttcaggttttgtaatg

SEQ ID NO: 5359 - DNA, 3000 bp, Unknown
  misc_feature (1)..( 3000): cDNA_ID_2144735_gDNA_ID_1620782_Annot_ID_167991 3000 nt of promoter + ATG
tttcagagtattgatgaagataagctattcaatctattttctctttacgggaacattgtaaggattaagcttcttcggaacaaacctgaccatgcccttgtccaaatgggcgatggtttccaagctgaacttgcagtacatttcctcaaggtttgtccatgtccctttatttgtgcatttgagattgtacttgggacaagttccgagttacaaagatgtgaaatggaattgttaatttatgcaaagttttgtttcttttgcagggagcaatgctgtttggtaagcggttagaagtaaacttctcaaagcatccaaatataacaccaggcacagactctcatgattatgtaaactctaacctgaaccgcttcaaccgcaatgctgcaaagaattaccgctattgctgctcccctacaaagatgattcacttatcgactcttcctcaagacgtgacagaggaggaagtgatgaaccatgtccaagaacacggtgcagtagtgaacacaaaagtgtttgagatgaacgggaaaaagcaagctctggtacagtttgagaacgaggaggaagctgcggaagcattggtatgcaagcacgcgacttctctaggcggatcaattatcagaatctccttctcccagctacagacgatttaaaatcacgaaagacctctctctctctctctctctttctctatctctctttcctctaataacattagggtttggtgaggattaatgaatgtatgttgcttttaacttaaaactctctgctctttgttctgttctctctgttttttctttttaacgtgttggttttaattgtttgtcttgatttcatgggcttaacatttaatggtaataaagacataagaaaaaaaatggtagagacaattgtagtggtggttgtataatagtgtttctgaaacttcattttgtatcctttctcatttatattatgtttagatatattctcatttattttcttccaagttattgttcataaatttttattatatcagattactagattataaaagattgttcttctatatgaatcaagtttattgtttttcttagttgtatatattgtcttaatgagatccaaatttaatgtcacacatgtaatatctgcataaatgtaatgtgatatgcacatatatttcttgcaatatgcatatgaatggcatgcatgtatctatatttgagatatgatttgtctataatcatatctaatttttgttaaatcagatactacaagaaaaaaaacaaattcttgtcgcaaactcataaaattaagttatatttttttttcctgtagatctgttgttttagtatattatattgtatagaattttaataaataactaacttttgaaaatacaatttttttacaattaatgtaataaaataggttgactaaaaattctctaagaatcctaagtcggtgaaattagttcaaagtattctcgtcgagtgaaccagtgagattcaaatactcaagaccaaccttagatacttttctatagacttacgagacgccgcttgaagaatttcagaatggagatagaaatcaagttgcgttcgccctagttttctcccagtcacaatttacgaggcgtcgcttgaagaatttcagaatagcattccctggccggcgaagcttctccggcgtccctccctcctaatcggttcagtctcaactctctcgagctttccagcagtcactaaagctcttccaacggttttcggtgagatttctctctcttgatggtttgtcggaagctttctcctcctctcgcttccctttgcctgagattttctccggtgttgctgcctgattttcctgctaaactggaaccaccggacttgctaacatctcaaatctgtctcgtctcggttttcctgtctacttgttaacaatcttcaatgcctattggtggcatatccttcgccgtcagacgaccctttactgcataccctttaaaaaaaataagttaaatatatatacgatagttttattctatttattcttgagcaaaatagtaaaaacaaaaaaacattctctaaattttattaattaattagtggaatcaatgattttataattttcaacactaagaagaaaaatatgaagaaacatttgatttagtctagtttcttatattttgtttacaaccaattgcatcctaacaagttatctatcatctttttctcatcttttgtttcttaagaattcccatttactcatttgtaattgtttccttattaatttgttttctttagatactttgagccctttaaaattaaggggtcttgtaatcccattaaaattgtgttttaagaaaattaataatgtttagtatgtatatttgattagattttggggaataattagaaattatacactttgatcctatgggtgtatatgaagttctgcgtatactgatgatatctgatattgggtaaaaaaatcaagaaacattattcttggtggtttattgctagtgactttaatgatttgatgcataatgattagaagtttggtgctagtaaattccagtcatctaaaggaactcttatatcatgaaagagttaaagaactatcgttatataatatttgtggtcgaaggggattcacccctacaattccatgttatttctcctagtacttattttgcaaaaaatttctaaaaatgtgagcccgtaatatttttattgaacacggttcattaattttaccaaaatataattttcattcttagaacgaatacttagtttggcaagaaaagtttccgacaaataaaaagaggttacataatttgtttttaaataactttctatgttgttttgccattaaaaaataatgagcaagtgcagtatcacatctcatcgtttcactattcagctccttatagccaacctaacttgcaagattattaaactattttttttttttgactattgttccaaaatgagcacaaaatcaaacccaataaacatg

SEQ ID NO: 5360 - DNA, 3000 bp, Unknown
  misc_feature (1)..( 3000): cDNA_ID_2992614_gDNA_ID_1620782_Annot_ID_167989 3000 nt of promoter + ATG
gtgtctatgctgactaatgttgtctctggtgagaccgaaccctcggcatctgcgacatggacgatgggtcataagagagaaagagaagagttttctttgcctcctcaaccattgattaccggttcagctggtatgcatgtttttctaaatcgaatttttttttgttgagaacactatactaaccaataaaacattctttaaccaaaaacaaaaatcaataaaacagtgactaaagaatgtgaaagctcaatgtccttggagaggccaaaaaaatatagaggagtaaggcaacgaccatggggaaaatgggcggcggagattcgagacccacacaaggcgacacgtgtatggcttgggacattcgagacagccgaggccgccgcaagagcctatgatgcggcagcacttcgctttagaggaagcaaagcaaagcttaatttccccgaaaatgttggaactcagacgattcaacgaaattctcatttcttgcaaaactctatgcaaccttctctgacatacatcgatcaatgtccaactctattatcttactctcgatgtatggagcaacaacaaccattagtaggcatgttgcagccaacagaagaggaaaatcactttttcgaaaaaccatggaccgaatatgatcaatacaattactcctcttttggttaactaacatattgtcaacgctttgtatttctacttattcgatctaccaattttttctctcccaatacaacttcagtctgattattgccttcttagatatgtcttcgaatgttatgactatacatgggtgtatataaaatttgtgatcaaagtcttgtaattagcgtgtgattctacatctttttcattagaaaaattgggttttcaaaattactaactcacgtgatcgcaacacatgagtataacataagatgtcgtcactaaccaaatataattttgttaatatatttaaagatagaatcagaaaatttcttaaaaaaagaagtatatacaataaataagaaattattttgtttatatattcaaactctttttattaatatattaaactattaacctctttctattaattttgttgttcttaatatattaaaaaaaagaagttaaaattctttattgtatcggaaataagaaaatgaaatttgttaacaaactattaaactaattttgttattttgttgttgttaatatatactccaaattgaattagttaataagtaaaaggctttagaaatcttttccaaattgtcaagataaatgaactgtaatcttcagaatagagaatagtggcttacaaagagctctcaaaaaagttgcaaaaaaaaaaaacgtaaaaataaaaattaggtctctatgggttttatacccagttaaataaaataagttatgaaactggataaaaaaaatctaatcgtagcatcaagaactggactgatagatctagtaggtggaccgcttgaccccaaggtgtttgaaaaacaatcttcgacgtcgtgacacttagttaatcgatccactctttgggatcaatcaatcccatcccttctagaaatctggtgctcgacgattaaaacccgctctttgtgaatttggcacttagatgggtgaaggttggaccgctcggtcccttataacctctcaaccacaaaggttcagtcttatcgcatgaaatcaattagtaaactacaattcatcctaacaaaaagaaagctatagtagtccatatattatgtagtttttgcttatgagtgcacataatgatgataacacaataaaacatggggtttcatacatgagcggagtaagaggtgttgtactagactaaagattagtttagcgatttagaattagcaaatagtgttaaaaatgacacaaagaaaaattttgaatgtataatctaatacatgattctcaagcctctaaatgagaaatattaaatctagattaagtttaaatatataaaatttagcttaaatctaaatttcaaaatgataggaactactataaaatcatatagtaacaagatacaaaaaaacatccatgtgttaccttaagttatatttattccctttagtaaccaacaaattttaactttctttcacgacaaaacttttgccgtctacaattcacacacacttccaactttgaagcttacatacaatacggtggcagcagtaacacacaccattatactacaaacatcgataaatttttatcaataaccatatcgatcatttgacaaaaccacccacggagtaaccatatcattataagtaaacataatgaaatttttgcttcaagtgaactgtgaacatgtgagtgtgttatcggatttagctgttgtcttttctttttatacgaaacaaaaaataaataaaacctttatcaaatttgtacaaacctctgggctttatttaggcccaataacaaaattcggcccatatttgagaattcacaaaacctagatactcttactataaattggaacatcattgatctaatacaattaattactgtgttaatattatttatactcaatctgaaatgtctttttttagctgtccaccagtttccaatctttgaaatacgaaacaaaaaataaataaaagtataaaacctttatctaatttgtaaaaacatttgttgggctttaggcccaaaacaaaagtcggcccatatttgagtgttcacaaaacctagatactcttactataaattcaaactagggttttaaagctcatttctctcttgcagtcctcatcgttggagcttagaagccgtcggcacaaggttcgtctttctctcatccctttcctcttcctttgcgtgaattcaccagaaaatgtatatctaccttagcgagtctgtctagtttagcgaatctaggataatctccggaagacacttttgaatcatcactgtttttgatctctgtttctttctctaattgtgttgttgtattactgttgatgtagaagaagaagaagaaga

SEQ ID NO: 5361 - DNA, 3000 bp, Unknown; identical to SEQ ID NO: 5356
  misc_feature (1)..( 3000): cDNA_ID_1807959_gDNA_ID_1620782_Annot_ID_167988 3000 nt of promoter + ATG

SEQ ID NO: 5362 - DNA, 3000 bp, Unknown; identical to SEQ ID NO: 5360
  misc_feature (1)..( 3000): cDNA_ID_2992614_gDNA_ID_1620782_Annot_ID_50370 3000 nt of promoter + ATG

SEQ ID NO: 5363 - DNA, 3000 bp, Unknown; identical to SEQ ID NO: 5067
  misc_feature (1)..( 3000): cDNA_ID_1828450_gDNA_ID_1620783_Annot_ID_50373 3000 nt of promoter + ATG

SEQ ID NO: 5364 - DNA, 3000 bp, Unknown
  misc_feature (1)..( 3000): cDNA_ID_2993390_gDNA_ID_1620783_Annot_ID_50374 3000 nt of promoter + ATG
aaaattttaatggggccatcttagccgtccaactcctttttctttaatcagcttttccactggcgtacctttccagatggtgattacgtgtctataccaatctttatgaaataaaaattagcaatttggttacaaattcaaaaatagcgatagaagtttgatacaaaattgacacttcaatttccttccaataccgcagacaatatgatccgtccctttgaatacgatagtccttttcaactttttaacatagtacttaatttttatttttgacatcacatagtacttaattaaactactatatttatcatgtaattgagtatcatttgtgaataagatttgactctctttcttttccggaaaataggtccgatattttcttttatattcttgatttaatgaaatggcattttctaattttaaaattaattgaacagtttgaaaaaaattaacggaaaatgttatgcactgcgttcatcactttttggtgaagaacttacaaaacattctgaaaattttgaaaatcctattaagtttagataaaaatttataaagttttcgtagttttcaataatagtaataaattcaacttaatcaacaattttcaataaggatgaagaaaaaatattaattataaaatgaaatttttaaaaatttgcattgaacatccttctcataaaaccagttaaaatttttttttagtaagcatccttttcatactttctaatagacagaccctgaagagttctacaccaagacgaaactgcggtgaggattttatctgacggggcaaatcagaccggctggtatgtggacccactttcaaatggaatcatacgtggcatacagtcacgtgtcagcgatcggaaacaacttgtcaccacgtcattatttctgactcttatgggtcctacccaccggcctattacttgtcgtcaactgtccacgtagatttttaacatggaaaagatcaaaaactgtaatttaataacaaaatcagtgacctaaataaaatgctgggtaaaaaaatagaaatctcaaagccagaagaaaaaaataatttcaggatactggatactcaaaataaagaaggataaatatatatagtttgttataataatgcgtacaattataaaatatttatataaatgtaaaattatatatagaacatataaaagttctatcgtatacttttaacaagcttataattaagtggatatgaaaacgattaattcacgagtgactatgactcactaaaatgtcattttcattctacccaaattcaaatttctgtaattggttccatatatttcccttacatagaaaatcagatcactaataactaatatttacctctatgccgacttatgaatatattgtggtcaatttcatatatatgtttcactggatacaaacaaacatatattcatatataaagtatgtactattcgctacttttgcggttttacattccatgtgatatcttatctggatcagtaaataatttgctttgtacaatgttaagcaaacgcaaaaatccaaatgctagagtttataataaggatccatttatgatatatcgtgttattttgttagttgtttacactttatatcactcacattctatctcaattcatacaaaaagacgtagatattaattaattctagctttaaaatgatcaatctatatagcaatctaagaacagttatcatctgtgacaccaacattcttaataacattaccgactataagtgaataaatgatcacctaatcttctatgaatgataaaaaattccaaccaccactttcaccgaaattgttactcgagggatcaacttctttttgtgactaatttgaggctaaaactagtaagaagaaataaacaaacaaactgtatttctatcaaaaaaacaaaaccaaaacattgtgactctttaacactgttttaatgtcttggtagaattcgctgatgctaactaaggtttaaacgttttaaaaaaaaagaagtttaagttgttaaaacattaaatcgaccatgcacgatccgagatttgatatgattttttagtgggaagaattgatgaaaatgatttgatattgttcataaacatgttaatatgtttaatatcatgaaaaaatattgttcataattaaatggcacaaagatttacctattgttttgagttctattttagccaattcaatcggtgttcctatattttaaccaaaatacaaaaaaatcgtatttatgtcattatattgttttcatgaaacatattttttcatatccaacctcacttatgataatcagtatctaacacgacatctagaattatgagtttctatacatttttataattaaaatttcagattttttggtatagtgagaattgtagtgcacggttaaatcaacaactagactaaagacgactccatatcattaacattctcattcattgcaatactgtttctgccatcgattttctcctcaccatcatcactccttcaaatattcattttaactatagtttgttttcatgctataatgattctatatttctatcaaacaatagttacagaatttctttgcttaagaaaataatatatatttaaatctataatattcacgactaatagacgttaattgcaagtggtgtaagatctgtatatgatatatattttctttcacgatcacaaactgtacatgatgtttctttctcaaacatctatacaacaaaagcttcattattattgccagagaataattatgcttaatatgtgattttgttttaggattttttttttttaaatatatcttgaaaaatgattctaaagctttttttttttttttgataaaggtgtatttgtttctcctataaattaagccatcttctcaaccaaactcttcactcaccaaagcatcacataacactcacacacacactttctcttctcttattttctcagttcttttaactcttttctctacatatattcaa

SEQ ID NO: 5365 - DNA, 3000 bp, Unknown
  misc_feature (1)..( 3000): cDNA_ID_1828432_gDNA_ID_1620783_Annot_ID_50380 3000 nt of promoter + ATG
tcaggccggtttatgggctctgcccacggcacaaggccaaacttttttcgttttatcaacttcattagcttataagggccttcaatttatattttagttttgcaaaatagggtccaaggcccatttatattgcttggaaagagtgagaaactgttgctagttatcttttgagagtttgattttttaacgtcttttattatttctaaacaagttttcatacctagcgttgggtggtccggcttggttgcatgaacggatagcagtggaaagccgttcgagtcgatgacgtctaaagtacaactcttgcatgggatgagctttttccgttttgtctttggttctaatctattatgttttgcagtccgttttctctgtatttctgttttttttactctgtttctttattactctgtttcatttattaagacgttaaggagaaaaaacaagttttcaaaccaattatacaaacatatcatcaaaattatcaaaaataatatagaacgataaaagataaaaacaagttttgactctgctttttttcgaaaagccttcctcgctatcggtttatcaaatttgttatttttctttttcgtactcgaactcaagcatgcgttatcacatataaaaccgacattactttcgcggataactcttgtttttactgctcatgatgctttactcggtagtccaatctttgatctatatgctctagttattatacccaagggtaagggatgcttgatcgactaatgtatcttaaaaatgtttcctacatgatgacttttgaagaatccctacaagaccaaattattgatgtagattgatcacctacacaaagttaatgtataagacttttgtaggaaccatatatggttaagatctaagaccatgttattgatggtttttgtaccaaaaaacgtcaaaatcgtttatttttgtaattttatccttcacgtccaaaaaatacagaataattatatgaaatcaatatatgtaaagttgttaaaataggctatatacaataccgtattatttttttacttcatatgattttgcattttttcgacatgaatggtagttgaaaaattgttgattttaagattgtttttttttttgcataaaactctattattgatggataaagtcagaatttgatttttctggattagaaaaaatcaagaaatttactaaaaagaaaaaagaaatttacggatgtcaaaaaaaaataaaggaagaaatgtacaagctacaaacaaaaatcgggtagttgtgtcacgtttattcttcacttgattctacaatgattgagataaagttgccgattttgccgggtagcaaaacacgtgaattatgcaaagactgaaataacatgacttgacgatttaaatagtaagcttattaaatatttcactcaacccacaaaacgcaattaaccgaacggtccaagccttcgtacttttaggtggctattcgttgaagaagataaatgaaagagagggtacgtgtccatccatttgcggttaggtctgggtccatggcccgtccctttcaaaatgcaatcaaggtccgtaaatcggtaaatgtaattaagaaattgtaatatccaagctaaaacttactctttccgttttaaaacgggatataagttgttttagagtttttcttttgagtcaaaatatagatgttttcatatcttcatataaaagaaatattaattaaaaagttttatctaaaaggtttataaagaattaaatgactgtttttcttcattggctttcaccgagtatttcttattaaaaatatatatttgactaaaagcataaattttatcaatctctgtcctaacttccaaaacatcttacattttgaaatggatgaaatatttttcttccttctctttcttcatttgaggtatatatgaatttaatcacacattttaaataattaatgttaaaatgataaatcctatgtttttctattatgaattttaaaactagaactattgaagtattgattgtggaaaatattttaatatccagttattgaaaatatttttaacaatggtttttcaatatggtttcaaaattcaagatgatttgggaaaagttaagtttattgatcacatgcaccaatatatatatacactaatacacaattatatatattaatttaagcactaaacttactaatccttatcttaacataagatttatcccgtacccactctaattaataaacatatatctccgaaaattgtagaaccatataaaactttaacacttcctttcaagtttgagtatatatgtaaatcacaaacgctcaacttggacaagtagctaaaacaggaacttctcaaggctatgtggttcgaacattatatgtaataatattgaaccacatctcttatactaagataatccgctttgatatttttagttttctcatagaacattgggttaacagcaatgtgcaatgctgatttcctatcacaaaacatcaacatcggatcactatgcttcactactcctagatccgtcaaaagtctcttactattttagttcaagctggcagccatgcctatatactctattttgacgatttggtttacaccggtaacggttgttgaatgaagaaaatcagattttaaattcgatcatattcttttattaagttaaattagtttgtgtattgttctgacaacaaaacaatttcagctaattttataacaaaataaattgtgctttttcggatatttccccttccatttttacaatagaatgatcgaatatttttgtatgaagtatattgttcttacaacaaagatggttttttttttgtttttggttaaagtacgaaaatgatgatgattagccatcttgtttcagttctattatataagcccattaatagcacggaacgacctttaaccaaaacacagagatcatacgacagtctcctaccaaataaagaaaaatccaccataccataaagttcaaatat

SEQ ID NO: 5366 - DNA, 3000 bp, Unknown
  misc_feature (1)..( 3000): cDNA_ID_1828424_gDNA_ID_1620783_Annot_ID_50382 3000 nt of promoter + ATG
acaacactcttactcttttgggcctaacttaactaatagcccaatatttttttactgcaactctgtttcagccatttgggctgctctggctaaaggtttatggaagtctagatacacgacaagttgcccccagattctggctcatgtttcagccccagatcaagatcgtttggaaggtttccttctccgctatgtattccaagccacagtctacacagtctggagagaacgaatggacgacgacatatcgaaccaccgaacacatcggctcaattgatcagttggatagacaaacaagttaaaaatcaaatcacaaccatcagaagcatgggggattagagctcgctcttgattcatttcaaccttttcagcaattagcaagtttttttaatctatctttcgaaaacacgatgcaatagttgtaaaaacgttattttttctttgaatataatttaacattagaatcaaaaaaaaaaaaaaaaactaatacccaatattaacattattacaaaacacaccaagcccaactctttcttcttgttgaattgtgtccttcttatgtgtcgttgaccctttttacacgacacttcttctgcgacttcttcttcgtggagcttcttctcttttcttcatctcttctcactgaagcttccttttatttgtgcaggttcaattaaggaaatcaacttcaacaagttttcatccttcccatttcctcgaaccaagaagatggttttttgtgtttttattttgggggtgtgccggctgattttaagaagcatataaggaagtaaggatgtattctgttctttttaaaggttaattgcataattatatgggactttacatttacttcactgatgtacaaactgatttggtattttggtttgttttctggtcgagcaagtgcatgcaatacttttcttgtgccaagtgcaacaaccatcaaaattcaaagtttctctgccacaacttgaacttgctttaggtgcaactgtgcaagatctactaatctcacgtcacgcctctaccctcaaatctttgcaacttcggttttatagatctgcttctttttgtacgtttctttgattagctgatctccaaattaacgaaataaatggttcggatttgttactccatttacggattacttggcaagaaaatccttaatttttcttcgcttcttcctcctctcattttttttttcttcactttgacaagcaacttattacagagaagatatctacttgtaacatgaatttgactttgaagtgtttgctagctctgagcctctgaggtccgttagttcttagagtcagatcacatgattgatagattcggtgtctctttctgagatttcagcatatatgtttgattctgtctttttataggttgataaatcgattcatgacccactggaataatgagaaggcttttaggtatgattacgttgaaaaaatcccgctttcactctttgaaagatagctgagccgagatggccagattaaaggtcatgaagttcactgtttcagactatgaagggaggttaggagtttcacaagataactagagaaaattccaactgcaacttgtctcaagaaggaaatgtaattatagataaacgaaagaaagaacagaggaaaagaacagtgatgttgggtaggaaaacaggtgaatgactttcaacgtgcctgaactaaaatgaaaattttcccccataaaatacatagcatcgtaccaattaacgtaacgatcctttcaccctttgtatttctgtgtctagtagttgaagaaatgttggttgaattcagtttggtttctctatggtccatacgtagaacatcaactaaaatcataaagctaattaagaattgtgatatagtgtgatctagcctacgcatctcttgcatgttttgtgtaggacgatttaattgtctctaagaaaacacaactctccttttaaagacacccatatatttcttttaatttatatatatttgaatatatgctcatttaaaaacacttatataaataatcaatgtggatgctctcaaagttttcttgacagattttggtgctaaatttttaaggtacattcctggattttttttcattgttttctattttgtaaattgacttatagagaacttctattgatttttaaaaaaaaatcatagcgcgagtaaatgataacggtaacgatgaaatctaatgagtaatgagaatgaatatgtatacattgatttttgaatttattcgtagtgcgagtaagtgataacggtaagtctgtaacgatgaaatctagtaatgattaatgatttctctttcttatatatatatataaatgaaatcagcgatgtggaactttcgatggatgtaatagtagctttccaaggattgtcttttttttttcttgtccacgaaaatattaactgtagacaattatttgttgtcccatctccaccaagattcctgccttgcaaattccacacgtgttttcactttcttcaccaacctactggatttcactagtttgtctgtaaattaacttgcttgtctacgacagctaaataaataaggaatcgtaaaagactagatttatttaataaagaagttacgtttataacgaaaaaatatttcttagcaaaataagattatcttgtgatgaagtttcatttcaacaaacataagatgaacatgataaaaaaaaaatcataagaataagaacacaaaaagaaatgaaaaaggacctattattaaataaataaactttgacaaaagcaatgcccggagcttaaaaggtcacataaaaattgaaaaatttctaatcacttacacgtcgttcaccgaacacgtggattggaatgagtaataaaattccataaccattagatgaaatgtaacatctgtaatcttgccattaaaatatagtatttatatttggcctgaagctgatgcaacttatacacaaaacctactattattaagatttgacaaaat

SEQ ID NO: 5367 - DNA, 3000 bp, Unknown
  misc_feature (1)..( 3000): cDNA_ID_1828420_gDNA_ID_1620783_Annot_ID_50383 3000 nt of promoter + ATG
tactagaatcgtaaaacgtatggattattttacattagttgtgttgaaacaacaaccaaaactcacattttgaagattccctcgttgtcgcctaatatattttgggcaaaatatccattccatgtcggcaacgtgtgccctactagttaacaacacttggcgtttgatccattccatgtcggcgtgagagatggtgagatggcgaaagctgatacgttgatcaatagtattattttaaagtacgtatacagatatactgttttaaagagttagtttcgtggtgatacagactgacaggtacgttaagttcgacttaacgtaataacaaataaaaagaataacaggttgttttgtttggtctacaagactacaagactacaagactacaagtctacaacgaacaagactttttataacataagtaagactttaaagtaatcaacatagatgcctaagatgatttgatttacttggccgtcttactagtcactggttagtggttacccagtttcttaaaaaaaatgttattattctgattaattaagcagatattttttttttcttttttaatagatatacagataaacgcatttatcatatttcataataaagtaaaaacgattatgatcggacatacaagcgaagtaagtaagtgtgattattaacaaacaaagagttgattgaaaattcaattgtggctgtaaataatatgtcagtataaaacatatcaatttttaactcattatttttaagggttaatatgttaagtgatcaaaacaaataatttaatatttcttattgatcgataaattaacccttactatttttagaattttttactttttattttcaaatctaataatcataggaaaaaaaaataacacacaaaacaacaaaaaatttccaaacatagatcgactaaagaaatttccccctcataaatttcttccgcatgtacttgataattacagcttttattctttaaaaccattttggcatttttgaatggctacttaagtgtggtatcttccgttccaccttatataactgtcttgcttcgtgctccattcatttcatagtgtacttattccataaagatgactttacacttaattcttatcatagttaataagcacttaattctttttctaatgtgtcatgaacacatgtgcacggtaattcgataaagccagtatgctaaagtgtaaaggcacttgtctattcttaagcaataaatcactgaaaacaatatttatcggacaaaaaatcagatgtaatagatcatttatgtttaaatcagtcaaattcaagcatattaaagggtgaagttttatgaagaaaaaattcaactaaaaaaacaaaatgacacttacacagttacactgacataactaaccaaatctaaaatttataaatttgtcacatcgtttaatcgttatctgtagctttattgccttttatctatgtcatctacatagatggagtagtaagctgagaagagaaggagaaatttaaggtcaaagttacccatcttccgacatgcacgtggacggccgaaagttcacgagaatcttagattattccacagtgacacatgtcggcctttgcgtgaggaagttttttggtctctaatttttttttttttgaaatataaaaggagataaaaataaatacgtaattaattatacattttaatattaccgttaaattattcgttataatctcctatattgaaatttgaaaacaaaactttattaactataagcatgataaatatataaccgtttatgataattctgatagtatacgtagtttttttttttttttttggtgagattgtttatgaaattagcaaggtttgacctatcatcaaaccttttacctcatgcaactaattaatgggtgatttcttttttcaaaattgtttttaataataataactaattagtaattagtgggtattttaaataccattatgccatttagctaaggtaaaaaatcaattgttaattataacacccaccaccaacatagattcgtctatggttcattcatcgtgtttaagagttgaaagaaataaattcgcccatcgtgaataatagatatttattcatctcaaacttataactcaaatatatttcaactatatatcgatcaaatagtatagcttttggttaatgacgaatttttattcttttgatccataattcttcttcttcttttttttctgtccggatacatgaaattgatgatacacatttaaaacaacaattcgaatcagggaacaaattacagccacaaccagtgatgatagaccatatatatgatttagtttatttaataaataatgtgtaagcaaatttggctttgctgtaaaaaaagaacacgaattttggcaaaagtttctgttaggaatctggttctattctcctctgcaacctccagtctctcatgaatctggttcggattctctttttccttgtttctatataatttagatacatggttttataattctatcatatgtctattttggatatagtattttaaaaatatatatatttttcataaatggttatggtctattctatgttaatgataatcattagtctttttgtcaactatgtttttttttccaacaaatttagtatgtaaacttttttttactaccgttttattaaatcgacggttgatcagatcaactccggtataacacaacataagtttcgttatcaaaacaaaaacaaaaacagatttttttttgtcaactaccagtgaagattagtcttacgtgtcaagaaaccggataaaaatatataacgtatttgggcaatcagctaagatattaactaacgcggagttcattattaaaatggagtaatgatgttttcagttttctatataaatcacgtcgagaccgtagagtcttacacaacaatccttcttacatttctaccaacaaaacacaaaacacaaacatagcattcaaaactttgaaaa

SEQ ID NO: 5368 - DNA, 3000 bp, Unknown
  misc_feature (1)..( 3000): cDNA_ID_1828416_gDNA_ID_1620783_Annot_ID_50384 3000 nt of promoter + ATG
tatctcaaaatttgatatagtataaactatgtcggtatagtcagatcttctagagagttgtggtatccacaaacaaagaatacaatcgcagattcgcaaaacacttttcattaaatagtaattaataatcacatatagtactctttaaaatgtataaaagtcacttttggtttaacccatgtgggagggattaaatggaatagattaatttgctttgatacatctttaactgtataataataaaccaaacgttgactaaaccatacattaatttgcaggtggtggtagtaatcgggaattttgcgagtggagccgatatcagtagagacatatctaaagtcgcaaaagaagttcatatcgcatctagagcaagtaaatccaacactttcgaaaaacgtcctgtacctaataacaatctctggatgcactctgaggtaaaaactattttcttataatggttaatcttgataagaaaaaattcgaaacaaattataaaattcttgcttctattaattattttatttttttgatatcttgcagatagacaccgcccacgaggatggtaccattgtttttaaaaatgggaaggtggtacatgctgataccattgtccattgtaccgggtatttaacaattctcaatttttttattttccgttacacaacggaaattaacatactaaaatgttcggtttactaatttttttttttaatatgtgaaggtacaagtattactttccatttcttgagaccaataattatatgagagttgatgacaatcgcgttgaacctctctacaagcatatttttccacctgcgctagctcccggactttctttcattggtttacctgcaatggttagttagtttcaatcgattaaaattttccgaagttttgagtgattcaactcttcttgatttttagaaaactcatcaatttcttggtttgatattgttataaccagggtctacaattctatatgtttgaagtccaaagcaaatgggttgctgcagtcttgtctggacgagttacacttccttcggtagatgaaatgatggacgatcttaagttgtcgtatgaaacacaagaagcgttaggtattcccaaaagatatacacataagttgggtaaatctcaggtacgacattttttagttacgaatatgctatggtaatatatatcaacttgaaaaagaatatagtttcaataataaattttgtgtcttttagtgtgagtacctcgattggatcgcagacctgtgtggattcccacatgttgaacattggagagatcaagaagtaactcgcggttaccagagacttggtaatcaaccagaaactttccgtgatgaatgggatgatgatgatctcatggaagaagcatacgaagattttgctagactaaatctgatcaattttcatccttctcgttttctcgaatccggaagatgaagtttgactacgattgtaattgtgtctacttgtttggatttaaagtacattgcattataaaaataatgtgtgagtaaatagtttataagagtgtgaaggtcttcttggctagggttacatgttgttcgatctccggaattagcttcatggtgtctagaaacttttgttttttagaccaatatgttaagaataaaagtatgtagttaattcccgtaagtttttatgaatccctggttcattgtgcaaatgtttttttttttgttattgttctgttaatatcaaagagtgtccttaaatgtatgcataattccctctttttggctttttgattcttttattggaagcatataagttagccaattgactttttcttacaataagaatttgaccgttcctcacatggttctgcatcaagtagattatactagagatcaggccccgcttagagggagtgctcgtccacatttttttccaaatgattttaagctcctaagtttttgatatttttgtaataaaggtcctaaattttaatattctgatgatgagactgtaattagatcaagtatagtgataaaggccacgattgttcaaatgaaaattttgcatttaacgtttgtgtagaattataaaataatctcagttttctttatacaattttcaggatgctaacgtaaatgaaaaaataataataaggaaaaaaatgtaaaggccacgactgctttttttttttttttttttgcttaaaattttacaagttcttatagaattgtatggtttttatctaccttatactccaatatatgggtcaattttgggttgttcacatattgccaaatctagctgcaaagctcgttatctcgaaattcacgaagcagaaatattgtgattggtcccaatcggcgaaagtgaagataagagtacttcgacaattgaaacaccggaaaaaagagcaaaatcatgtacgtaacttcaggattttgtctcttttgttatttattttttttggtttttccttttgtgggcaaacaagatattgtcttatattacaaccatggttcaatttgagacgtcagattgcagtgatcaaagtgaacttgctaacttcaatagagattctttctttttccatgattggcgactgcgtctcatatcatttatcactcttgtcatgtgagactgacacactcattgttcacttttgctgcgtcataaatcttttaattattaacttacaaaatatctcttaacaatttgaaatcattcaaaaacaagagtgatttgaatcaaactcttaatccaataaacgctaaaactctataacactgctgtatttattacaggacaaattttccttgaaaataagtaggacaatgattacgcagtagttaagtgaaaatgaacacgacaggtacgttgtgtttctccttatataattaacacatcgacatcatctccacaaagtctatatgaccaaaagatttgaaaacacttaaaaaatcacatattaattaacatgacacaaaaatcccattacatatcctaactaatt

SEQ ID NO: 5369 - DNA, 3000 bp, Unknown
  misc_feature (1)..( 3000): cDNA_ID_1828408_gDNA_ID_1620783_Annot_ID_50386 3000 nt of promoter + ATG
aagatgttttatttgaagctcgaagcctcatgtattcccaaaagatacacacatcttatggcagaattagattctcaggttcgtactgtatttctttccataacatgtatgaaaacattatccaaatagaaagcatacattaatttgaatgagtttttttggttacagtttgtatacaataactggcttgctgatcaatgtgactatcctcggatcgagaaatggagagagcaaatgttttacaaggtgttcaagagaatacaatcccaagccagtacatataaggacgattgggacgatgatcacctcatcgcagaagcatatgaagatttcgtcaaattcccatctaactatcccagttctttaatcgaaagagaatatacaagctgaaaaacatcacttgaagtctctgaaatgagggtatgtgggtttattacatgcgaaataatgcatattgtattgtaaacatcacttaaggtctctgaaatgttggaaacttacatgtaacaacattacttgaagtctgaaatgttcatgataggagcgagcttcttgtctttgaaggctattcttgtctcaacaagacaacaagtgattgcatcaacttctgtaacctagcaagaaaataacaaatagaattagtcatacagtattttatagtgaccagacattaccacaacgcgtcattagagtaaaagcaaaaaacgttaattcaactcacagcttttaccctcaaggatgatgcaagtgttttaagaaagcatatcgaggaagcttttgtctaatctcccatcatgcaacatattagcgaccaagccaatggttgaagcatctccaacaaacctgcaactcctcatttctctgatgagttcagctgatgctgctttgtcaccatctctcagatgtgccctgataagtgtattatatgtaccactatttggaagaggcccgtcttctttcattttttttagcaaggcataagcttcctgtaataggcgtttactacacaagcctgagatcatggtattgtaggttacaacattaggcttcactcctttaaggctgaggctacaaaatagatcccacccatcatccaccttcccagccttgcacatcccttcaatcatagtagtatatatgtaaatatcaagttttatctcactcttttgcatatagtcgaaaacctccaatgctttctctagcttcccgttattacagagtccatctaacaaaatgctgtatgtcattatatcaggaggtacaccatcagaaaccatctgtttgaaaaccttttgggcattatcacagtcgccatcatgaaaaagcccttggataagagtggtgtaagtgactgtatcgccaaccaatcctctatgagacatctcgcggaagagttccgtaccatcttctactctcttagacttgcaaaatccctttatgagagtattatatgtaactacatctgggaaacagtccttgctaaccatgaactcaaacatctgcttggccttgtctagacgatcatgcatacagaacccgttgaccaatgaattgtaagtgaaaatatcaggatctatagaccttttgatcatgtcatcgtacaatttctcagcctctacaaactttccttctttcacaaacgcatcgatcaatgcattgaacgtgactaaattagggttgattttcttctcaatcatatcactcagtagttgagaggcatcactccatcttccataactacaaaggcaacttatgagggagctgtaggtaacaacatttggtctaattcctttggtttccatttctttgaataggttgagcgcatcatccacatgtctatatttgcagagactatcaatgattgtgttgaagataacaacatccgcctctattttcgcagcttccatcttgttgagcagatttaaagccaaatcagtatcacctctcttacataatccatttactaccactccataagtaaccagatttggttgacagcctctttgaaccattcgatcaactaacgccacagcttcagaagctttgttgtggagaaaaagcccatgaatcaaagttgtaaatgtgattgtgtcaggtctataccccatttccaccatttgatcaaccaaagctacagcatctgaaatcctcttaccgtgacagtatccattgagaagagaagaaagcgtgacaatgctgggctcatagccgagtttcatcatcttgccaagaagagctaaagcaagagagatttgagagcgtcggcagaaacagttgatcaaaatattgtaagtatatagaccatgtacaatttctaacctctgcatcttctcacctagagagatgacaacatcaaactttttcatcttagcaatggcactcaacagtttattgaactcaacaatggaaggtaaaggacgagacttgaccatgccaccgaacaaaccaattgcatcatctaacttcatatcatgtaacccatttctcaatatctctctgtaatcaccactgccactagaaaaagctcgtccccagtaacacatcccgcaaagatcaatggaagaaggagcaattcgaggattacctttcccctgaagattccgatgaacaattctactcgtcgtcgatgaaactacactcgaaatcgagatcctcatcttctcgatttggcttcagctgattctcaatctcactctcactcctctctgcaaatcgcaaaccctacacggagagatagatatgtaaaccggtagaattctggtttagaactgattaccaaaccggtttactaacgattgaatttcgaagcgggccaaaactgttttgggacttccactaccctctagataaaacgcagcgtttaaacaatttctcaggaatttgtttttgtttttttaacattgtgtcgtggtgtgtgtggttcatgagtttttgggccacatatttataaagaggccgtagtatattcaccatcgttaacgaatctcgtaaaaaaaccca

SEQ ID NO: 5370 - DNA, 3000 bp, Unknown
  misc_feature (1)..( 3000): cDNA_ID_3076789_gDNA_ID_1620783_Annot_ID_168050 3000 nt of promoter + ATG
agttacaagtgaaagaaatcagtaattttttatttattttagaagtgaatttggtttgagacaaacacgaacaataaacttataaatctacttaattaattttctgcttagctgaatgagtttctaaaaaaatttggttgcttattaaagattaaacaaaatgccgattgcagatctttcacgtggttaatcaatttataaatttttaaaacaaaacaatcgaagttcaattttatttttgtcgtaatcgaagttcaattgttggatacaggtctgacgcgatcgtgataagattttatatgctatttaaaagaaatcatgtggcctggccaaacacacaagtgttattagtaaaaaactatcttcagacttgttttatataaatacatttatttgtatcacctattatgaattgttttttctccatatatatacgttgggttatatcttatttcaagtgggtagcttatactctctctgttcctttttgtttgattgtttagaaaaaacacacatattaagaaaatatattaaatgttgattataaatgtattatttttagtgttttacagttttctataactctaaaccaatgatagttaactatttttcttgaaaattacaattcaccaatactaaccaataaatattacatagaaaacttaaaaaattaatcttttagaaacaatttttttttctaaacaatcaaacaaaaaggaacagagggagtatttaattgcatcagttacaattttgagaaactctcttactaaaaataatataaacaattaataaataagtagagagaatgacaaaaataaaaaatagtttctctgcagagaaactttggagtaatgatggaaaaactatatgtataggtatgtgtttataattggacagaaactaaattatattaaatatatattttttttttttttgaaaaacttttaaagtatatgtaaatctattggtgagatggctaagtttctcttcttctattttttccttctggatattaagatctattatctcattattatatgtttaatccaagataatcacttacctgccggaattgattctcgttatatgtaaatcatcatgttaaacagttaaaaaaattgtgatatgatcaagtcctataaaagtttgaaatgatgatcaaacccaaacaaaattaagcttacaaaaagagaaaaaaataatatataagccttatgtttaacaaaatgtttagttgatataagtcgtttttaggatctgattggtgcacattttagctgaagaaaatgactcttaacgtcagctcaaaacataccaatcaagtaaaaagacaagagaaaataactatgctagctctactcttcatataactgtaaaaagaaagagatgttttcaccaatacaataggatgaaaatacttttcttttttgtttactccatttaaaagagttacttttactctatatttattatttataccaatgaaatcagacatttatatcagtttataagaggaaataaaactttaaagaaaagagagaaacatagcttttcgccaattttcactgtgtatctgtattcaaataattagagtaaaacaaaaaaaaattatacccaatcttaacataattattttcagcctttatttttcagctaagatgatttaccaatcaatttttaggtgagatagttatgatgcctaataaattggaggtgcaaagttcaacaaaaattttacttttatgtttaattgaaaaagactgcttctcagtttaagaactatggcccatttatagatactgattaaaacgtggattgtaaaatgtgggcaatcaatattattttaaaaatgtggagccatagttattaactgtgattaaatttccccctcctccactttcacgcaaactaatatttaaaacagtcttaactgtgattcaagtaataagatttttcttttattattatttgacagtacttcctccgtatcattttaagtgatattttaggaaatgtttttagaatgtagagttgtagaggaaaaactagcagaaaaacaaaaatgcaatttatatatagtacagaaggttagtttaattgtgtttcgagttaaatctcttttttgatatggaaaattattctttaaattaaaatatttaacatttgactttggataggagaagattaaaagctgaaaagctggaacttcaacacttttgagaaaagtgagctacaatagtattaatcttaccatttactgataaataaatatatactttctgttcaattttaatagttttcaaatttattcttgttgcacataaacaacataggatatataatttttttagttaggaaatatatgcttttacgtttctatgaaaattctagatatgattataatttactcttaaaatatgaaatagaaaaatggagtggaatattattatttagaaagatatatatatatatatatatatatatatatttgtttgtatgcagaatgttagaccaatataattagtggacatttctataaaaaaacaaaaaattgtggaatggatgggataaaaaaaaaagagagatcaaagataacattttaagatgtttttctttctttaattttcaacaattttaggcaatttagtagtagggggaaatgtatttctatgaaaatccaaatatatgctaatgtatgcaacaaggaaagatatagtaaccaaaactccacttcatattacaaacaataattatttttataaaagtattgacttgtcgtctgcaaacgtgattacgtgaaccttactggtaataatacaaaaatcacagctctaatttgccaacccaatccagatctctctagttctcaacttctcatataattattcattaatatatttattttgagattttggttgattttttgatatataaatattggacttgccattttctattacaaccatcaaatctcaataaagcaaaacgaacaagaaa

SEQ ID NO: 5371 - DNA, 3000 bp, Unknown
  misc_feature (1)..( 3000): cDNA_ID_3076797_gDNA_ID_1620783_Annot_ID_168045 3000 nt of promoter + ATG
gttctgaaatcaacagctttggtgcaatcggagtccaagccgcagctcttgagctagacgtttcatcagacgcagacactattcgaaaagcggttaaagaagcttgggaaatctttggaacgatcgatgttttgattaacaatgctggaatcagaggcaatgtcaagtctagtttggatttatcaaaagaagaatgggacaaagtctttagaaccaacttgaccggatcttggttaatatccaaatacgtctgccttttgatgcgtgacgctaagcgtgggggctcggtgattaacgtctcgtcgatctctgggcttcatcgcggtttgttgcgcggtggactagcgtatgcttgttccaaaggtggtgttgacaccatgacgaggatgatggctattgagttagctgtttataagatcagagtgaactcgatcgcacctgggattttcaggtcagagatcacacaaggtcttttccagaaagagtggctcgagaaggtaacggaaaagattgtaccattaaagatgcaacagactgtggatccggggcttacatctctcgttcgctatctcattcacgattcttcccaatatgtcaccgggaatacatacatagtcgattccggagctacactccccggtgtgcccattttttcttctctttgaaaatcttagtcaaaatcttctgtgcttgtacatacaccgtgataagaatgatgtcttttccaataaatggcagtactggcattaacattgaatttactttctcagatatgtttttttgtttatgtgtacaaagagaaatcttgataagcttgagaaactaagtgatgatcatcccattcgtctctatacgtctctggatgggctctcttcttcacgcccgttgcaaaatacatctctttcctccattcctctgtttctgagcaaccgcattgtgaagccaaccaactattgtactcaaactgcgaaacaacaaaaatgttgataatatgtttctgtttgctcttggtttatcagaagtggaaacataagttaaagagaattcatacttgagaaatgcccatttggtgagtatatcgctttgcaatcccttgggcatcaagtgttgagtataaggttttgatttccatcatcatatcttcctttgaaggcagcggtatccgacccgacaaaacaccagcgatccacttgctttgcagttcaaacataggaaaaggtacaacctgaaaaatgaatttgttacagattatttcaacagcttaaaaagctaaaggaaacatatgaaactgattcagagcaatttagagctgtataccttccatggtatcccaacgaaggagagccacggcgcaaaggctggagagaatacgtctttgtacaatggcccgacacggttatcgtctacagtaacatttccattggtttcaagaaacgggaagtgatacttatacctacgataagtacagagctttgttaaacaagcacacttttaaacagaaaaccagaaaactcaaaacgaaaacgaaagagagaatgaatacccagtgcaatgcataataacatcaaccgaaatcgttttcccattctgaaaaactacagaaccatcctcatggacactctcaatctgcgtgacatcgaagaaaacataaaattggttctcctcctgatcaacgaattgcggtaagtactatttaggagctggctaactcaccatcgaatgcatccatagattactgtaaccaggccgctcaatatacgtatcagcagcattggacctacaagccacatgaacctctttggcaactctagcaatatccctacttatatcatcagcacttgcagagttccctataagcacaacaacctaaaccaatgcaacatgatctttccacataacatcacaccaaagcaggtaacattatcatctttcgaaatgagtacctgatctctaaacggttcaggtatacgataattatgactatgcatctccttccctggccaagaacttatacctaaaagtttccaataacaaaatcacaatcacacttctcactgttcctatggaaactcgatgaatcaacggagattaccaggaatttcagcgtgacgaggttcaatgtaatgtccattacaaacaacaacagcatcataaatctcatcacgaagaactttcttctctttctccgtagattcaattctccatttcccgcttccttcttccgccgccggagcaaccttcacaaccgccgtatcaaaccgaatcatctcctcaatcgcaaactccttagcgaaatcttgcaaatacgccaaaacttcaccatgactcggaaacctcctcggatctctagattccgatacatcggaacgaatcacgaacgggaagtccctgtatcccatacactcacgggggagattagttcggagagatccatagacgctcgaatgaacaacggatcgggtcgggtcaacgcttaatggatcgggttcaatatgatcggtgtaaatccaggttcctccgacttgtttttgtctctcgaagacgaccaccgagtgaccttcccgacgaagctctcgcgccgcgactaatccggcggctccggcgccgataactgccacgtggtgtgatctgattggtgataaggaaggcgccattgggtttttttacgagattcgttaacgatggtgaatatactacggcctctttataaatatgtggcccaaaaactcatgaaccacacacaccacgacacaatgttaaaaaaacaaaaacaaattcctgagaaattgtttaaacgctgcgttttatctagagggtagtggaagtcccaaaacagttttggcccgcttcgaaattcaatcgttagtaaaccggtttggtaatcagttctaaaccagaattctaccggtttacatatctatctctccgtgtagggtttgcgatttgcagagaggagtgagagtgagattgagaatcagctgaagccaaatcgagaagatg

SEQ ID NO: 5372 - DNA, 3000 bp, Unknown; identical to SEQ ID NO: 5368
  misc_feature (1)..( 3000): cDNA_ID_1828416_gDNA_ID_1620783_Annot_ID_168044 3000 nt of promoter + ATG

SEQ ID NO: 5373 - DNA, 3000 bp, Unknown; identical to SEQ ID NO: 5367
  misc_feature (1)..( 3000): cDNA_ID_2053165_gDNA_ID_1620783_Annot_ID_168043 3000 nt of promoter + ATG

SEQ ID NO: 5374 - DNA, 3000 bp, Unknown; identical to SEQ ID NO: 5366
  misc_feature (1)..( 3000): cDNA_ID_1828424_gDNA_ID_1620783_Annot_ID_168041 3000 nt of promoter + ATG

SEQ ID NO: 5375 - DNA, 3000 bp, Unknown
  misc_feature (1)..( 3000): cDNA_ID_3076811_gDNA_ID_1620783_Annot_ID_168029 3000 nt of promoter + ATG
taggttactatataagttttggtctagaaaaaagctaactgactacttggaatcgaatgaaccgatcaaatatgaggctatgagctatgcataatattttattaaaatatcttagttttgatgtcaaaccaaattatttatttttatggtccgattaataatttagtcggtgtctctgctccacatagttttttgttcttttaataaaaaaaaaagaaagaatcattgagacttcattctactaaaatggctagctatactacggtatgccacgattgtgtgccctgtcatttccgagttggatggccctaatgaataattaaaattcaatggatctatatggagcccgtgaactataattgtttttttcttactcaacttgtgtaaggaattatatcttattattattattattattattattattattattattattattatgtgtaggtacatagactatggaactgtagaatctatgtgcatttttgaatttgaatagtgaaacacattttacataatactttatacaataaaataaaataaaaacacattgcgaataatttatcgtgaactggattggaccaacttgtaacaatgaactaaactttttatactttccgaagttacatgcagttttatttttcatatatgtgactaaagcttgaagctccttttatcgaacatataatcattctttgacccaaaaaaaacatataatcatttttcatatatttgcaaaacattttttttcttacatattaacactttaatttggtttgaatatatttactaaaaaatcttaacatgttttatgtggatcaacctttaattatcagcaaaaataaaaaatatatatatataatccacagcacaacagagacctaagtaattgaaaaatgatacatatttttttgttaccaaagtaatgatagattttgccttagaataatgcaagatctccatgaggacaaatgtccttgatgttggagtttagctgcgttttatgacaaaagacaatgatttgtatgaatataatataatagttctcttcataaaagtttatttccgtacgatccacacacgttcccatatctgcactgcatctgcatgactgcatgcataatgcatgacaatacacacaaactcctacatacgtagagagagggagatagagagactaaagagtcaaattgatagacagcgagaagctggaacaatacaaaacgtacgaaagattacacgcaaaagaaatttaaagaaggccatgcaaaaaccctagcttaattataacaacaacgacaataacagaaaacaacacttgttaattaaaaccctagataatcaacaaacctgataatcaaaagtaccacatatatatttgaattattacaaaagcctcgaaaaccacccttgatcatacgtacatttgttaaatcaaggggatgtttttagatcaagtgagaggagggcagacaaaaccagaaggaggattgatcccacaagtgataagagcttgaagtgcaagaggaatgaagatgtttaagttgagaagcttaagtcttatggttgtgcaaagacaaacggctgcttctagctcaagtaacccttgtaacactggacaacacacattctccaccggatttccaagtcctatatggatcaatcctcccaaaacatcaacacaggctccaagcttcaatgcattgatcggacacgttggttgtttgccgccgcctcctcctcctccaccggaaggtggaccatatggtggatagccggacgatggtggtgggactgtgaccggaggtgggttaatgattggagggagaagtcctggaggagttgtgactggagggagaagtcccggaggagttgtgactggagggaggagtcccggaggagttgtgatcggagggaggagtcccggaggagttgtaaccggcggtggttgaattggagggattatgatgggaggtcttgtgattggcggtggcctcacaattggtggtggatagacgaccggaggaggtcttatgattggcggtggcctcaccactacgggaggaggtctaacaaccggcggtgatttccctcctcctcctcctcctccaccatgatgcggcggtcctccaccttttccaccgtggggtgggggtttaccaccaccttttccaccgtgatgtggaggcggcttgctaccaccacctccaccaccgccgtgttgtggaggtttcggaaccggaggatgaggacgagtacaaggagtgcaagcttggatcgtgggaggcaatgtgatgaccgtgaagattaagaaaacaaagaaggaagccaaaactctcgaacccattatcgttattaactagggttcttgaaattttcaatgaaactcttgttgcattattgtcaaatccttttggcaaataacatgcaaatatatagttgaagcttaaatgtgacccgtgactcttgtatgggtgttaaccactacgcacataaataggtatagtgtttataagtgtagtagatttgattatttgttatggtacgtacaaacgaacatgtgtaaggcaagaaaatgaagaaaaaagaagatgttccaaacttcgagaaatattggagcattttattgcgttacaactaaaggttttttggatcgttgttggtccgatgcaaacttcaaggtcaagcccgtgactacaaagtatatatcagattatgatcactgtctccgaactaaagagtccgtgaaattgtttgttctcttatgtatttaactttatttctaatgacattttgttgaaacttgaaaagacttgacaacaaacagtgaacgcttcttaataacgtagagggtttcgttgtccgtacattcttaatagagaaaaaagcaaagctacaaggaaagagtggcacagtcgtaaataatggagttagatcattatggctttaacattgttttgagcgattaggcccaaaaggcccaatactctgatcatg

SEQ ID NO: 5376 - DNA, 3000 bp, Unknown; identical to SEQ ID NO: 5364
  misc_feature (1)..( 3000): cDNA_ID_2993390_gDNA_ID_1620783_Annot_ID_168028 3000 nt of promoter + ATG

SEQ ID NO: 5377 - DNA, 3000 bp, Unknown
  misc_feature (1)..( 3000): cDNA_ID_1828404_gDNA_ID_1620783_Annot_ID_50388 3000 nt of promoter + ATG
gaggaacctggatttacaccgatcatattgaacccgatccattaagcgttgacccgacccgatccgttgttcattcgagcgtctatggatctctccgaactaatctcccccgtgagtgtatgggatacagggacttcccgttcgtgattcgttccgatgtatcggaatctagagatccgaggaggtttccgagtcatggtgaagttttggcgtatttgcaagatttcgctaaggagtttgcgattgaggagatgattcggtttgatacggcggttgtgaaggttgctccggcggcggaagaaggaagcgggaaatggagaattgaatctacggagaaagagaagaaagttcttcgtgatgagatttatgatgctgttgttgtttgtaatggacattacattgaacctcgtcacgctgaaattcctggtaatctccgttgattcatcgagtttccataggaacagtgagaagtgtgattgtgattttgttattggaaacttttaggtataagttcttggccagggaaggagatgcatagtcataattatcgtatacctgaaccgtttagagatcaggtactcatttcgaaagatgataatgttacctgctttggtgtgatgttatgtggaaagatcatgttgcattggtttaggttgttgtgcttatagggaactctgcaagtgctgatgatataagtagggatattgctagagttgccaaagaggttcatgtggcttgtaggtccaatgctgctgatacgtatattgagcggcctggttacagtaatctatggatgcattcgatggtgagttagccagctcctaaatagtacttaccgcaattcgttgatcaggaggagaaccaattttatgttttcttcgatgtcacgcagattgagagtgtccatgaggatggttctgtagtttttcagaatgggaaaacgatttcggttgatgttattatgcattgcactgggtattcattctctctttcgttttcgttttgagttttctggttttctgtttaaaagtgtgcttgtttaacaaagctctgtacttatcgtaggtataagtatcacttcccgtttcttgaaaccaatggaaatgttactgtagacgataaccgtgtcgggccattgtacaaagacgtattctctccagcctttgcgccgtggctctccttcgttgggataccatggaaggtatacagctctaaattgctctgaatcagtttcatatgtttcctttagctttttaagctgttgaaataatctgtaacaaattcatttttcaggttgtaccttttcctatgtttgaactgcaaagcaagtggatcgctggtgttttgtcgggtcggataccgctgccttcaaaggaagatatgatgatggaaatcaaaaccttatactcaacacttgatgcccaagggattgcaaagcgatatactcaccaaatgggcatttctcaagtatgaattctctttaacttatgtttccacttctgataaaccaagagcaaacagaaacatattatcaacatttttgttgtttcgcagtttgagtacaatagttggttggcttcacaatgcggttgctcagaaacagaggaatggaggaaagagatgtattttgcaacgggcgtgaagaagagagcccatccagagacgtatagagacgaatgggatgatcatcacttagtttctcaagcttatcaagatttctctttgtacacataaacaaaaaaacatatctgagaaagtaaattcaatgttaatgccagtactgccatttattggaaaagacatcattcttatcacggtgtatgtacaagcacagaagattttgactaagattttcaaagagaagaaaaaatgggcacaccggggagtgtagctccggaatcgactatgtatgtattcccggtgacatattgggaagaatcgtgaatgagatagcgaacgagagatgtaagccccggatccacagtctgttgcatctttaatggtacaatcttttccgttaccttctcgagccactctttctggaaaagaccttgtgtgatctctgacctgaaaatcccaggtgcgatcgagttcactctgatcttataaacagctaactcaatagccatcatcctcgtcatggtgtcaacaccacctttggaacaagcatacgctagtccaccgcgcaacaaaccgcgatgaagcccagagatcgacgagacgttaatcaccgagcccccacgcttagcgtcacgcatcaaaaggcagacgtatttggatattaaccaagatccggtcaagttggttctaaagactttgtcccattcttcttttgataaatccaaactagacttgacattgcctctgattccagcattgttaatcaaaacatcgatcgttccaaagatttcccaagcttctttaaccgcttttcgaatagtgtctgcgtctgatgaaacgtctagctcaagagctgcggcttggactccgattgcaccaaagctgttgatttcagaacagagagagttgagacgatcaacacgacgagctgctgctacaatcttacaaccagctttgcatagatcaagacagatctctctccctataccagatgaagcacctgtcacaagaaccactttatctttaagttcacaccatggctccaattgcttcaatacctgcttctgtccacaaaaaaaacaaacaatcatcaagaaagtggaagggcaaaatggtaaatgagagaaaagaaatctcacagtttgatgattgctcatattgattgatgtttcactgtctcggtggagaagaaatacaatgacacaagttatataataaaagcatttctctctatcaaccaaaacgtggcaatctacgtctgtaataacagattcgtgtaagtttctaacacaccaaattgattattaaaaacattgtaatcataaattgtaacaactgtgtgtgattgtgattcatagattctaatcaaagaacacacaa

SEQ ID NO: 5378 - DNA, 3000 bp, Unknown
  misc_feature (1)..( 3000): cDNA_ID_1828396_gDNA_ID_1620783_Annot_ID_50390 3000 nt of promoter + ATG
agttttgattataaaaaaaaacaaaacgaaggcatgccaattttagtctgtaattaaaagttttgatgacaaagttttgttctctttttttatttggaaacaattgaaagcaaaactatcagttgttttagcttttttcccaaggaagttatatttcgacaattgagtttacaaatgtaatagaggaaagttaatttagcgtcaactattcagataaacttgaagatataatttgcaaagagaaagcttgtgaagttgaaaattcagggattgttccttttccaaggttgatttatcttcgtttaatgaacctactgaagttgaagagtatctactggagtcctctttccatgtctagagacaatcactatacacgaatgtcctaatctgaaaaggcttccactcgattccaacagtggcaagcatggtgaaaatgcatgcatgatacgctacagatatccagaatggattaaaggtgtggaatgggaggacgaagctaccgaaacccgattcttatcttcatgcgaacaggtctaacatttctcctcttctcttagttgattttgaaggagtctaactgcttccatctttaatgcctcttgtctctttttatgtgtgaacttttgttataggtggaagaaccataaaccccaagttgagaacatatattgggctctctacttataccgctctaatgtgtttataatggaagttttagtgttttcagtttctttaataggtttgattctagtcggcttgagttcaatggctcacatggttgcaaatttgtagctcctacttacattatatttgcagtatagacagatttgtgtttcgaatattgtttgtggctactctgttcctatccatggtctttatatataaatgtttactactactaagtctaacctcaaagcctttatgtgtctctgtctcatccaccaaactatgaagcctcttttgttattaagaagacggtgcacaaaccaactacatatgacaacatttgcatcttctttcacgtttgtttttttaggcaagaaatattttttcctttgaatttagtcacttcgattattattattattttattttatttttttattttgttaaagcacttcaataaaattttgaaagtggatttggttaatctcttattcttctttaagttgttcaccaaacccctactgatatatgatcaatactcaaccaccttttgtttttgtcccaattatttgcattatggccttgaatgttttgtagattttgtaagagtttttggattttgtttttcaaaaacttattttcataccaatcaaaattttaaaattttggttttcctacaatttagaaaaactatttttgttgtagttttccattcatgattttagttttttagttttcctaaagttagaaatctagtttttactccatcaacgttatttttaaaacaaaaatatattaacaaaaatctaaaactaaaatctaaaatctagaaactaaaatctaaatccaaaaactgaatcgaaaatcagcatccattcagggcctaagttactaaccacgttaaaaacgaaatttaaacccatgaaacttgaaatagcgtatcaccgaaattgttggtgttggggatgaaaattctcacatttgaaaccaaattttatatttaaactattaaatattgtatcactgaaattgtgtttatacaaggggaacgcatgtttcacttggaatgtcttcaagccaaaagacaggaaagcggacttatatttcccaccaccattcggaaattaaagtcaataagcgacgaggcgcaattgtcaagacattataaatgccatcgttgtattgactcatcatatgcatacttgctctaataaagcgtcgtaaggggttctctatgctgagcttacgagtcatgcaggtcttgcgaaaggtcgaaaaaatggttggtccacctaaaactaaaagtatcataatctagtcttataaaaaaaattatataagaagagaaaaattctaatatctacatttttaaaaaataaaattcctaaatactaaatttataaattaactaacaactatcctcaaattcaaataaatatattttgatttgagcattggaagaataccctatcatcccacatcacctcccatgaatttacgggtatttttgtggtacatatatttttcttatatgattctactgttcccactaataacacgcataattttggaatgacgttttctaatatataatggtaaaagtttactaatcaagaaaatatgcataatgtataacaaaacaccggatttacgtattttctaaaataatacaaaaaaaaatatgttatataagtaagtgggtatatacttgtttatttcatgataaaatgttaaacaaatatttttaattttaaacaaaatattaacaattaaaatatcacccttgtgaataatatttaaaacttgtgactatctaatttcaatcaaatatcaatcatatttgaaattcattaaaaaaattatttaacttacttttcctaatcattgagaaaaaaaaaagttttccttatcataaaaaaaaagagacctaagattatatgtgttagatgtttctatttaccatatgaattggttgggtgtagtaagtaaactattcatctatcataaattaatttcgatattttgtaagaataactaatcactgaacaaaacggtagtttacacttttcagtggcattggaatctcctcaaaatcgagctgtcacactcacctcccctgtctcctcttcgcttcggtacttccgaagatttcattttctagacactccatcctctctcacacacaccttaatttcgaatttttgtcaattggtgatgcagttactctgaactcgagctgagagagaggcatagagatccttgcgattcgttgtatccgtaacatttaacaatctcgttttgtttttcttctgttcctctattatcaacaatcaa

SEQ ID NO: 5379 - DNA, 3000 bp, Unknown; identical to SEQ ID NO: 5370
  misc_feature (1)..( 3000): cDNA_ID_1828392_gDNA_ID_1620783_Annot_ID_50391 3000 nt of promoter + ATG

SEQ ID NO: 5380 - DNA, 3000 bp, Unknown
  misc_feature (1)..( 3000): cDNA_ID_2153638_gDNA_ID_1620784_Annot_ID_50393 3000 nt of promoter + ATG
aatatgtgcatcttgtatgtgggggtcttccatgccagggacttagtggttttacaccgatttagaaataaagataaaccacttcaagatgaaaaaaaacaatgaagtgacggtttcatgaatatcatagactatacttgaagcccaaatacgtcttgatggagaacgttgtaaatcttttaggtttcatggaaagatttgttggtcgttatgttgtagctcgtcttgtaaacaagaattaccaagcaagatgaggcataatggctgctggtgcatacaatgttcctcaatgtaggtacatggtgtattagtatcggtagattaaggatcccaaatcaattcatgaagaggaaatgaggactaagggaagaaaggctagagtttgggagaagatgaagattgtggaaagtggcatgttgttgctgttccagtcgggattgccttaggatacatgtttgggatggcgagtcaaaggttgtgtgatgataaacctgtcatagactaccctttcatgtatccctgaatgtcttaagagaaaggtagattctgatagattaaagatcccaattcagttcatgaaaaggaaattgaggactaaggggagaaagccgagagtctgtgagaagaagaaaattatggaaagtggctaagtgtcgagtaaaggagtattgaagaaacctcttcctgagctagaggattttttcttcttattatcttcctttagaggattccaaaacaactgttgtgatctcatctcttaataacttcttcattgtttatcttgctttgacttggatttatattaggatttaggactgtttattttttttcttttaaatgatttcattaataactctaaattatctgctaggtttcatgatactatggggatcctcagcttttgttagataggtttgaggaacttagtgaagaaagtacacatcttgaattatgggtggatactaagaattaaattatgaatttcgtatttattagattagttgctgaggacgaattattgttggagtgactaatacttgacgaaatcttgatgcactctattctttcctttttatttgctctacttcaacatgaagactaaaactatcaaaagagagtttagatccatggaaatatggaatggatgtatttagggatggtagagtgtacaccaagctagggcatgtgcagaacctaacctaaagcttaggcagcaactgttttaagattttacaaccaatttttttttaaatagatcatgggatcataggggccagagagtgattgcgcctatctacccgaactattaacatcagataaatcaatcgtgtctctccatcttttgcaattaccatattctcttttaaggtttttttttttttgtttaactggtcaagttacttattactctatctgttattttttaattgattttctagaaaaacacacaaacacatattaaaactaattataaatatattagtttttgtgatgtagatttttttataattctaaaccaataattatttgtcttaaagtttaaaattcatcaataataactaaaaatagtgtctagaaaacttaaaaatcaactttttaaaaacaattttttttctaaaaaatcaaataataatgaatagagggagtatcgaccaaaattaaattttgttattataaaaatgtgaaattattttttcacaacaaattatttagcactttcagttgggaaaatggacacaaaaacaattgataatttctttacggaaagataagtatgttttcatataaaataaataagtcaaaataattaaataaataattcgaaattagtgaattacctctgtgaaaactatggaaaagtagaattttccatatatttttaatttctatctaccaagctttttatttcaaaaacattcatccaattaataaaataaattgaaatgtcaaagtgaatccaataaacgaataagccgacaaataaaattttagcgtgaagcccacgaggttttttttatgggccccacttttctccgcaccaaatcactgacttctctttctccgtatctttcttcagctcctaaaacccagaaccttctttttccggcgagggaagagcttcctcagccctaatcgctaaatcgatgaaattatgctcccaacgtttaacggtttaaagatcattccaaaaactcaaccttttgcgtgtctcctctcgccatgaccctaatctcaaggttcgtctctaatctcatattcagggtctctcgtgaatctctaatccgattaattttgattgcccttttagccggagattgcttaaattgattgctatgtttaaaaattgaacctttgtttataaagttttgaacttttctccaaagtcttcgtttgattagatcttcattgggtgggtttggttttggtttcttttgcagatttttgatctctagagtgattagtagaactctgttttcgaatcagaataatagaacagctattaatgtttctgtaaagttgccacaattcagaattcagagtaatggatatcacacattgggtcttcttcataatgttaaaggaaggtttttaggtagtaatcatcatcagcttgcgcgtaggagctattcgattgcagttgcgagtaatgtagttaagcaacatgctcaagtctcttggggaaggcttgtacagagagtaactctgagtcgtagttggaacttacctcggataagtcagattgctcaagcgtgtagcttgtctttagcccgttcgcacttcttgttacctggtttattggctcttacctatagacaagtggcgtatgcgcaaagggtggttccaaatcctgtggtctattctccttcacacatttctccttataggagttcgataaacttccctatcgttctctcgtctttagtgttttctgcggtcaagggtgttgttctgatcgggagagctctttatttagcaattttgttttctccaaatgttatt

SEQ ID NO: 5381 - DNA, 3000 bp, Unknown
  misc_feature (1)..( 3000): cDNA_ID_1828496_gDNA_ID_1620784_Annot_ID_50396 3000 nt of promoter + ATG
agacctagagaagctcttggcctagacgaggaactaagagctcgtctcccagcatttggatttccagtttctacaattcggtcaggaagtgtgatagttggagaatggtattgcccttttatgtttgtgaaggagaattgtagtgtaagtcaacaaatgaggaagtcaatgttctataggatcacactatcccaatactgggaacgaatttaccattgcggaaacaatgatcttgatgaaaacaatgatgaaaacgaagaagaagttgtgagagtagaggctaacgtcgtgagagaggccaactatgtgaagggtatggaggcggttaagggagagaaagaagggcatggagggttttattggtataggcaggttcaaggtccacggggaccgggggagaggaggaggaagacgggtttaaggtctccggtggggctgagttttgtggtggtagaaaggatgagaagggtaatggaggaaggagggtgggtgggaggaggaaggaaagtggtgagggtggagagagatgaaccaatcagggtttgtagaagagatggtaggaatatgaatggtaacaatgatagaaattggaggagatttgggtgttatgtgttggtggagagttttgggctgagaagagcagatggagttttgttggttaaatgtgtatttagacatactaatagattgagatgtaactgggagtgacacttcatcttatgttataaaatttattacttctatatatatatatatatactaaaatccctaagcctatgcttatggattatgttttataaactgtagtacttctttactaaatcattactctaaaatgatggaaaacattaaataaaatcagccaacaagttatatctattagaggattcttaacacaagccatttcaacaagcccaaactataaagctttaataagctatttcaattcagtctcatttttatctattttaataagctcatgctctattgagcataaacctatctttgtttggtttggtttgtcccacaatatctttactttataacttagtctaaagccgaaataatagtcagtttaaagaattgtttattaaaatatcatacatgtatggaattcagaatataagaaaataccatctgtgaatgtcattgtgttccttcaatattggcgttttagtttcatatttaaaactcatgtttctctcttttggtcgacggagaccaaaacaatactgaatgattggtgtttccgtgtttgtagtttcttaccaaacataggaaatgactctaatacgggtttggtacgactgaagaatccacaaaccattagaaagaattgtgttcatttgaagcatttgacaatcttgatttctttgtttttctttcgttgagaattattgattcaaaaatgaaaagcatgacaatgtacaaaggtttatagcgttatctatgtatttcaccctttggtttttgggtagagcgtatttcaaacctgcaggactagtgtttaaagttttggttataaatgtgtaaaatttacaagggctttgaatgtttcgtagattttgtaagagtttttggattttgtttttcaaaaacttattttcataccaatcaagattttaaaattttggtttccctacaatttagaaaaactattttgttgtaattttccatttatgattttagttttttagttttcctaaaatttaggaaatttagtttttacttcatcaacgttatttatctcaaaaactaaaaaccaatttttgggatttttaaaacaaatatataataacaaaaatctaaaactaaaatctaaaatctagaaactaaaatctaaatccaaaaactgaatcgaaaatcagcatccattcagggccaagatctccaaattttaccagttgcaaaaatgatggatgagaaatattgtaaaagttgattcatttttacatactttttttatttatcaataacgtgaaatttattagtgttttttaaataacaactgtcatgttattttaaccgatatcacactgtttgatatgaaatcacattatttcttcaaatcaaatgcaaaacacacacacacaccatttatttaaggttttgctatatatatatatatatatttttttttttaataacaaatttgctgaaaatttcttatctataaaccaaaataaaaataaaaataaaaatctaagcatatgataaagccatgtttaaaatgggtttgtaccaaactaggctataagacgaggacttacacgagtaataagtggtggggcaatataattctccaaaagtcatgccttcgccagtatcatgtcactcactgtcggaaaatgtagtttatttgcttcctcacacgcatgtcaatgagtgaatctgcgcaagaggaacttgtgcttcgtaatgcagctagattatattcatcacaaaatttgaattatgcatatttccataattgcgttttgtaaggtgaaaacgccactcaacaatagaatttacagtttttcttcaccaataaatttttgaactcataaaaataaaattgtactgttgtgccccaatctatattgattaccattctacattagtatttttatgtatttagaatatttatttattttggatgttttcaaccacccaaatgaagaaggtcgtattctcaataagagataaaaatcaattgatatatccttttcttgccttaaaagtcacaattttgcactataaaatcaaaagtcttaaataaaacgtgaaagttcatattcttgtcaacacgaattcgtcggttgtccttttcattcgttggtatttgtttttggagatgatttccactattttcctcaattttaaagacgacttttctcgttaaattgagaaagaccaaactagtctacatgaaacttcgatagccactatttttgttcttttctttcttttccttcttgttatatacagatctctgaagctcaaatcatctcaaatatg

SEQ ID NO: 5382 - DNA, 3000 bp, Unknown
  misc_feature (1)..( 3000): cDNA_ID_1828493_gDNA_ID_1620784_Annot_ID_50397 3000 nt of promoter + ATG
agttggagacgattttttaaggggaagcttttttatcactacatatttcacttaatggctaaattaagattttaacttagttttggctctgaagatccagttacaagagaaagagagattacgagaaattaatcaattgtaatcaaagatgttgtttgataaaatttataagtttttagctttacgaaatgccaataaatgtatattacgaaaaatgtaggagtagaaaaaacatttagttatgttggaataaattgatagataatgtttttaatttatttttattatgacataaacctattaggccatggttacgtcttcggccagggttacctccacctctaacaaaggtctattgcatttttgggtcttaagggttagttaatttgactgaatgacagatcattcaggaaaaattctctgatcggatttgatatatccagaaaggactctgagttaagtgtgaacttccattccaataatagaaatatatttactttagttgatccacagtttggtcattgacctatacccaaatatttcattttattgttaaggaaaatatttttatatcatattactgtggggtttatagtgtgtacaaggatatttcctcaacggatggtttttggttttcagttttgtttacatcttaattaatttcttattattttttcttgtgaaaaatcataggagcagttaaagtgagataatggatgatgtatgcagaaatggataatgtctactataacaaaactttatcatttccattacgcttcttcctgctccacttttcaaaactattggcttattctactccatcttttctttttttttgttccttgatcaaccatatgtggtatcctaaaattattttttcttctgtgtacagtgtacatatatagtttcaaatacaaaccacttaataaattaactcgaatagctaatgtcgataaaaatttcttaacacatccgcatattttccatgcatggttatggttcatgattgtcttataaagtaaggttcatggatatagacatatagttattgtatgtttatatcacttatatgtaaaaattagatagcatgctcgcgaagtaacaaagtaatagggttataagataacaagtgtttaaacaaggactgagtatgttagttattatacgtgattgagtattaagatgaatgcttgtgtaaaccatttttagtttacatgagactatgtataatcaacctttcagaaaaatttatatgactagattgcaggcccggctctaggggagtgccagaggtgccaatgcacagggtcctcatattttttttcttaatttttgtgtgttttagtaataggtttagaaaaagaatacagtaaatacatgtcacataaggttattttgtttagagttaagagtttaaagaatatcattttttttgtagcacatggcccaataaaatattgagccgggcctgctagattgttaaggttatgtttggacatagatccactcagtcttgtacttgtcctcttgatctcttgaatatctatcatattctatcttataggagaatatagtatgtgcactgcaggtgatggcttaagtgtgtgcgtgtaagatttgaccaaaataaacgtgtaaactgttgaaatatgattcaacctcgagactactctaaatcatcttggagaagcttagacaaaaacttgaagactgcttgaagtagaagaaaggaaaaagagtaagtaaacacaagaatcaactaagtgttaaacattctagttgatgcagaggatttcaggggtttaaggaaaaggctaagactctgtaccaagtagagattttgaaaggagcttatgatgacacttgtcatcatatgagaggagctgtcttaaatcatcatcgactataaaacctgaaacagagcgtacaaagaagcgagcttggtgattagcgtgatcattcgattttagatcgttgtgtgcgtaagagagatgatgatgagagatatcttgttagagtcttctcaagttagggttcatctctgattcattcttcttctttgttcttcgctatttttcttcttctttgtaacacgattgatttgtaatcatgagaaagtgagagaacacaaacacttgtatctcttgatctttagtggatgtttgagggtaccgatccctcacgagacgtacctgttgttggcagggaactcgttaaaatcgtttgtgtctttgattgtgctttttggattcgtgaggttatgtgtttcgattaggtggaatcgatgctttgtttcataacataaaccatcaaattttcatatgttaaatttacagtaagaatgtcataggaagatgttggttcactttttaaaccttaaattgtttgtcttactcaaaatattttaaatctactagtatgtgtatgctcacaagaaaaactttagatttattaacacaattttttttatatacctttattcgttttctttctttttccctccttttatatcatcgctttagtccatccactaagttaaagctattcattatgagtggctccaggctacaggtatctctaattttcattagttagtataattttattaaaatcatttactttaatcaaccgccgaatttacgaaatacaaaatcccaatttatctgaaatattgaaatgaaaagaatatcttagatctgaattttaaatagtaaaaaattaacttactaagaattgagagtggaatgtgactgttatagctttatctttttatctttactttcataaaatcaaagttaaagacttggcaatcagcaaacactaaaattacataactttaccctccactatcaaaagttacattgagccacccaactactttataatctcgtcgtttacacccctacaattgttaaaattcattaataaaatccctcagattgatactaaaacttcatcataactcactaattcccttaaagcttcaagaacgaaaaaatg

SEQ ID NO: 5383 - DNA, 3000 bp, Unknown
  misc_feature (1)..( 3000): cDNA_ID_1828481_gDNA_ID_1620784_Annot_ID_50401 3000 nt of promoter + ATG
gttatttgtatacactctttacatcctcatattcatctgttaatttggctttgtaattgattgtaatcacatcgtgttatggtcaatcatatataaatattttaacgatatatcgagctatttttcaatttcttatagacatttgagcgattatcatacttcttgccacaataacaagaactatgggaatatacaataactattaatccctaggatggaacttggaagaggtttcactttttgatttcactttcaacaaatgcgtgtggccacataaacttttgagctttgacccaaatgttttatctaaagtgggcttgccaaaaagctcttgttaaaagacttgatcacctctagattaatagggcttgactcggacatttgtgccaataggaaacaaaaatggataaccaaaaagaataccaaaagctgttagatagaataggaaaaagtgttaagtgatcatcagtacaacaaatgtcacatctaataaacaagtaacaaagtactacacggttcatttacaaatgagcttgtttgcaatcttcaaggaaaaagtagtatgcagcaaatttcttccaagcaggaacattttgtttgttttcgcgatttgcagtagcgaacagaattgaccatgcacgtttgtattttgtaagattgacgttgagatcacagcccaccgggactggtgagattaaagcatgttagagtatgttagagttttgtaaggtaagtacgaccggataatacacatattgaattgctatttgtcattaataaatgtcatcacgacagtcgaaataacatcatttgtagtagacatgtatgttgtcgtttgttacaatattttcttaccagattagtattcattatagacgtcaatgcataaaattacagatgtacgaacgtatatgtagtaccatgtgcatggttatatcaatattcgttttaggtttgttagaatgcaaattaatcgttgtagagccatgtccgcattgcattgaaaaatgtaagtctataacacagttttacatgacatgttaatgactagggtttgccaaaatatataaatacttgatttgattagttatatgtccgaatctgttttaaattatcatacgcgcgccaattacaaattgtttatcacaatatacaaactacaacaccatatttcattatagtaaaaccaaaatttaactacgaatctgaacgtagccctgctttatgataaatatttcccgaaaaaaaatcattagaattcctataatgataaaaaaaacgctggttcttatggtaacaccatgtgaaaagtgatgactttttcatagcagtagaagtagtcaactacctcagataagtactgtaattaaataaactaattgcccaaaatgatacaactttgtcgcattaaattaaaagttaaaccttcactggatgcattaccaaaatggtcatataacaatacgtaatccaactcgctgtagctatcaatctctttatcacaaccaaccaatattcaacaatgttgttttatttatttttcatatggtttatttaatcacctcgacttttttggcatcgatcacatctacaaataaattgttagttagcacgaccgttattattactttatgaagaattgttaatctgaaaaatatccttttgatatcagttggaaatatttttttaaataatttattatgtagagcttgcggctgagtcaaataaaaataaaattgaaaactaaaagcgtgattgacaaaatgactttaaaggctgatttgtttttgaaaaaaccaagttcttaagaacacatttgaaccaatcatcgaaatatatggtggaaatatatttctaccaaagatttgttttttaaccaaataattgaacacaacgctaactgaatattttataaaactgatacagatttattaaaaattttgctaataaacattataaaattgcttttaccaattataggatgtattgtatctcttggactttaatatcgttgacgatcttgacaaataaaaagctggcgtttcattaaattggtatttacaatgagaaaaatgtgtgggatccaaaactggatataggattcgctttactgtatctggatccgaaactctaaaatatgatgtttcttatgatctggattttttcaaactataaatgatttctgaatttccgtgtatgtcaaccaatatttaaaaacagattatatttcttaaatatttttcagattttttgaaaaatattctgtaaattacaaatgcaaataaattatttaagaccgttaaggatcaaatatgtttttagtttattcaaatctctcgttctctcatatcgctattttgtacttagtttagataaaagtattaagtttggcttcttagaatttgatgtttctttttttcgtttttgctatcgacttttgttttttttttttttactattttggtgttatttatctattccttaaattttggttttgtttctgatacttatattttctgtaatttatgtcgcaacttcaaaaataatataaatactttacattgatattaaaaaaaaaaaattgagctctaatgacctttggagctcatgctcatctatggaaaaaaaaatccatgcaggaagaaccaagaggaaacggtatacaaaataatattaaataaataattatttgtcaataaaataaataaaaactcaccaaagtacataacagttcacacagcatgtttttagaaaagatcatatactattggtttcaaagtctttgactttgaatgtttgaacttttcaaggttcgcctactcgccggtcgtctcctttaaccttcgtctctgtgtttatataagaacatatacgtatttgatgattacaaaaagacaattctttatccttctttagatttctgtggaaagttcactatttattaggagagacaatttcaaaaaggaaagctttttgcttggaactgttctgtgagttcta

SEQ ID NO: 5384 - DNA, 3000 bp, Unknown
  misc_feature (1)..( 3000): cDNA_ID_3076827_gDNA_ID_1620784_Annot_ID_168084 3000 nt of promoter + ATG
cggttgatggtcgagtccaaggtagaatgcttcgatattttacgcatgcaccagtcaacatttaggactttatgcaagattctttcagaacaatacaagttagaggagtcctgcaatatctatcttgaagagagcgttgcaatgttcatagagatggttgcacaagatttaactgtacgggtcatagctgagagatatcagcattcacttgagacagtgaaaaggaagctggatgaagtattaagtgctcttttgaaactcgcagcagacatagtgaaacctacaagagatgatgtcacaggtattagtccctttctagtaaatgataaacgctatatgccttattttatagattgcattggtgcccttgatggtacacatgtgtctgtgcgtcctccatcaggggatgtggagcgatatagaggtaggaaatctgaagctacaatgaacattctagctgtgtgtaatttcagtatgaaattcaatattgcatatgtaggagtacccggaagagcgcatgacactaaagtactaacctactgtgctacacacgaagcttcatttcctcacccacctgctggaaaatattacttagtagattcaggatatcctactagaagtggctacttaggtcctcaccgtaggactagataccatttagaactgtttaatagaggaggtcctccgacaaacagcagagaattgtttaatcgtagacattctagtttgagatctgtaatcgaaagaacatttggtgtgtggaaagctaaatggagaatacttgataggaagcacccaaagtatgaagtgaagaagtggattaagattgtgacatcaacgatggctttacataattatatacgagattcacaacaagaagatagtgattttaggcattgggaaatagttgaatcatatgagcagcatggtgatgaaaatgatgggcatgttccatatgtgcctactggtgacagagtaatggagaatatacgagattccatcactacagagatggccaaaggaacaagactcccatattaacaggttccatctctctgtcttatgttattgattgtctctgtcttatgctattgtctgtttctgtcttggttttaaattttgtgactaatagtgacagctgaatggtcacgtcactacataagttggttgattacacacgttttaaattttgtgactagtagtgacagctgacaagtaattcgttgaacatagtgttcattagtttggattagacttgattcaattgaatagcttgacataatgacagctgaatggtctatgtttctggttttagctcattgttgaatagtctctctctcaatctagttgttgtattcttgagcagctgcaattctagtgtctcttgatgttgtttgctttagtgttatggtttggtaatatgcataagaccatactttggtttctgattctagtttgtgtcatgattgaattacttttgagaatgtgtcatggttgaatcgttaggtaagtactagccaatatgcatgcttgctcttattggagaattggtgatgattcaggttattgctcttctttacaggtttagtaatttgaaattgaagtttgaaatgggaaatgatcaacgacgacaagatttgaagcacaaaaccaaattctctttttcaaactttactttgatttataagaatgtagcaattgacttgttacttaacagagggtattttagtcatttatatatatatgagaaagtgaatgattcatccaaatgatcaaacaaacaaagctctatctaaatgatgcatttagatgaattagcaaatgattagcaaatgatcaaacaaacatcattaagatgaatcattcaaatggattatttggatgaatcatttggatgcaaattccaaatgatcaaacaaatagagcctaaattttttgtttattccaaaatattgaagttgttttgctataattttttatttttatatttaaacttactaatttcggtttctttttggtttcaattaaagcgtaaaagccgcacttataaatagtttagtcgactgttttttgaaattagtaacttaatggtctcggaacagttatgttctacctgagacacaccaacgttcactattaaagtggcgatttttttcaagatatagttaagtccaaatggtgggaattgaattaattggccatactatctgtctcgatcgtgattttaggcccggcgacattagcaagtctttaacatgtgtctcttcgaacgtttagattacgcactgtatgtgttcgatgaaatgcctgaccgaaatgtgagagttcaaagctacgctctttttatctggagataaaaggagtctcaggaatcgcttgtagatcctataaaatagaaagtgaactgctcaagcctaagctctccagttgtttctttttttaattggtctttggtctatatttgagttcttgcatctcggtaagtcggtatattggcttacacacgagatgacgaatcacagttccatcttttttattgattcagagtgtagacgtctacctctcactgagtctggtcaattttgcgtggtttgattgggtaaaagtttggagttcttggttcagacaatgaaaggtaagagctacaaattttcatcttttgattggttcaaactgttgatgactatctattattggttgtatcaaagacatgaaagtgacacaatgtttctatatgaggccaaccgttgcatggtttatttggaagaaagttggaatttttaagattcaattctttgggttcaacttgtaataaagttgttttataaacaaggtttaagttgattgtgaataaagtaatgcagaatcttggaagatgggtgctgtggtcaacactgtttagagaattattgtttattaagtacttgagtttgttttcgtggattactttctcttgcactaatctgaagaagattgttcttggagacacaaggagcacac

SEQ ID NO: 5385 - DNA, 3000 bp, Unknown
  misc_feature (1)..( 3000): cDNA_ID_2992819_gDNA_ID_1620784_Annot_ID_168080 3000 nt of promoter + ATG
cattgccaacattgctttgagtaggaaggatatgcgctgcttcatcatcatctagatttagagggatctgccttgattcaccatcatcatcttgagttatagggatctgcgttgaatcaccatcatcatcttgatgcattgagtctaatttctcttcaccttgtttaggagcccagccctcggctccactgatatgcactgtaccaaataccttttccatcaaatccacatttgccactggcttatctttaaatttccgagctccaggccattcttaacaaacaatgagaataaacaaacaatgagaacttgatctagaacaaacaaaggacagaagaagtttaagaatctatataccttacaccgttcattccaccaatcatcagacattcttatgctcccatttggatagtaaccaagaccggttctgttgtgagtcagcttcttaaaaccttcatactgcttcttacaagtagtaaacttgatcccaaattttctccatgtatgtctttcccataaacctcataaaatctatctataatagtctgtctcccagcatcattgacattctgattcctaatatttcctttaagcttctcctcaattcttagttcaaggtagaaacgagtttgctcatcattccacgcaagattcttagttgatcatgtgtttttgtacaaaatcagtctaaattacagaaaatgttacagtaaatctaagtttagaggaaaatatactcacatcggtaccattgatagttgtcatctgtagcacacaatgaaaacaaacgttttgtagttgtgttagaacaagatcaaagataccaaacaaataaaacaaagatcagagataacaaagcaaacaatacacaacttatgataacaaagcaaagcaaataaaacgtgtacaaagattagagataacaaagcaaagaaaaactatttgatattgaacaatcatgagatattattcttgactatttctacagtatttgaactcaaaccttagacgaactcatgctactactacagaaagccaaatgcaaccactaattacagaggacgtacctgagaaaccaaagctttcttacttggagacaaaacttgctgaaacaaggactgaagagaaaaaatcttttataagatgaaattctcccgtataaataagcagttataagctatacacgagtcacaacatcatcaatcaacaaaactcagagccaaacttgttcttcgagactaaatagagactaatgcaaagttttttatcaatgagctatacacgagtcacaacatcatcaatcattgtatctcaaaacaaatcagataacacaatctggatcctagctttctgcatcaaaaatacaaaagacctataaacacaaaaacaattccactttggatgcaattgaacacgtcaaggaggcagctgaagtttgtaactatggatggtcaatctaaagagggctaaagtgcagatgctaaagtggcagcaccaaatggttctgttgctcctaatgtagagacaacaaagcctcttaagagcaaatcgaagactcaaaagcaacacaaagcaagcaaagcaacacaagccgtaaactaaagctaatcgaagaatcaaaagcaacacaaagcaaagtaaagcaaacccacaattaaacaatgtaaccatggtggatcaaacccaagaacaagtgattgcaacaaggatacaaagagaaacaacgagagagacatggagcgagagagaggaagcgagagagggagagagagagagagagagagagagaaacacaaacctactacactccggcgatggatccgacgagtctccagtgaagaatcggcgacggcgagatcaccggcgaagaatcagcatcattgacggctatgaatctcaattttgagtgttttgtgtcgaggagagggtgaagaagagatgtggtttttggatgtaattccatatattagattagggtattattgacattttataattttggctgaatcagcttcagcagaatgaacaaatcaaactcagtcagattttttttattttttggatgagtttagaaaaaaacattcaactgaatcattcaaatgatctatttaaacatgaaaaacaaacaacaattttcatcttcattgagatggttcatccaaatggacaaacaaacaggaccttaatagaacaacccaaaaaagaactcttacaaattgattaataaaataatttaatcaaaaagaattatagatttttattttaaaaactacaaatagtttaaaaaaaatataatatttacaatttccatcacaaattgtttcttaatgcccaaggatgaaggatcacatagttaataagtaattaagtactattttattcatgtactttctctttgccctatccagagttgctacaagcctaaaactcggttttaccacgatttttctttggtgtatttgacagactattaatggtttgtttatctctattatcagttgaattgttatatcaaaatttgaactgattgggtataaaaagaaactgagaactgattcatgctaaggaaaccttgtttaacaaataccatggatgctttttaaccgtatcagcctctccaatgttttcgtaaatcaatagttcaaaatttttttctaccacacaagtgcatctccattccaattttcaatctatataaatcatatgtattttttgtatccaatagtcatctttgtaaagattttttgttcgtgtgtggcggataagcaaaaacagaataacataatctcttatccaacttatattgccacgtggacagatatagttggtgaagcagatactaatctaatctgagcaaaaccagttgggctatttgaaagccacaagtacttggaacctttgtttcttctaccctaacatagcccttgcaaaccataaccaaaccatcatcatcatcatctcttggtgacagaagaaaagagttgaggaacagagaaaatg

SEQ ID NO: 5386 - DNA, 3000 bp, Unknown
  misc_feature (1)..( 3000): cDNA_ID_1828477_gDNA_ID_1620784_Annot_ID_168077 3000 nt of promoter + ATG
tttcaacaaggaatgattcggataatgtagatcccgagaggtttaggtttgcgcgggatacatctttcgggcgtagacatctgagtttctggagcaaatcaactattacgctgtggattgtatgtttcttcaggcagttctttagatctgtaaccaaagttgattacttaacactgagacatggtttcatcatggtataagtcaatcttttgatctttaacttttctgttgtataataacttatctctcaaggcaaagatcttacagcattgcacgaatgcttcttctttttcttctgtttcaggcccatttggctcctgggagcgacgcaaggttcgatttccgaaagtatattcagagatcactagaggaagacttcaaaaccattgtcgagatcaagtatggaactaattaagattacaaactccacttcactaaccactacttaatctgatgttttaactgcttatatcttcagccctgtgatctggttcatagctgtgctattcctcctgacaaacacaaacggtacactcgttttcaaaacgtcgctgcatcgatacctctttaaaagccttcaacaatccaaaactaatagattactctgcttttctaatgaacaggattgaattcttacctctggctaccgttcattcccttcatcgtaagcaacaaccaaaacctttagactaaacctattttgtttcggtttcaactccgtaacaagaatgaatgtataaacaaactgcaggtgattcttattgttggaacaaaacttcaagtgataataacaaaactaggacttagaatccaagagaaaggcgacgtagtgaaaggcacaccgctagttcaacccggtgatcatttcttctggttcggtcgtccacgtttcattctcttcctcattcacttagtcctcttcacggtatacattcatcttttactttctactctctctccttacaaaaatgcctgaaatttaaccatttctttttcgccatcatcagaacgcgtttcaactagctttctttgtctggagtacggtaagcaagcaatcctgcattctccatgaacttgaaacgtaataatacctatacaatcatcattttcatcaaaatcttttgttatctcttcagtatgaattcggtctaaagaactgtttccatgaaagcagagttgacgtgatcatcagaatctcaatcgggtaagtggaaaacataagcttcaaaacccttcatagaaaccatcccttaacatctaacaaagtcacaaccttttggaaaacataagcttcaaacatagaactgagaaaccattccttaaaatctaacaaagtcacgaccttttggatcttgcagacttttagttcagattctttgcagctacgttactcttcctctatatgctcttgttactcaagtaagatccacgcacacacaaaaacacataaagattgaaactttcaatttcaaaaactgacatttttgaattcaattttggtgaagatgggttcaaagatgaaaccaacagtgttcaacgagagagtagcaacagcgttaaagagttggcatcacacagctaagaaaaatatcaaacatggaagaacttcagaatcaacaacacctttctctagtagaccaacaacaccaactcatggttcttctccgattcatctccttcgtaatgctcctcacaaacgaagcagaagcgttgacgaaagctttgcgaattcgttttctccgagaaactctgatttcgattcgtgggatcctgagtctcaacatgaaactgctgagacttcgaattcgaatcatcgttctaggtttggagaagaagaatcggagaaaaagtttgtttcttcatcagtggaacttcctcctggacctggacaaatacgaacacagcatgagattagtactataagcttaagggatttttcgtttaagcgatgatttaatgttttcttaattcattatttagtgatttgttaatatgctaaatgaaaccagttcttgtaaattttctatactatgtttgttaaaaccagcccttgaagctttaatttctcaatgtaaaagtctgatgattttggattttaagactatggagattcatgggtagttggtgaagagtgttcttgtcttttgggtttgagagtttgtggaagatgtgttagcagatttagaaagcatgcaaggggtttgataaaatgcctgagtgagacttggttttcctgaaacacagtggtttctgggtgtagatagattggattggcgaggattgtattttgatatggtttgtagaatctgaagactcgttttatcgccactatttttttgagtattgacaaggtgattagggatctcttgtgaatgccttcaaggatttggttgaaatgcaatttgctagatagctctttagtggaatgttatattcatggggttcgatgaatgacggggtatgtgcaaaatgagaattttaaaaaagcaattcgtgaatttatgccggacaaagggttggaaaccaagatcattggtgctttgcatgcttgtgcttacgcaggtgatcaggacctagtggccaggccaggaccgttgtatcttggaatactagatggcagatacgttgtattggggtcaaaaaaggtcagtggtacaattctcatgtttgaaaatgaatggtagcggtgttgcctatttttcattggttgtgggctcaatttacctgaaaataataggtcaactgttgcatggttgattgggtaaacataagcatttcacttttctagaatctgtattataaaacaaggttttaagttgatcgtgaataaagtaatgcagaatcttggaaaatgggtgctttgtagtcaacattggttagaggtgcttccattttctattcagcacttgactttgttttatttgcttacttttctcttttttacagtatacatgttctcttcctacaataatctgaggagattgttcttggacattgggg

SEQ ID NO: 5387 - DNA, 3000 bp, Unknown; identical to SEQ ID NO: 5382
  misc_feature (1)..( 3000): cDNA_ID_1828493_gDNA_ID_1620784_Annot_ID_168068 3000 nt of promoter + ATG

SEQ ID NO: 5388 - DNA, 3000 bp, Unknown; identical to SEQ ID NO: 5381
  misc_feature (1)..( 3000): cDNA_ID_1828496_gDNA_ID_1620784_Annot_ID_168067 3000 nt of promoter + ATG

SEQ ID NO: 5389 - DNA, 3000 bp, Unknown
  misc_feature (1)..( 3000): cDNA_ID_3076852_gDNA_ID_1620784_Annot_ID_168065 3000 nt of promoter + ATG
tgagaaaatagggtttccgatttggatccttaattcagacacctgactcgtcttctcatcctacccccaattcaatattcgtcgccaatatgccgcaaagacactcgaagaacaacaatgatcttgcgtatttcacttacgacgagaagaagaagttaggttatggaactcagagagagagattggggagagactcgatcaaaccctttgatgcttgttctctctgcttgaagcctttcattgatccgatgtgttgccataagggtcatgtcttttgcagagagtgtatacttgaatgtttccttgctcagaagaaagatatccaaaggtataaactttttggagttttctttcaaaagtttggaactttaagttcctttgttatgtatttatgaaacactttggatttgtgattgaagtttctagctttagtatctatataggattgttgaattcctcatgaatctggtgtgaattggatgattgaggttcttagatcaagtcatggattagatcaagtctctttagcatcactctgataacaaagatctgatatttaatgcttgaatagtgtttgtttaaaggagtactggttttgttactactagtcccacagtttttgagaaggagaagctggtaactttacttgagttttggcatgaaagcttggataaacgtatggagtgataactaaagtaatgttagagttgattttgatgcttctgttttgggtttaatgagtacgggtctcagggttagcctatggttgcatatgattgtttgagtttgtatataaataaccaccggtgtagaaactgttggagctgactctcctcacttgttaggacctgttgggaattttaaaattacatattttaaaaagattttgtgtctgatttatctttgctctgtatatttaagatactgatatgtagtgctgagatgtctataggaggcttgctgcacattcgtctcaaaagaagcaagataaggatgaagaagaagagaggctaatgttacaaaaggcgagagagctcgacgaatttgatcagcaaaaccatagtgcaatgcctcgaaacagtgacaagaatcacaacgaagataagaatggttttcatggggcaaacagtgtgaagacgacttcctttgaagaagaagcgcttaggacaatgaaagccttctggctcccatcagctacaccagcagcttcggtcagagtagatgctccagaaactcacacagtctgtccagagggcaaagagaagctcaagcttaagaacctctttgcaattcgtttcacagaagacaacagcgaagaggaagagaccaagacaaaatcagcatcttcaagctcttatgataaatcctacatctgcccgagctgcaaagtcactctcaccaacacaatgtccctcgtggcacttagctcatgcggacatgttttctgcaagaagtgtgctgagaagtttatgcccgtcgacaaagtctgtcttgtgtgtgacaaaccttgcaaggataggaacttggttgggttaaagaaaggaggcacgggtttcgctgagcacgacgatcatcttgaggctaaggagtacaagcatttgggtagtggatctggtttggggcttgtgaggccggttaagacatgatgtaaccacatcaaatgttctgttccagttacagaaaatatccttgattttgtaatacttatggcttgtatcctttgctacaactaagagacgctgctttctccattttggctcttggtttgtccttttgatcggatcctatttgtgtttcttccctacggagatcaaatggaaatttaacatttaagtaattgatcaattcaaatattcttcttttaggctatgaacatgcagagatagaaatgatcaatgagctgttcaaaatattggcccataaattatctcaaacataagacaggttgttacgatctcagtttataatgtccatccccgtattattatttgtttcaatttctcttgtagttgtggctgatacgtacgtttaggatcacagaatatcacaaggaagctccaggttagtaaatttacataatgtgcttagctttcatcaatgtaaattaaaattgatttggattatgatgggtgaatatatggactagggtaagtttaaagtagtggtggtatgttgtatcctaggaataagaaaacttgtagcactagcatggaacacaatcctcaccatttttgattattagtaccaagtcttgcatgtaagtctcattttgcataaatttttatagaagtgtaaaaaaccaaattgtctgactatatatatttttcatacaaatattcttctcatatatatttacttggtatttaaacattttatttgtttgttcatgttaacgtttaattttcaataattaaaatctaaataattgtttagtgaaaatttaaatatatatatatatttcaaattatttgttcgttactgtcattgatgattctattcaattttaagtttggattttctttttttaggtaaataatttattctttgaacaataaaaaaaggtaaattatttcttaattaattgatctcctttcgtttttaagattctagtatatctattaattataatatcaaaaactaaaaatttccactttaatcctagataattttcttattaattaaataatatgagttaatgcatctcttttatccaatcaagtttttgctttcctaaaatctagagaatccagtaacatttttttttattttagtagagaatctaagatttattttaatgaatgattttcttttcgaaaatttaaatccaaagacttttaaaacttcaaaaaaaaacaaaaaaaacaaacatatatgcctatttcggcctttgttcataaaaacaaaatttgggtccattatggcccataacggattacatcttctatataagcaattagatatcactataacctaatacttttgattctcaacaaaaatatg

SEQ ID NO: 5390 - DNA, 3000 bp, Unknown
  misc_feature (1)..( 3000): cDNA_ID_2153638_gDNA_ID_1620784_Annot_ID_168063 3000 nt of promoter + ATG
tctactatcatgaatcaaaatatatccgttttatattgatatcctttatatattgatatcatttacagattttcttttgaaaatcttttacgtgaaggtttttttccataaaacattcgaatgaaattgctcatatagtttatgaagtttgttaattgttcccaatatatttagaatcacagaagtaacctttaaattgtgacatagtgttacaaagataacattggtaaaattactttatttttggctttttttttatatgaacggtaaaataaaattatctatttaaactagaactgtacggttttctttggaaaaaaatcagtccaaaataaaagagcttacatgaaaaagataaaacctcgtgctattgccttttttgcaagacaatcagcacgtatattgtttataagagtcctctttttaaatgctagtcatcatgcatgggattaactatatatcaactttctcttatgttacatcatttttaggtgtattagaaggaatacaaatcagaagaagatacttgggagccgtatgatggattggggtaaggttttttaaattactgctttggccttctcatgttgtcctctaatctgtatatggtttcattagaaaatacaaataaaaacttaaggaattcgtaacgaagggtttcaagtcaaatttattgccacttcttgtaagctaagtcatgttaattacacatgtaaatcctccaaatatttcttgttccccacttttcgtaacttttcgaccttgtgtcgttcttttaggaatatgtgcatcttgtatgtgggggtcttccatgccagggacttagtggttttacaccgatttagaaataaagataaaccacttcaagatgaaaaaaaacaatgaagtgacggtttcatgaatatcatagactatacttgaagcccaaatacgtcttgatggagaacgttgtaaatcttttaggtttcatggaaagatttgttggtcgttatgttgtagctcgtcttgtaaacaagaattaccaagcaagatgaggcataatggctgctggtgcatacaatgttcctcaatgtaggtacatggtgtattagtatcggtagattaaggatcccaaatcaattcatgaagaggaaatgaggactaagggaagaaaggctagagtttgggagaagatgaagattgtggaaagtggcatgttgttgctgttccagtcgggattgccttaggatacatgtttgggatggcgagtcaaaggttgtgtgatgataaacctgtcatagactaccctttcatgtatccctgaatgtcttaagagaaaggtagattctgatagattaaagatcccaattcagttcatgaaaaggaaattgaggactaaggggagaaagccgagagtctgtgagaagaagaaaattatggaaagtggctaagtgtcgagtaaaggagtattgaagaaacctcttcctgagctagaggattttttcttcttattatcttcctttagaggattccaaaacaactgttgtgatctcatctcttaataacttcttcattgtttatcttgctttgacttggatttatattaggatttaggactgtttattttttttcttttaaatgatttcattaataactctaaattatctgctaggtttcatgatactatggggatcctcagcttttgttagataggtttgaggaacttagtgaagaaagtacacatcttgaattatgggtggatactaagaattaaattatgaatttcgtatttattagattagttgctgaggacgaattattgttggagtgactaatacttgacgaaatcttgatgcactctattctttcctttttatttgctctacttcaacatgaagactaaaactatcaaaagagagtttagatccatggaaatatggaatggatgtatttagggatggtagagtgtacaccaagctagggcatgtgcagaacctaacctaaagcttaggcagcaactgttttaagattttacaaccaatttttttttaaatagatcatgggatcataggggccagagagtgattgcgcctatctacccgaactattaacatcagataaatcaatcgtgtctctccatcttttgcaattaccatattctcttttaaggtttttttttttttgtttaactggtcaagttacttattactctatctgttattttttaattgattttctagaaaaacacacaaacacatattaaaactaattataaatatattagtttttgtgatgtagatttttttataattctaaaccaataattatttgtcttaaagtttaaaattcatcaataataactaaaaatagtgtctagaaaacttaaaaatcaactttttaaaaacaattttttttctaaaaaatcaaataataatgaatagagggagtatcgaccaaaattaaattttgttattataaaaatgtgaaattattttttcacaacaaattatttagcactttcagttgggaaaatggacacaaaaacaattgataatttctttacggaaagataagtatgttttcatataaaataaataagtcaaaataattaaataaataattcgaaattagtgaattacctctgtgaaaactatggaaaagtagaattttccatatatttttaatttctatctaccaagctttttatttcaaaaacattcatccaattaataaaataaattgaaatgtcaaagtgaatccaataaacgaataagccgacaaataaaattttagcgtgaagcccacgaggttttttttatgggccccacttttctccgcaccaaatcactgacttctctttctccgtatctttcttcagctcctaaaacccagaaccttctttttccggcgagggaagagcttcctcagccctaatcgctaaatcgatgaaattatgctcccaacgtttaacggtttaaagatcattccaaaaactcaaccttttgcgtgtctcctctcgcc

SEQ ID NO: 5391 - DNA, 3000 bp, Unknown
  misc_feature (1)..( 3000): cDNA_ID_3076862_gDNA_ID_1620784_Annot_ID_168061 3000 nt of promoter + ATG
gcatgaatctcattgttcgtgatcaagttttactccaacatccgaaagtgttcgtatacttgcattgtgaaaagcggtatatttcaaaactagtcgttgattcaactatatatgttgccaccatgaatatactaaacagaaaatggaagaaagctgaataagattggggactataaaatttagcatatgtgtccgataataataaaatccaaatatcgaccgacaagagcttagaggagtgtcggtgtacatatcgatgggatcgaccagaccgttagagaaaacaaccgatgggctgacaaagattcttcggatttaacttatgttgtcatacggtggctgtgacacattcttttgacgttcatttcataacttttattttatcgatatcaacctaaacgaaacaagtgttttcataaataaataaaaagttagtcacgttgcaataatgaattattatttttttcatttttggcggagtggactggtgggcttaagcaaattgatcaaatttgttttgacactttcttagtttatattaaaattaattttaattgcacgatgaaaacttactagtcagtcgcatggatctgacctaactgtctctgtatttcagtgcttcaaagctcttttaagttttaagtcaaaatgcattgtgtcgcatagagagaccattaagaaaaaaattcaattagttcttaattaatattttaataataattagataaattggggcctttatagtcttcatttgtcctcaatagccattatccaataaaatattaccagtttcatttgatatttttgtgtcatatttttaccatttaagacttttcacaattcgaatagccatgaacaataaaaatctacgagtttcatttgatatttttttttttttgccgaatacatttaagactttcacttctactaaccatgaacaatggtctcccaattacaaaatatatttttgaatcattggactaccataaatgattagtgtcttttttgtattacatgtaacgtaaaaataccattcttcaagcattcataacaattttttttttgtcaagatacataacgtaaatttgaatttcgtaataacgatactagcacaatttagcttagaatatgtccaatttttttttttattttgaaaggagatagatatataaatattatatacatggatatcggtgaaattatgtttattatctatgcctatcgtttgataaaacttgtatattttatggacggtgacacagcccggttcactatgcctcgagccgtataatgatcataaagaacagaactggttactattatcaggttcaacaaatccattttttgatattttgtgtggctatcagtctatcacataaaatggaaaaagaattaagagaaagaagaaaaacaaaacaatgacttgtaattaaagtgcaataattgattgacttatcaaatttattagaagaataaaatatttacggaatttagaaaaagctagttgaaaagaataaggaccgtttggtataaagagattgtgaaaaaagtcacaaacacaataggtccagaaacggtgacgtgacacacagatcgaaactcagcatcgatcgacgatcgtcatcatataccatttatccctttagcctcaagccacaagaacaaatcttattttatagtactatttttaaccgaaagaatccgatcgacaatgaaataaatatcgaactcatatcaagtgctaactctaggttttgccattaattttgcgttttccaatcgagctaaaaacaattgatcgtctattaaaaaaataaaaattcctatgatcgctttttcgatctaaaactaatttttagtaatagtaatacctgttaaagtataaatatccctcccaagtactgaaaactcaaacctgaacgagctagcctaggactcaacttttatctcgaaagaatctttgaatattacttttgaaaataagtgagtctaatccttgaagatatatgttttaaagttttttttagcaaatgcgattgagaaaacatatattttaacttcaagataatcattactgtatgaaagtatggataattaattagaagaaacgttgttcaaaaattggttagtcgtttataattaccaaaataataaaacaattattaatacgcttgcatagactaattagtttttttttttcctaagcttactaaagtgatctgataaaaatcatgtatggaagcatgaaagtaataaaaaaatatcaagtttcaaaattttagtctttcatatttatgtacatttatatatatacgcatgcgtagactataatcagtcattttcgtgttttgtctatacaattactaaaaactgatttaatcaaaatcgtgatatgttttctatttctgaccacttaatataaacgatcgatttgtagaatttgatggcaaccaatcaaaggttaccgttagatataatgtctatatataaatagtatccccttttggcatcttgcataatagtaccaaacacctatctaatctcaaattaaatatttaaatatttataaaatgaggatcattatcacttcttcgaaaagctaagcagcaaagaaacaaatctcacaaagacagttgttcttataataatagaagaaaattgagggattaggaacactattattacaacatctttctgtcaaataaaatatttagcttaaggaaaaaatttaaaatcaagattatttaattaaaaaaatcacataggaatgttatgatgatataagtttttgtcttcaaatgtcaactaaattccggtaatttccacacacttgtccgtacttgcctatataaacatacacaccctcataaacatatatcaaaattttacacttatgctcttcatatcacatacaacaaactcatatatataaaaactttaaccttcgtatagcaacgatctagtagaaagcttatactaaaactttctgattctcttaat

SEQ ID NO: 5392 - DNA, 3000 bp, Unknown; identical to SEQ ID NO: 5386
  misc_feature (1)..( 3000): cDNA_ID_1828477_gDNA_ID_1620784_Annot_ID_50402 3000 nt of promoter + ATG

SEQ ID NO: 5393 - DNA, 3000 bp, Unknown; identical to SEQ ID NO: 5385
  misc_feature (1)..( 3000): cDNA_ID_2992819_gDNA_ID_1620784_Annot_ID_50404 3000 nt of promoter + ATG

SEQ ID NO: 5394 - DNA, 3000 bp, Unknown; identical to SEQ ID NO: 5384
  misc_feature (1)..( 3000): cDNA_ID_1828462_gDNA_ID_1620784_Annot_ID_50407 3000 nt of promoter + ATG

SEQ ID NO: 5395 - DNA, 3000 bp, Unknown
  misc_feature (1)..( 3000): cDNA_ID_1828541_gDNA_ID_1620785_Annot_ID_50408 3000 nt of promoter + ATG
aaaatttagcatatgtgtccgataataataaaatccaaatatcgaccgacaagagcttagaggagtgtcggtgtacatatcgatgggatcgaccagaccgttagagaaaacaaccgatgggctgacaaagattcttcggatttaacttatgttgtcatacggtggctgtgacacattcttttgacgttcatttcataacttttattttatcgatatcaacctaaacgaaacaagtgttttcataaataaataaaaagttagtcacgttgcaataatgaattattatttttttcatttttggcggagtggactggtgggcttaagcaaattgatcaaatttgttttgacactttcttagtttatattaaaattaattttaattgcacgatgaaaacttactagtcagtcgcatggatctgacctaactgtctctgtatttcagtgcttcaaagctcttttaagttttaagtcaaaatgcattgtgtcgcatagagagaccattaagaaaaaaattcaattagttcttaattaatattttaataataattagataaattggggcctttatagtcttcatttgtcctcaatagccattatccaataaaatattaccagtttcatttgatatttttgtgtcatatttttaccatttaagacttttcacaattcgaatagccatgaacaataaaaatctacgagtttcatttgatatttttttttttttgccgaatacatttaagactttcacttctactaaccatgaacaatggtctcccaattacaaaatatatttttgaatcattggactaccataaatgattagtgtcttttttgtattacatgtaacgtaaaaataccattcttcaagcattcataacaattttttttttgtcaagatacataacgtaaatttgaatttcgtaataacgatactagcacaatttagcttagaatatgtccaatttttttttttattttgaaaggagatagatatataaatattatatacatggatatcggtgaaattatgtttattatctatgcctatcgtttgataaaacttgtatattttatggacggtgacacagcccggttcactatgcctcgagccgtataatgatcataaagaacagaactggttactattatcaggttcaacaaatccattttttgatattttgtgtggctatcagtctatcacataaaatggaaaaagaattaagagaaagaagaaaaacaaaacaatgacttgtaattaaagtgcaataattgattgacttatcaaatttattagaagaataaaatatttacggaatttagaaaaagctagttgaaaagaataaggaccgtttggtataaagagattgtgaaaaaagtcacaaacacaataggtccagaaacggtgacgtgacacacagatcgaaactcagcatcgatcgacgatcgtcatcatataccatttatccctttagcctcaagccacaagaacaaatcttattttatagtactatttttaaccgaaagaatccgatcgacaatgaaataaatatcgaactcatatcaagtgctaactctaggttttgccattaattttgcgttttccaatcgagctaaaaacaattgatcgtctattaaaaaaataaaaattcctatgatcgctttttcgatctaaaactaatttttagtaatagtaatacctgttaaagtataaatatccctcccaagtactgaaaactcaaacctgaacgagctagcctaggactcaacttttatctcgaaagaatctttgaatattacttttgaaaataagtgagtctaatccttgaagatatatgttttaaagttttttttagcaaatgcgattgagaaaacatatattttaacttcaagataatcattactgtatgaaagtatggataattaattagaagaaacgttgttcaaaaattggttagtcgtttataattaccaaaataataaaacaattattaatacgcttgcatagactaattagtttttttttttcctaagcttactaaagtgatctgataaaaatcatgtatggaagcatgaaagtaataaaaaaatatcaagtttcaaaattttagtctttcatatttatgtacatttatatatatacgcatgcgtagactataatcagtcattttcgtgttttgtctatacaattactaaaaactgatttaatcaaaatcgtgatatgttttctatttctgaccacttaatataaacgatcgatttgtagaatttgatggcaaccaatcaaaggttaccgttagatataatgtctatatataaatagtatccccttttggcatcttgcataatagtaccaaacacctatctaatctcaaattaaatatttaaatatttataaaatgaggatcattatcacttcttcgaaaagctaagcagcaaagaaacaaatctcacaaagacagttgttcttataataatagaagaaaattgagggattaggaacactattattacaacatctttctgtcaaataaaatatttagcttaaggaaaaaatttaaaatcaagattatttaattaaaaaaatcacataggaatgttatgatgatataagtttttgtcttcaaatgtcaactaaattccggtaatttccacacacttgtccgtacttgcctatataaacatacacaccctcataaacatatatcaaaattttacacttatgctcttcatatcacatacaacaaactcatatatataaaaactttaaccttcgtatagcaacgatctagtagaaagcttatactaaaactttctgattctcttaatatggcggaggagtttaaagctacggcatcgatttgtggtggcggaggtggcgcgtggtggaactcgccaaggagcgttatgtctccttcggatcatttcttgtcaccatgcttcggagcggctatcacttccaatgattttagctcgcaagagaatcatctcaaatctaggatg

SEQ ID NO: 5396 - DNA, 3000 bp, Unknown
  misc_feature (1)..( 3000): cDNA_ID_1828537_gDNA_ID_1620785_Annot_ID_50409 3000 nt of promoter + ATG
gattttttttagataagtaaaatttttgcaatctttatcttgattagtatttaaaatcaattaatttatgttttaagtgtaaactaaaataaggtagaaaaaagagataaaaacaataatgtgtgatacacttaaccatgattggtactttggatccactaatttatgttttaagaaaatgatattccattataatgtttcccggaaacaaaccgtgatttgcggatgttacaacgtcaattagttcaacatggctttacttaaggcaaaagactacaaattcaaatagtgagactatacagataataatattattaaaaattaagtggattgtttttcaaatcattaacatggtacaaaaattatttaaatatatgtatatttgaaataatcacaatttttcacaaaacacaactcattgctaaccagctcatatgctaaaaaagacaactcatttctccactcttttgacaaaaacagagcaccaaacattaaacccttcaaaaacacaaatctcaccatcacacgtaaaaaaagaaaatatgtctatgcttcttcttcttcttcttcttgtcccattcattactccatcttcgcaatcttccattcgaaacctcctcgaagctcgcggtttaccaggtggtttgtttccagacaacgtggagagttatagtctagatgataagacaggagagctcgaagttcagctacaaaatccttgtttcgctcggttcgaaaacagagtatattttgatcgtgtgattaaagcaaatttaagctatggtgggcttgttggacttgaaggtttaacacaagaagagctttttctttggttacctgttaaaggcattgcagtgaatgatccttcttctggacttgttctcttcgatatcggtgttgctcataaacaaatctctcgttctctctttgaagatcctcctgtttgttatcctcctggtgagtcaaagtttgttcctcaaaacgttttagtgtttaatgccaagtgttttatttattggtaacatatatatgatcttgaacagaatatttttgtagtaataattgtatgtttttatttgtaggatctataatggagaagttagaaaaaagcaagatggatattcagctcaagagatgaatgagtttttttttttttggggttgtgtaagattcaaaactcaaacttgtctctttgaaacttgaacaaaaaatgtgtttttttctttcttcttttacctttttgttcggggttgtttgggaaaccgtggaaagtgtcgggagatatgtgtaaaatctggaaagaagggaggaaaattttggaactttgtataaattatggggtccataaagtaatcaattttgtcacttgtcaattatttttcttttctttatatagagggaatatagagtactttagatatttgtttaacttttgctttaatttttgaggaatgatgttttcgtttaatcattatcctctagcataatcattgacatagaattattctttgaatggaagctcaaagctgcatttgttaccaaacaggcaatcacagctgttaacctaaacacaactgacggattataaaattctagcactgaaatacctatttaaaactttcactcatttttacacaagaagtttaaaaaaaaaaaaaatcaggtagatatttcgggtaaaataaatactcccatttgtaccaaaataaatgatgtttaacttttttacacaaagatcagaagttattatatttttttccgaaataaaaacgtaatttatttatttatacatattcaataaatgataaaataaaatataaatagtcataaggaaaaaatataaaaattttgcatagaaaaaaaagaacacgggtcaatttcaaaccaccaattattctgatatcacagatgtcaatacgcgtcagagtgtgatatatgttagttatatgcgattttagtaacatttttggaattttcagtgttgaatatcacatgtatatcgttgatcaaattattttagtaaacatgttttcaccagttttatttgaatttatagtcatttcaccaattgattctagaatatatttaaaattcttaaatgatataaaggtagttgaaattagataacctaacattttttatgttaaccaaactttttaattaaaaataatatatttataggcacaacctattgtaaattttttaatttacatagttttaagtaaacgagataaaagaatcagttggtgatcttcaaatcggataaagtgttatgagtgtataggagattttgatacaaattgaattctttttggagtcatatattttgtctatgctcaccacagcatcggaagatcttccatcacaaaacagttcacatttgtggtggacacgagagatgaagaatctgtctcaaggtttaatcactgtggtattatatagtaaaaattttatgatgatattaaatcatgattttggctatgttaaaatttgaggtttttggttctaaggattttttttgctagatttatgttaatatctaaagtttaagaaatttgataataattatagttacgtgacataattcaaatttatgatgaactacatttactatatatagccctcgagataataatgttatacatttatttagtagatatattattagataattcaaaacttaaattacattattttgtttatatatttcatattatgttaaagtttaattgataaatgatatttttacgaaaaatttgtataatactaaagataaattttaaaaacatcaatttcgttttatttttattaatagtacataaagaaaaataaataaattaaattaatttgtgactattttggtatatgatcaatgctcgtctttttaagtagtaatcgtgtctgttacaggtgaatgaacccaacaaaaatcttcgacgagcatcttctgctttcttcatctctgaatgatcaatttctagaatcagatcggatatttcg

SEQ ID NO: 5397 - DNA, 3000 bp, Unknown
  misc_feature (1)..( 3000): cDNA_ID_1828533_gDNA_ID_1620785_Annot_ID_50410 3000 nt of promoter + ATG
tgtaaccgaagttttacaattaatttgtattggttaaattatttaattaacgactgtagtggttataaaagaaaatgatgatgtttgttatcccccatccccattaacgactgtaatagttataaaagagcatttcttttgaagtttagccttgatacatcatgcccatgatcataggtcccacgatatgttcactttcttgttttgatgtttctaatatcaaaagtttcacagtacggccggtagcttgttcttccccagcaaaaactgcaaacataatgctttgaatttgcaaatgtttttttttttggtaaaagaatgtgtaaaatttggtttggaatgtgtaaactttcctcccaccaacaacattctttacccataacatcaagttggaaccactaaaatttggaattgtaatacaaaatcttaaatatatgctacaaccattttcgtaatgtgaaaaaaaattgaaatgtagagaaaacagtgtacataacataatatatatttgccaaaaaaaaaaatatataatactagcactttaccattgttcaaacgtaattaggtaagaaattaaaaacattattttctagtttcttttgactaattatataaggaaataaattgaaagtataagttatattcttttgattataaatctataaaaaaataaatggaaaggttatagtacctctcaactttgaccacaaaaaatatcatttacacaatgaaacccgacccggacgatgaaccggactaccttttgggtcaccgggtcatcgggtcaaccgggttggaccacgggttaattagttaaaatttatttaataaatttaatattaatagaaattttagagtattttatataaaaaaaaatttagtattataaatataaaacaaaaataatcatatcatatttaatcaaatataaaattatattatgtttaacaaaatataaaatcatttacacccaaatatatatatatatatataatcaaacaataataataaagtggttaaaaatttgaaatccaactaaatgtctaacaccgtaacaaatatattaggagatcatcaatgacagaaataaattaataaaacatcgtgaattcaaacaactaatctcgattgtctctctcaccattcgattcaattttaaggcggtattgtaaagtcttcaccaaaatctaaaacatcaaatgaatttaagaactgaaaaaaatttttaaaaataattgaataaagtctaaaatcccatattttattgtaaaatcaagagaactttttaaaacccacactcggccggttcaaccggttcaccgggtcacgggttaattgcgagtttttgtgggttttttcggttttgaacttgttgggttttagcactaaacccaaaccggaaacgtgttcgggtcacgggttaaccggtcggaccggacggttcgggtcgggcgtgaaaacactggtctaaatagtaaccgaaaaatctggctgagtcaggctgaattgctgactaactgaattttagtgattttcagatggatctagctgaacttttacatttccaaaccgccggaatcaaactgaactttcttttttgtgatttttggtcaaatctgtcaaaatagttaagaaatttaattcaaaaataacgtcaaataattatgaatgttaataatataaaatacatcaaaattatctaatggtttaattaaatcttatactagaataattatctaaaatgaatactaacattaatatattgcttaggaaaattgagttatttttccatctttaatttttgaacaattaaatatgtaaataactaatgaaaaactttgacaaatcattatataaaaaaaattgtttcaaaaattaacatgataatagaaaatagcttatcgcaaggaagcatcattaaattcattttttcgtatttgttttctttagtatatggcacataacttggcttatataattaaaagaaaaaatctgaagttttgtagtgcactttgtacttgtttttgtaataccaattttctaatgaaactttttaaactgaaagaaaaatggaaaaaaaatatcagtgtcagtcatcattattggtttgttccgttgatcatttggttcttcacgttcttcggatttgcttccacaattgatgtcttccgaacttgtctaacaataaatacaaaccgtttctatattaagttgaaaaatatagtgaagccaccaaacatgatacataatgcatttaatatttacccaattaatcttaatgttagctagccaaacttattggaatgtatcagttctataagatcttaaaattacgactccagtaattcaaataaaagcttagtacaaagactctttataattcatttatatatggttgaggcttgaagtttaatgcttttcactagtatgcacatgatacaaattatatatatatatacaaaacatagttgataacgaattttattatgcatggccccgtcccctaaatgctacatccaccactcctttataatccataatcgctatatgtatagagcatttcgtttgaagtttaacaccattctcattaaaagcttaagttcatacaaaaacaaaacaaaacttaagttcatacatcatggccttaatagctaccaaaataagttcacgttcttgttttgtttctgcttatccaaacaattctccaacgtttctgatatccaaatttcccaatacggtcgattctttgtcgcctgcaaatactgctaaaagatcgatcttgagaaacgtccatgcttcagtttctaacccttcgaagcagtttcataataagacatccttagtatatatattctgcttactttttgttgctcatgctgttttcagaactaagaatgtgtttgttcttgtacgtaggaatatttacacgagttgaatatcaagaagatcaagaatatactaagtgcaaacgtagatgttccatccgagaacctggagatg

SEQ ID NO: 5398 - DNA, 3000 bp, Unknown
  misc_feature (1)..( 3000): cDNA_ID_1828527_gDNA_ID_1620785_Annot_ID_50412 3000 nt of promoter + ATG
gacggtgattatggtgcatatacttgtgataagtgtggtcattatgctgttcattcgagatgtgctctagagaaaaatgtgtgggatggaaaagatctcgaaggtttaccagacaaagatgatattacacaagatgttggatcattcaatataatatctaaggaagtgatacttcattttctccatgaccatcatttccggctcgaagtcagtatactttataacgaaaaaaaactttgtcaagcgtgttatttacctattttcgaaggtaatttctattcttgtgtggagtgtgatgatttcatcttccatgaaacatgtgcaaaattttgcaggatattacaacatgcattacatcctcatccactaacattaaaagctgcaagtagatatggtatggatcgttttggatgcagttcttgtaatcgtggttgtcgtggctttgtctatgagtgttgcataaggggatgtatcttcactctagatgtaaaatgtgcttcaattgctgagccgttttgtttccaaggtcataaacatccattgttcatatttgtaggccgagacggaaaactcatatgtcgcgtatgcaaaacagaacgtcataatcaattaaattgcatcaaatgtgattttattgtttgtatgaagtgtgctacattaccctatagagcaaggtatgaacatgacaaacactttctcacagctatatgggaagaagaggtccgtgaaaaagattggtgcgaagtatgtgaacgtaatttaagagacacaaacacaaaagtgttctattggtgcgttgagtgctgcaccattttccatattgaatgcgtactaggtaaaaactcgaatttgagtctaagccaaactctcaaattctgggttcagcgggctcaaattcttttagaaaatcttaatctgtaatagactaatagacaatatttccaagcattcagtgagttatatagctctacctctctattcaaatgtaatttgttttcttcatatttgtctccttggtttgtgtttgaaaaaaaataaaataaaaaaagtctccttggtttgttaagttcagtatattgttcaataaacatatttcagaataaatttttataataaaaatatatcttaataaacatttgatccaaaataaatatatattcaactaattatagtgtatatttaatataaatatttatatttcttttgttaaatggtttccttgaattaatacaaccacttgtaactaaaaaactttgatattctccggttataaaatgggagctccattcaaattgtttttatgtgctctgttctcattaccaatttgatatcgtacaaaaagagctgcttcctactcgtgatctagattgtagatttgaaccttatcaaatgtgtgatctttactatttatcaggattagattaccaaaaacaaatcaatagatgatgactctacaggcttgagctttatttttggctcgaaaaattgtctagatttctaaaaccgaacaagaacatcagaaaacattgaaatatcaacattcctagttataaattaaaccaaaatttctgaaacattgtggttttattaagacgcccacatggatgagatgcatcactccttcacttcagctcttgatgatttgttattcattatagcatctttttttaattggggtcggatttctccatagctgcaaaagagaagtattcgaataagcaagttaacaaaaagaatagagcagaggcaacacaaggcaaaagaaccgggtatggagatattactgttgtagtttagaagcttttcgattagatcgacatgagtcataagcatacgcctgcagcagtaacggactaatccaagcgcgtcaagagcatccctgcgtattccaaaaccaaaattcagattttcagttcaacaaaatgcaattttagcataatgcctaaaaccaaagtagctaaaagattagatagaaacaagagaatggaatatatcagtgatcacctaccatcatgctctttactaacacttaagataacatctatgaacttcaagatgatcaaattgcaactaaaacaaaaacgaaattgcgcaattccaaatcatgtagcttaacacctagaaccaaacgggctaaagattacactagcgattaaaacaagaaaatcgaaaaatcccaatgatctaacttcatgcttttagtaacaaggctaaaacatgtataaactttcaagatgatcatacaagacaagatcatgcaatctctttgactacacaaaaccatcaaatcattctattgtcatgttccactattgtttcatcttttacatgactctcatttcaactaagaaaatgtcagaaaacgttcaaaattccaagattcaatcactctcatgttcaccaaaaaaatttctcacaaattatgattctttttctaatcataaactatatatcgcttacccttcagcgtaatcagcctggagaagttcaaggtatgtgtcccatttgttcccaatcacctacaaaaaatcataaacaaaagcttcataaatctcaatactacaaaccctagagatttgtcacacacatatatatataacaaatcgaaatcgtacaaaaagagagaagaaaaaacaaacctttccacaagtaaaacaacgaacagggacgatcatcgtgaacgaatcgaaactttaagagtttatcgtctcaaagcgatctttagggcttgtctctttctaacttcgttctcgtctcaaagcaaaaattagtttcatgtctaattattattgctttatatattgagtcctattatgtgttttagctaaaacgataccgtattagttaaaattatttattttatatctgacaatagaggaggaaaagtattcttcttcttcttcttcttcatctgctcgatcttttacatttccggtaagatcaaaatcaaaaccaagttcgtttcgcggcggaggagaagaagaatcagacgggaaaatg

SEQ ID NO: 5399 - DNA, 3000 bp, Unknown
  misc_feature (1)..( 3000): cDNA_ID_1828519_gDNA_ID_1620785_Annot_ID_50415 3000 nt of promoter + ATG
tttagtaggaaaaaaaaaatcaggttaaagccatgaacatcaatagaagacttagaatcttggaaaatcgtagacgatcttgtcaacgttttcacatgatcttaagaattctattgagttcgtggctataatcccaaccaaatttcatcactggaagtaaaaagtcataactctgccacaaggagatgtttagggttccgatggatttgtttaagaggttgtctctgtatgtacttcctctaaagtattactcttagatcgaaaatacaagaggaaccaaaatcaaaagcaaaaagaaacgtataattaagaatggtggtaagtaatgtgggtagacttatcatctttcgttcctttatataatgtttcaccatgctcatttaataataatctaaccatattttcatcaacaaggcccatcatgccttgtaccatattttcttcaacgacacatgatgttatgttttctattttgtgagctgattgtatctgggtcaaaatggtctctgggcctagtaatgggctctacacaattggatttacacctcatttaacagaagaacagaagttaagcatgtacaagcctgaaagcccatacttcagtttgatactgaaaagagaaatttaggccaagattttaggagattttagatttcagattttggtttttgtaaataacatgagatttttggatcttgttaagaaattagtaaaaactcttagaattagattccctaatttatatagggaatcaactttcctcaaaatcttgaatggtttaaaaaatggatttttggaaaaagctaaaagcaaaaaccatagccttggcttaggccttttttttttggttatacataagaaaaatagagaaaatatttaccaaagcaaataataaaaatcctaaattactttgaccaaaagaaagagataaaatattaccaaagcaaaagtaataaaaatactaaattactttgaccaacagaaaaagagaaaaaaataattaattccctatattaaaaaccctaaaatatctattggaagacagcaaccactttaaactaaagttaacacctttatattcccaaacacttttgccgtcctctcctcacaaaccctaaaaagcttctctcttctcttctgcttgaaggattccgatttgcctccttgaaaatttccaatgacgaagaaactcaatccactggaagatccaccaacggcaacttcaagcgacgaagatgacgtcgagacttccgaagctggtgaagcttcagacgattcctcttcatctgaagaagacgtaccaatcaaaattcgaatcaaatccccttccgccacaaccgccgccgctcctccagctaaatccaccgccgtctccaccgccgctgattcagattctggatccgagactgaaacagattcggattctgaatcaacaaatccaccgaattctggatctgggaagacaatcgctttaaacacagtgaatctaaagaagaaagaggatccaacgtcgtcgtcagctactttagctttaccggcgatgaaatcaggaacaaaacggccagcgagtgaagctgctgctacgacttcaacgaaacgagtgaagaaagatgaagagagtgtgaagaaaccaggaggttttcaaagactatggagtgaagaagacgaaatcttagtgttacaaggaatgattgatttcaaagctgatacagggaagtctccttatgtagatactaatgcgttttacgatttcttgaagaaatcgattagctttgaggttagtaagaatcaattcatggataagattaggagtttaaggaagaagtatattggtaaagaaggaaggaacgaacctagttttgtgaaagctcatgataagaaagcttttgaattgtctaagtttatttggggacctaaaggaatagctcttgattctaatgttaagtcgaacggtgtatcgaaaaagagtgtggcgaagaagaagattgattctgttaagcaagagttggtgtttgccggtggttcttcaactaatggtaaaaaagttgaagaagatggtggtgatgatggatgtgattggtttgataactcgtctcttgttaggatgattgctagtttgggtgttgatgagtattatgtgaagcagcaatggagtttggtttcggttgagagtaagaagattgttgaagagaagtataagttgttgcaagctaaggagttggaatttgtgttggagaagactaagtttttgaatgaggttgcttctatgttcgttgaagcttctaagaacaagccattagatacatagatttatcggttttttaaaatcggaatgctattgccaatgccttcttttgttttcgatttaggatttaccctctcttttttttgtcttcttcactttttatctttcaatgtaactttctggttattttatctttgttaaactctgttatggatttgtagcttaaatatgataaaattgcttaaggccagattctgtgaaacatggacaagaacagagcaagttatgttgaattgactcgtgtaattcgtgaaacagaacatagcaagtccaagttgtgttaaaaactgcagagaatttgacagattggtggaagtaaaaagcattcttttgcaactcattttaagatcggcaaagaaaaaattgaagtaacagaaccttactgtaacactattcgttactctaaagctgtgttatattgtttagagacagaaataatcaaactcttgtgataatttggtagatgataacaaatcagaactctgaaggtcaatcttttttgattcttaggtgaagacaagttggttatttcaaagatcacgtgcttaccttctaaaacagccttattgatctactgttgtacctaatgagcaaggactatttgcaaatctttttacttcttatatagaagtctcaagacgataaactcataacaactaaatctctatctctgtaatttcaaaagtacaatcatg

SEQ ID NO: 5400 - DNA, 3000 bp, Unknown
  misc_feature (1)..( 3000): cDNA_ID_1818013_gDNA_ID_1620785_Annot_ID_168123 3000 nt of promoter + ATG
cattttgtgggctagggatctacaatccaatgactgcaaaatatttacggcatgcaaaacttcttatgacaagtgtgtttgacacacgtctctaaaatttcaattatgtggatgtgcttatttgtatcaatgcatttcatgcttgcttggcttcgtatggaaaaagtatgagccatcataaaaatttgttaaaaaagattcgagtcatttacattgttttaggagccttttttgatcggttagggtgctagagaacccattacatactagtcatctgggggtattagtattttgtaagctgttttaaacgattccgaattttgtttctatattttgtggtcagatctgatggcctgaaaatcatccccaataatcaaatcttaatgcgcgtttaatattttactaaattatgatcatattattttttgcgatctagtcagtagtcactgtagtgaagttggtgagacgacacccacccaaaaggagtacgtaaagcaattccggcttccaattattttatgctaatcttgtcggcagatgagatggatacatttatacatatcatatataataggttgggaaattgttagtttcgttgataaaataattaaggttttgacttttgactgattctggatttgatttcaggaaatgtaaaattttccagattctgtatgtactttttgataagaaatttcaagttgctgcatgtcaaaaatttcaactaatctcttttgtagtgtataaatttatttactgtccaatagacaattgccaccgatcctaaggagcaacgtacaataccaaaagtttgcatgcataataaaagttcatttaaacataacgtataataattttcagagtgattattgtaactttcaaattttcacataaattttagagtattaaatcaaatagcctttgtaatttttgagtaaactaaatgacggtctttttttactcaaaatcaattacaaccctttaaaatatcctaaaagctttgttttaaaaaagaagataaattatcacaacaagaatataatctaactcactacaaaatgtaaggccaaagaagagatacgttcactgattggacgtgatggagagagctcacatctcgtctggccttatcatcatcgtaatctattgaagatatatatatggtaagacaaattaactttactcacggattctattctttttacccattctcggttttgtaacgaacgacgaaccaccaactagacaacgaaacgtcccacttgtttccattagttaaatttgggtaacaccaaaatcgcattaacttaataaaacactgttccaatatcaaccactgccatattttctcccttatttttttttgacatcaaaactgattttggagaggctttgaaaccccgactataaatttgatttaggtgttattctgatttatgagtgaatagttacacagtcggagtttgaactgaaagttataggattacatttttggtaaaaaattgttgagtcgtatttttggtagaaaacagtaaaattatgttttttgacagaaaattggaggatagtaattttggaggaaatcatatatatgaaaattggccaactctctccatatgattgacacataatcactttagcatttgacatgtgtctattaaataattaatgtaagctcttcaacttctaatttataggttaaagatatatttattatttaattttacatcttattttattttacgtatttaattatactattactatatttattttaatattacatgatttttcaataaaaccattttaatagttttcttatactctgaagttttttttttttttttgtaatccaaactcaaagtatgagtgtataatagtcgtggattacttaataatttgagtaagttattctcttaaatgaatatttatattttcttaaattgatatttatataataaatcactaagggtgaaaaatgcgtaaggagttccatcatcaaattcttaggtttctagaatccaacactaacctctgttaaattggtttaaaacaaacgttgtttatgaattatgtatatgatgcattgttgagaacgttgctagaaaaaaatatttttaatactaaaagtaattgtttattgcatgattgaatgattagataaatataaattatatttaaattaaacactacaaaagaatccgaaaaaaccgcgacgtagcgcggataattacctagtagtgttaaaacaaaattggaggaaattttggagatcacatttttaacataaaattagtagaaatatatattttaattattaaataaaaaattaaagtaagcgctaaatgtcattaagaaaattttgtgaaaggcggaaacaaaaattttaaaagaaaaagaaaggactaatcacatcatcgccattcaatgatatagtttgacaatgatatgattcattaactaccattcaataaatcggtttatgaaatctaacggttaaatattagttggtaaagcatgattaattaagataatcactcaacaatcaattcaggaccaacgtcacctagctaccaccacgaaggaaaatgctaatacaagaaccaaatcgtcttattaaccagttatctttttctcatggaccacatttaaatcgtcacggcaattaagctagattttaagaaagaataaatgggatactcaactaattgccacaaattttattacttttaaaactcggctgctcggcccaaacttatccggtacggatggatagacctatcttttatcgtgtaaagaaactcttgggctccactcttgacgttgctcattttatctacttttgttggtttcttagtgacctttgacgtttatttacatagagttgacagatttgaattgacgttttctcaataatgcagaccaaaattttcacgtttcttacatgtacatatatatagtaaaacaaatctctgaagacacacaagagaatcaagaaca

SEQ ID NO: 5401 - DNA, 3000 bp, Unknown
  misc_feature (1)..( 3000): cDNA_ID_2139018_gDNA_ID_1620785_Annot_ID_168122 3000 nt of promoter + ATG
taaaatatgataaaatggtttcattaatcaagtgatactggttaagtggttcttacttaaggaagaattgcttcttatgtcgccaaagaggcaaagatcaattcttcttaaacgtgtgatttacaaaatcattttatttgatcaatcgaaatggtgttatatttttacgctcattaaaaaaccatgtgagtggactattcaatagctaaatttactatatacagagatttttcgggtggtagaaacccccgattacacctgatttcattggcttatatggccttgtgccgatatagtagtggacatactctaaagtcttgaaaaatgcaccaaaaagctaatactttgttaacatgggctaaacattttgcctagcatatatgatccggcccatttattaatatgtatctacatctttaagaagtaacgaatttgtagtagcaaagaatgaatggaatcgatattgttcagtgaccatgaaattctcatatattgccataagcccataccttttttttattatttatactttttacggtcgaagaaaaagagaatagtagcaggattcctactgcaggcaatgataataaacttatagaaattttgaacagcgaaaagaaaacgacttgagattcaatatcaatcgttggtgctgtccaattggcaatgaagtaaaatttatgaacattgaatttttttaatttacctattaagcttcgatcgtattcaacctaagaatattacattttataaaatttaacagtaaaaatatctaatttaagagataattattaaaaattatataaaaaagtgactgactttttaatctaattttaatttattaggagaaaatctactttgaaaattattatatatatatatatatatattgtgaggtagaattttttatttcttaaaaaggtttactattttaactgaacattgtgtaaacgatgaacatcataactcgattgtgtccaattcatatctaatagttaaatgaatcaacgactcatatatcacggagcaaaacgcgcatgcagaaaaatccaccaagcgaacaatttggaaagcgatatttctgatgaatcgttgatttccccaatattacgaactttcctgaaatctttcctagccgtcgaatatgaaccaaatttattacctgacctataaacacacacatatgcaggcaaatggacacatgtgttctatgaatcagtgttggtgaagagagagcttgtcgtgtaatgagagttgcatgtgttcaacaactttgtgtatgttttgtaattttcctcttgtgatattttctacggtgagaattccatttgcaaggttacatcaatgggtgaagcctgtacgtccaacatgtgaccagaccttcttttatatcaacggtccaaattaacattacattaacatacacaaatatattatatatttaatactattgttcctgttcttctttttattgtcgttacctcgttagcatcaatgacgaatgaaaatgacaaacgatacattgtgttgttcgaattcgtgttattgttgccaaaacgatgtgataataatggaactatgttcattgtattggcgttgcccgctggtttacaacgatctatttcatcgatgaattttggtaattaacgatataaaattttcaatactaaaagacacacctttttcaacatttctttttataacttatgatgttcccattccattatattatagctcaacttacaaactaacttgtcacatgtaaattactcattgactcgtgacaactattgacggcaatattatcaaactcgtggttggaaatattttaagtccacaaaggaggagaaaataaaattcttgaatattgaaaattcttatacctctatgatataaaagaaaataaaatcaaagagaagtaccacaaaaacaaatttttagtatttaaaaatgccattactttggaaaaggtcccaaaatatcacaaaatctaggcttaggaagggtctctaaacgtttattaagaattactaagcccaaaacttgaaaactcctaaaactctttcttcaaatttagactaatcatttttaattctctccaaaatattagtaacccttgtaaagcctaaacattttagtaaattttatgatttttggtggtaattttggaaaataaagcataaaatgtggtattccgaggactgaccaaatttcaaaaattcaaataaatgattaatatcctaaatcaatcattattttttataattgtttttgagaaacttatattaatactattttcaggcattttcttataaattaccctatggttttagtaggcaacaaaaagatgaacgtctcagatttttttgaattcaatttaatcttaacaaaagcgataaatatcaagaagataattgggtacgtgtattgtgtactatttcaaaattgatatttgcttccataacgtaacgtaacgtaagacccaaagattaacacttggtttcttcatggtcgtagattattaaaagtttataactaatgacgacaaagtttaaacgaaaaacaatattttctcaattttcactagttttttttttttattccagaaaattattagtatacaaccaactatttttacgattataaacttttatttgatgatattcataatttagaaaaaccttaaacggatcttaatgtcaatatcatcagctcatgcaccgcctctcggatatgttgacaaaattaccccatacaatataaaccaccaaaccataaccacaaagggtatattcgtatattataaaaatatctgaatagtcgaacttgtcgttacactcaaaaacgaaatctttccctcctctgttctcaatctttctataaattctcttcttcttcttcttccattttcccaacaacacaaagtctctctctctctgataaaatcttaaaacccacctcgagatcatagtcttcatcaattagccataaaaaagcaca

SEQ ID NO: 5402 - DNA, 3000 bp, Unknown; identical to SEQ ID NO: 5399
  misc_feature (1)..( 3000): cDNA_ID_1828519_gDNA_ID_1620785_Annot_ID_168111 3000 nt of promoter + ATG

SEQ ID NO: 5403 - DNA, 3000 bp, Unknown
  misc_feature (1)..( 3000): cDNA_ID_3076890_gDNA_ID_1620785_Annot_ID_168104 3000 nt of promoter + ATG
aaccatttatttattatcaatataatgttccaagagtctctactagtaggtctcatgtattttctcgggtctgtgggtctatttctgtccaacgatcgatacgccatgtctgagaggctttaaaaacttggtacttaccttacaaatcaccacatgattttctcccgtattttgttctcactcacacggttccgacaatcatttcctcgaaagttatctatcataagactttcccagcttaaaaatgcttaattgtagaattttctttaagacgtttgacaaaaaagataagtgtgttttagtaacatagatgaccaaattaatttttataaatttctccacatgcaccaccatattcctgtaaccgaagttttacaattaatttgtattggttaaattatttaattaacgactgtagtggttataaaagaaaatgatgatgtttgttatcccccatccccattaacgactgtaatagttataaaagagcatttcttttgaagtttagccttgatacatcatgcccatgatcataggtcccacgatatgttcactttcttgttttgatgtttctaatatcaaaagtttcacagtacggccggtagcttgttcttccccagcaaaaactgcaaacataatgctttgaatttgcaaatgtttttttttttggtaaaagaatgtgtaaaatttggtttggaatgtgtaaactttcctcccaccaacaacattctttacccataacatcaagttggaaccactaaaatttggaattgtaatacaaaatcttaaatatatgctacaaccattttcgtaatgtgaaaaaaaattgaaatgtagagaaaacagtgtacataacataatatatatttgccaaaaaaaaaaatatataatactagcactttaccattgttcaaacgtaattaggtaagaaattaaaaacattattttctagtttcttttgactaattatataaggaaataaattgaaagtataagttatattcttttgattataaatctataaaaaaataaatggaaaggttatagtacctctcaactttgaccacaaaaaatatcatttacacaatgaaacccgacccggacgatgaaccggactaccttttgggtcaccgggtcatcgggtcaaccgggttggaccacgggttaattagttaaaatttatttaataaatttaatattaatagaaattttagagtattttatataaaaaaaaatttagtattataaatataaaacaaaaataatcatatcatatttaatcaaatataaaattatattatgtttaacaaaatataaaatcatttacacccaaatatatatatatatatataatcaaacaataataataaagtggttaaaaatttgaaatccaactaaatgtctaacaccgtaacaaatatattaggagatcatcaatgacagaaataaattaataaaacatcgtgaattcaaacaactaatctcgattgtctctctcaccattcgattcaattttaaggcggtattgtaaagtcttcaccaaaatctaaaacatcaaatgaatttaagaactgaaaaaaatttttaaaaataattgaataaagtctaaaatcccatattttattgtaaaatcaagagaactttttaaaacccacactcggccggttcaaccggttcaccgggtcacgggttaattgcgagtttttgtgggttttttcggttttgaacttgttgggttttagcactaaacccaaaccggaaacgtgttcgggtcacgggttaaccggtcggaccggacggttcgggtcgggcgtgaaaacactggtctaaatagtaaccgaaaaatctggctgagtcaggctgaattgctgactaactgaattttagtgattttcagatggatctagctgaacttttacatttccaaaccgccggaatcaaactgaactttcttttttgtgatttttggtcaaatctgtcaaaatagttaagaaatttaattcaaaaataacgtcaaataattatgaatgttaataatataaaatacatcaaaattatctaatggtttaattaaatcttatactagaataattatctaaaatgaatactaacattaatatattgcttaggaaaattgagttatttttccatctttaatttttgaacaattaaatatgtaaataactaatgaaaaactttgacaaatcattatataaaaaaaattgtttcaaaaattaacatgataatagaaaatagcttatcgcaaggaagcatcattaaattcattttttcgtatttgttttctttagtatatggcacataacttggcttatataattaaaagaaaaaatctgaagttttgtagtgcactttgtacttgtttttgtaataccaattttctaatgaaactttttaaactgaaagaaaaatggaaaaaaaatatcagtgtcagtcatcattattggtttgttccgttgatcatttggttcttcacgttcttcggatttgcttccacaattgatgtcttccgaacttgtctaacaataaatacaaaccgtttctatattaagttgaaaaatatagtgaagccaccaaacatgatacataatgcatttaatatttacccaattaatcttaatgttagctagccaaacttattggaatgtatcagttctataagatcttaaaattacgactccagtaattcaaataaaagcttagtacaaagactctttataattcatttatatatggttgaggcttgaagtttaatgcttttcactagtatgcacatgatacaaattatatatatatatacaaaacatagttgataacgaattttattatgcatggccccgtcccctaaatgctacatccaccactcctttataatccataatcgctatatgtatagagcatttcgtttgaagtttaacaccattctcattaaaagcttaagttcatacaaaaacaaaacaaaacttaagttcatacatcatg

SEQ ID NO: 5404 - DNA, 3000 bp, Unknown; identical to SEQ ID NO: 5396
  misc_feature (1)..( 3000): cDNA_ID_3076894_gDNA_ID_1620785_Annot_ID_168103 3000 nt of promoter + ATG

SEQ ID NO: 5405 - DNA, 3000 bp, Unknown
  misc_feature (1)..( 3000): cDNA_ID_3076862_gDNA_ID_1620785_Annot_ID_168098 3000 nt of promoter + ATG
tgaatctcattgttcgtgatcaagttttactccaacatccgaaagtgttcgtatacttgcattgtgaaaagcggtatatttcaaaactagtcgttgattcaactatatatgttgccaccatgaatatactaaacagaaaatggaagaaagctgaataagattggggactataaaatttagcatatgtgtccgataataataaaatccaaatatcgaccgacaagagcttagaggagtgtcggtgtacatatcgatgggatcgaccagaccgttagagaaaacaaccgatgggctgacaaagattcttcggatttaacttatgttgtcatacggtggctgtgacacattcttttgacgttcatttcataacttttattttatcgatatcaacctaaacgaaacaagtgttttcataaataaataaaaagttagtcacgttgcaataatgaattattatttttttcatttttggcggagtggactggtgggcttaagcaaattgatcaaatttgttttgacactttcttagtttatattaaaattaattttaattgcacgatgaaaacttactagtcagtcgcatggatctgacctaactgtctctgtatttcagtgcttcaaagctcttttaagttttaagtcaaaatgcattgtgtcgcatagagagaccattaagaaaaaaattcaattagttcttaattaatattttaataataattagataaattggggcctttatagtcttcatttgtcctcaatagccattatccaataaaatattaccagtttcatttgatatttttgtgtcatatttttaccatttaagacttttcacaattcgaatagccatgaacaataaaaatctacgagtttcatttgatatttttttttttttgccgaatacatttaagactttcacttctactaaccatgaacaatggtctcccaattacaaaatatatttttgaatcattggactaccataaatgattagtgtcttttttgtattacatgtaacgtaaaaataccattcttcaagcattcataacaattttttttttgtcaagatacataacgtaaatttgaatttcgtaataacgatactagcacaatttagcttagaatatgtccaatttttttttttattttgaaaggagatagatatataaatattatatacatggatatcggtgaaattatgtttattatctatgcctatcgtttgataaaacttgtatattttatggacggtgacacagcccggttcactatgcctcgagccgtataatgatcataaagaacagaactggttactattatcaggttcaacaaatccattttttgatattttgtgtggctatcagtctatcacataaaatggaaaaagaattaagagaaagaagaaaaacaaaacaatgacttgtaattaaagtgcaataattgattgacttatcaaatttattagaagaataaaatatttacggaatttagaaaaagctagttgaaaagaataaggaccgtttggtataaagagattgtgaaaaaagtcacaaacacaataggtccagaaacggtgacgtgacacacagatcgaaactcagcatcgatcgacgatcgtcatcatataccatttatccctttagcctcaagccacaagaacaaatcttattttatagtactatttttaaccgaaagaatccgatcgacaatgaaataaatatcgaactcatatcaagtgctaactctaggttttgccattaattttgcgttttccaatcgagctaaaaacaattgatcgtctattaaaaaaataaaaattcctatgatcgctttttcgatctaaaactaatttttagtaatagtaatacctgttaaagtataaatatccctcccaagtactgaaaactcaaacctgaacgagctagcctaggactcaacttttatctcgaaagaatctttgaatattacttttgaaaataagtgagtctaatccttgaagatatatgttttaaagttttttttagcaaatgcgattgagaaaacatatattttaacttcaagataatcattactgtatgaaagtatggataattaattagaagaaacgttgttcaaaaattggttagtcgtttataattaccaaaataataaaacaattattaatacgcttgcatagactaattagtttttttttttcctaagcttactaaagtgatctgataaaaatcatgtatggaagcatgaaagtaataaaaaaatatcaagtttcaaaattttagtctttcatatttatgtacatttatatatatacgcatgcgtagactataatcagtcattttcgtgttttgtctatacaattactaaaaactgatttaatcaaaatcgtgatatgttttctatttctgaccacttaatataaacgatcgatttgtagaatttgatggcaaccaatcaaaggttaccgttagatataatgtctatatataaatagtatccccttttggcatcttgcataatagtaccaaacacctatctaatctcaaattaaatatttaaatatttataaaatgaggatcattatcacttcttcgaaaagctaagcagcaaagaaacaaatctcacaaagacagttgttcttataataatagaagaaaattgagggattaggaacactattattacaacatctttctgtcaaataaaatatttagcttaaggaaaaaatttaaaatcaagattatttaattaaaaaaatcacataggaatgttatgatgatataagtttttgtcttcaaatgtcaactaaattccggtaatttccacacacttgtccgtacttgcctatataaacatacacaccctcataaacatatatcaaaattttacacttatgctcttcatatcacatacaacaaactcatatatataaaaactttaaccttcgtatagcaacgatctagtagaaagcttatactaaaactttctgattctcttaatatg

SEQ ID NO: 5406 - DNA, 3000 bp, Unknown
  misc_feature (1)..( 3000): cDNA_ID_2153638_gDNA_ID_1620785_Annot_ID_168096 3000 nt of promoter + ATG
actatcatgaatcaaaatatatccgttttatattgatatcctttatatattgatatcatttacagattttcttttgaaaatcttttacgtgaaggtttttttccataaaacattcgaatgaaattgctcatatagtttatgaagtttgttaattgttcccaatatatttagaatcacagaagtaacctttaaattgtgacatagtgttacaaagataacattggtaaaattactttatttttggctttttttttatatgaacggtaaaataaaattatctatttaaactagaactgtacggttttctttggaaaaaaatcagtccaaaataaaagagcttacatgaaaaagataaaacctcgtgctattgccttttttgcaagacaatcagcacgtatattgtttataagagtcctctttttaaatgctagtcatcatgcatgggattaactatatatcaactttctcttatgttacatcatttttaggtgtattagaaggaatacaaatcagaagaagatacttgggagccgtatgatggattggggtaaggttttttaaattactgctttggccttctcatgttgtcctctaatctgtatatggtttcattagaaaatacaaataaaaacttaaggaattcgtaacgaagggtttcaagtcaaatttattgccacttcttgtaagctaagtcatgttaattacacatgtaaatcctccaaatatttcttgttccccacttttcgtaacttttcgaccttgtgtcgttcttttaggaatatgtgcatcttgtatgtgggggtcttccatgccagggacttagtggttttacaccgatttagaaataaagataaaccacttcaagatgaaaaaaaacaatgaagtgacggtttcatgaatatcatagactatacttgaagcccaaatacgtcttgatggagaacgttgtaaatcttttaggtttcatggaaagatttgttggtcgttatgttgtagctcgtcttgtaaacaagaattaccaagcaagatgaggcataatggctgctggtgcatacaatgttcctcaatgtaggtacatggtgtattagtatcggtagattaaggatcccaaatcaattcatgaagaggaaatgaggactaagggaagaaaggctagagtttgggagaagatgaagattgtggaaagtggcatgttgttgctgttccagtcgggattgccttaggatacatgtttgggatggcgagtcaaaggttgtgtgatgataaacctgtcatagactaccctttcatgtatccctgaatgtcttaagagaaaggtagattctgatagattaaagatcccaattcagttcatgaaaaggaaattgaggactaaggggagaaagccgagagtctgtgagaagaagaaaattatggaaagtggctaagtgtcgagtaaaggagtattgaagaaacctcttcctgagctagaggattttttcttcttattatcttcctttagaggattccaaaacaactgttgtgatctcatctcttaataacttcttcattgtttatcttgctttgacttggatttatattaggatttaggactgtttattttttttcttttaaatgatttcattaataactctaaattatctgctaggtttcatgatactatggggatcctcagcttttgttagataggtttgaggaacttagtgaagaaagtacacatcttgaattatgggtggatactaagaattaaattatgaatttcgtatttattagattagttgctgaggacgaattattgttggagtgactaatacttgacgaaatcttgatgcactctattctttcctttttatttgctctacttcaacatgaagactaaaactatcaaaagagagtttagatccatggaaatatggaatggatgtatttagggatggtagagtgtacaccaagctagggcatgtgcagaacctaacctaaagcttaggcagcaactgttttaagattttacaaccaatttttttttaaatagatcatgggatcataggggccagagagtgattgcgcctatctacccgaactattaacatcagataaatcaatcgtgtctctccatcttttgcaattaccatattctcttttaaggtttttttttttttgtttaactggtcaagttacttattactctatctgttattttttaattgattttctagaaaaacacacaaacacatattaaaactaattataaatatattagtttttgtgatgtagatttttttataattctaaaccaataattatttgtcttaaagtttaaaattcatcaataataactaaaaatagtgtctagaaaacttaaaaatcaactttttaaaaacaattttttttctaaaaaatcaaataataatgaatagagggagtatcgaccaaaattaaattttgttattataaaaatgtgaaattattttttcacaacaaattatttagcactttcagttgggaaaatggacacaaaaacaattgataatttctttacggaaagataagtatgttttcatataaaataaataagtcaaaataattaaataaataattcgaaattagtgaattacctctgtgaaaactatggaaaagtagaattttccatatatttttaatttctatctaccaagctttttatttcaaaaacattcatccaattaataaaataaattgaaatgtcaaagtgaatccaataaacgaataagccgacaaataaaattttagcgtgaagcccacgaggttttttttatgggccccacttttctccgcaccaaatcactgacttctctttctccgtatctttcttcagctcctaaaacccagaaccttctttttccggcgagggaagagcttcctcagccctaatcgctaaatcgatgaaattatgctcccaacgtttaacggtttaaagatcattccaaaaactcaaccttttgcgtgtctcctctcgccatg

SEQ ID NO: 5407 - DNA, 3000 bp, Unknown
  misc_feature (1)..( 3000): cDNA_ID_1828516_gDNA_ID_1620785_Annot_ID_50418 3000 nt of promoter + ATG
ttattattgaagaattttgtagcaaaaaaagaatgttactgttgagaattgagaattgactcaattgagtcttttgattaagtgagaagaagaagatgaaaagcagagatcataaatcaagatgaaaaagaagaagaaatgatgggaagaggaagaagaaagtcaaaatggagttagtcaagaaggccattactgggccattagtcaagcccatacatttgggttgttttgtttaaaagtaactaagctaaactacaatgattaagagttgtttctaagatgagtattttatccttgcttgtaaaactaggctattatctaagagctaaagtctaacttgtagttgttaaattagatgcctatacaaaccctaagaaaatagaatatttttacaaaccctcatataaattatgcatttatagttaattagttttggacatatgggctacttgggagttgggatgaagtacttgacaagaaaatcaaataaagaagtacctcaattctatctagctcgaagcaaatctaattttggacttagggcctttttcaaaatttctaacagggtattaggacatatgttaattcgaaatcttacacaaaattctaaaacttttcttttttataatatcaaatacttctcaagcactccttcacatcacatgttagcaaaactcttaacatatggacactttgcaggagtatgtccctccagcaagaaacctcaaatccgctcaaaataaattaatcgatttttagagaagaaaattacatgcaaatatatcaacttaattgataatccacatagctaatagctaattaatcgattaaaaattttacaagtttcaggcattgggccggccttggtttcaggaactagctagtaaggacaaggagtttggtctaaattttttaatgaactttatgattgcatctaaatctttgcattgcatatacggaaaagcaatgcacttttagctacttagttttcctctatctttttagttaaaaatttagatacttagttgtctattcttttcttctcaaagtgtaataaccataatattttccaaggtatcttttgctttcttcttaactaccaacaatgtttttcttttagaaaaaattgctacataaacctcacattacatcattttacttcccatgacccactaacactaaatctacccccaaaaaaaaaatgcacaacaaggtcgattctttaccggttcgatcgaacccatcaacgcgacccatatcccgtcaccactcggcgagtaacatcgttcatcgggttaaagaaagcctcacaacaagagtctctaaactcatatgtgccattttcttatctcttttactatgtttaggcattatcactttcatcttatggatcagtctacaaccacaccgaccacgcgtccatatccgcgggttctcaatctctggtctatccaggcccgacgggttcgagacgtcacacataagcttcaagataacggctcataacccgaaccaaaacgtcggcatttactacgattccatggaaggatccgtttactacaaagagaaacggatcggttcgactaaacttactaatccgttttaccaagacccaaagaacacgagctcgatcgacggagccttaagtcgacccgcaatggccgtgaataaggaccgttggatggagatggaacgagacaggaaccaagggaagataatgttccgtttgaaggtaaggtccatgatacgttttaaggtgtacacatggcatagtaagagtcacaagatgtacgcaagctgttatattgagatcggttgggatggaatgttgttgagtgcgactaaagacaagagatgtccagtttatttcacttgatttgaacaaaagtgtatgtgtcaccaacataatttacatagatatgtattaacattatgaaattacattttgtttttaatgcttacaaaaaattattggaacattttattggttttcgtgtattgaatttggttgtaacttgtaacattcggcctgatgacctctacgatatttgtttttgtttttactagccattatctatatatgactcgacgttagtgttctttttttgttttcgttgacggccgacattagtgctttatataatcttattgtcacctaattatttgcacaatttacgcgtttgattaatatacgttgggaaaaaaaaattatgcttatgttgtcacgtcgtagaacttattattaaagatagttatttgaaatttgagagattgagactgtgcaatagataatatgattatcatgaacaacataatagaaaagaattagtcattttaaattgaacttgtaaaagaaaataaacgttttgtaacttttgttaaaatgattacgtacattttaaaagaaaagtactaaaatctaaaagtaatatgatttttgttttattaaaatcaaaatcgaaataagaaaatgggcaaaattcttatgttaattttgaattcgatctttcaaaataaatctctgccacacgaattactttagtaaaacgattatttaagtcataattttacatagtttatctttattaatatctttcaagatatactttaaaataataaattcctagtttcatcaaatcaatagttttcccaaacttaaaaaatttactcgtaaaagggattggacttttcttatagaaaaaaaatcagctaaaaggcatataggcatgcatataattttatattaagtttgaaacctcgtccttatttatacattatcaagttcataatcattaaagtcaaattaggacagcctggcccaaagttgaccattagaagagggaaacaaaatagtgtatagtttttttaaaaatgaaaatatgcgaaccaaactatatcgtctactaaaaggatatacataagaagagtcaattcaaataatatagacctatagctcgatattatgttgaagaacacaacaagtttactcaaacgaagatg

SEQ ID NO: 5408 - DNA, 3000 bp, Unknown
  misc_feature (1)..( 3000): cDNA_ID_1007534_gDNA_ID_1620785_Annot_ID_50421 3000 nt of promoter + ATG
ttagtttttaaatatttatttacctaaattttactaaatgagtattctttaaaaatttgcaaacctaaattatggtagactagtgattttgttttgttagtccagagtatatttaaatgttcgccaagagcactaatgaaatcttattagattaatttcatataaagatggagaagagagttgtaccatcagcaattctaaagttacttctcttcttctcattacacaaatttatctctgaatctatcttgaaagaaaccttaaacacatgggctaatggactatttttatgataatgattgggctgctctaataataagaagcatacataccaaatttactagtggttaattaaaattagagtcgtaaatccattaaacatagcaatatgtcgaaacccgaacatgcgccagtccaactcaaacgaagatcaatctgacccgaaattgtcaaatgagagacctaaagaaatatgtaagaaacgtggattagcaagacttagacccatacacaacgtacaaataaaactcaaggcccaagtcgagaagcccccaaaaacttattagaaaaagtgaaacactcatatggattaagctcattttttctgtgtgggctagaaatggatcgaatgagctaactaagtcgagattgtccaactaaattcaaagacgaaagaaaatttccatcaaccatttgattcgacaaaagacaaatcataggttacttcactttctcgagtgaaatctgaaactttttcaattttgcgtgtgagtgtgacatttttttttttttaccataaacaagtataatctgttttaactgctgaagattgtaaattcatttgatgaaaaaaaaattaattgcacaataaacgcaaacaaacaatcaaagtcatactgatgtatcagagaggcatgctttgcaattttcaagttgaaatgatctcacaaaatgtgtgtacacaaatgaaaagcctatcaagaagagacttggttcccacctgcgcaagcctatgtcatgtcgaatggctaaacctaatccgaaactccatctctatcacaaatttatacttgaacctaaattttacttagactcattctaaaacagagagcaaaacgagaagaggacacagtcaacgacaaaacataaggtcccataatgcttaaacagaaacactatcctcaatcacaaagtccctttttctgaatagatgcagtaagcaaggggcgcaaggctgaagacacatagaaactctaaaagtgtcaatgtaccaaataacaacaatcctagactgatctcaagaaacagtacctgaatttccaaatatggttcctatattcaatcgactaaagatcccatattcttggttatataagttactcattcagataaataacttaacaatggactaatgtaacagtaaggagttttaaaccatctgaaatagtagtactacaccgattcaaaagtatttcaaatcgaaacacaaaacatccagaaacatcattactcaattcccataactgtttttccaaaactaaagccattaccttgtgaaacagagatcctcaagtgtgatgtaatcaacgccaactcgatggccaatacggatgaattccatatccagtcttccagttatccaagtaaacaactttcttcacagcccagaacgatatgaacaaagccaaaagcataatcaacctttgtgcagtaatattcttcactcgaacaagcacattggtaacaaacgccaaaagcaatccaacaacagtatacaagaatccaacagcaaatccttcagctccaagctgcattccagatccttggtagaaaaacacaagcttattcggatcgttacgatcttgaagaaacatcggcattttcctgataatgttgtgcattgtaccagcaacactaaagaagtaaatgaagatagcaccagataaccaaagtctagtatcatgaagaatagtttctcctttcaaaactcttttgatgataaacggagtagcgataacgatcaacgcaacgataataccgatctgtggtttcgaaagtagcggtggacgttgaataggaccgaccttgagtttagttcgttgctcaacaaactcagccattgattcagctaatctagagtaatccgattgatccatttgaccagattcatcacgtagattcgatatcgaaggacttacaagacgaatgtgaggtaaagcgttaacgccaaagagctggaacgaagattgagacttcgaaaactcgatctcacagaagaaaagcttagttccttcagatccattgttgttagcgaggaatgaagcggagacgatgccgaattcgcgacggagctcttgaagacgaagctcgtttttgctgtggagttgagtagcgtcgaagaagacgagtaacgagtaaggacgaggcgtggaagcggaggttaggaattttgagattccatggtcatcgagatggattacgcctgattcgcttgttgatctgagagatacaagttcgttgagaagatctgaatcggaatccgaatcggaaaacgaagctgcgaatgtggatgatagtgttgctatgaggaagagaagagagacgagttttgatttgagcgccattgttgttgatctctcgttctctcagattcgagaagacgaagaaagtgaaggaaaagggtatttgccgtttaccggaaagcctctatctggagaagaaggtctcgaagttcttggtatctcgctggttgtaccacgtggaacgtttttattggttgatgtaccacgtggattattacgattcgtggcataaaatacctgtgaggctatgagttttgacgagacatatccgactttccaaatccagaaaaggaaaaaaaatatatttaaacatagataaaaatttcaacaccgataagttttcgtcgtaactctaacccattcgaattgatttaggcgttagggtttcttcatatttctctctcggaagaagaagatg

SEQ ID NO: 5409 - DNA, 3000 bp, Unknown
  misc_feature (1)..( 3000): cDNA_ID_3076928_gDNA_ID_1620786_Annot_ID_168138 3000 nt of promoter + ATG
ggggttgatatacaagcagtttcaaatgctttgcgtacttcatttggttctactacgagaatatcacaagatttccaggtatcttcatcttgtgatgaaaattacactaaacctaaagacagattcactgaaatttaaaattgtggcaaagcctttatcagcatttttaatattattgcctatgagctgaaatgtttcatctaaacatgcaagtcggaaaaggcacattttaaaatgatttctttacaacctaatgcttttgagtagccacaaaggtggagaaaacttaataggagtaatagtaggagcctggttgttttacaatgatggtaattagaccgacctcattagcactttctttacttctgctagaatgacttatgtctggaagctatctcatgcattaaaccaaactctcagcttcatgatagttcaaaacgttggatggctactataaatttgagaaattcggatttctgagagaggtgtattatttctgtagatgttttcctactcttaaaaccccaatcagcaactgaccttgtcatagttaagtgaatttcgttttggtgagattccatcgacaggattcttcaccgtgattatagttttaccctgtcctgtcattatagttctaccataatccttactttttgctgtacagggggtgatggaacaattatatgatgttatgtacgagttcaacttttcgctgcctccagactatgctcttgttataagatctcttggttcactggaaggcacggctaagattcttgatccagagtttaaagtgattgagagtgcatatccatttgttatcgggaggctattagcagatccaagcccagatatgaggaaaatactaagggagcttgtcatttgtaatgatggatcaataaggtggaatcgtcttgaacgcctggtactgtcatatagctcctctcgttatgattattgaataatctaacgaatgagcagctaacaagctctattttccaggtagcagcaatatcagaacaggcttctgcgacttcaggagactctccagaagataaaacgttgaagaaatcatcggaactgaaatcattcgacatgcattcagtagtttccgcaacagaagatctgctactgttcatattatccgagaaagggcagagagttcgggtcttccttcttcaagacataatcagagtggttgatattttcctggaagtagaggctcttgagctcaacaagaccatcaatcttaagacggtcagtaaatcatccttccctatttctttctttcgcaacggaatcttctgaaaataatcttgtcaattcaaaactgcaggaagaagggacaatgaaaagagtgagcaatggattcaaaggtctgagtgaggcggtgaagcttgcaccgggaatgtggatatcaatgcttcttcggatgtcaaggaagtctgaggttcatagttatgctttagatattgtttctgcattgtctacacattttggccacaaagtgcctcacacttgttggatccttctctccaaattgctccatcacaataagagccaataattaaacgttcgtctatgctattacatacttttggatatcatatttagcaattagcaaaactaatagaaactagccagtaaatacgattgactcttagtaagaggcttaaaaataacggatcactatggactcagtgattttggtgctaaggcggctgcatttctcgagactatctcaccggactgcattgtcaggtactaacttagttttgggtggaatcatattgaaagtgactttatggatggaattattcggaccgttgtagaattagggctaaatacctctatgacggattcaagggataataaatgttaaggaaagtgatttgcactacatgattttccaaacctatgagattcatatgagatgagagatgcgagaaataatggagagatgtgttgagtcatatattttatttcatctgttaagaaaaattgaaaaaagttttaaaaaaaactaaaactttatgttctatttctaaaatcaaaaaaattgaaccgttatccggcatcacgggtcaaagaaaagtttttatggacgtgaaaacactgactaacacaaaacaatcgtaggttgtgttggggtacaatgggttttaccactagtagctaattactacccatgttggttctcttgattcgaaatgttttttcctgttgtggatctgttgggctctttgcggctttgcctattagatttagacgtttcggctttgtaaaattttctttcttatgcaaccaatagcaaatcttttaagaaaaaaaaaaaaaaaaaaacccgtaattaatatcgtaagtttgactttatttgcttatatgccagcgtcaaatccgattgagcacgtataacaatatccaaacaaaaactaataccattatttatacatacatgttgcatcacgatgaaataaacaccttaatggcagtttaaaagtttgtgtgtatcaccagatctgttaccaacacgtaaatctattacgagatctattacgacttacaagagagaaacaaattgtttaataattcaagttggattgctttcaagtagttaaagtgagttgtggaaataaaagaggattgtttaatggttcctcggtaggaggcaacacataaatatatatcacgagtgagagaaactggatttttttatgttcaaagaaagaaatggaaatgataatcatctctctctgcctagcaacaatcctagcccttcttctcctaaaacaatttctgaatcgaacgtacactgccaaagtcaacctaccaccgtctccgtggcgagttccggtaatcggaaacctccatcagctaagcctccaccctcaccgctcccttcgttcccttagccaccgctacggtccactcatgctccttcattttggccgtgtcccggtcctcgtagtctcttcctctgacgtagctcatgacctcatg

SEQ ID NO: 5410 - DNA, 3000 bp, Unknown
  misc_feature (1)..( 3000): cDNA_ID_2147918_gDNA_ID_1620786_Annot_ID_168148 3000 nt of promoter + ATG
ttcagtatcggatgggagatcacagctcccgaattgtcagctgccgtcaagtcgtacagcgaaattgtgcgtcggacctcaattacagatggaggtggtggtggagcatcagtcatagcttcagagaaaactcacttgaaatactcaattcgaaaaacacagattgcgctctgataccatgagaaacttaagacaagatgtagtttggtttatgttgtcttatcttattaaagaggcgttaaaaccttacttatacaaagcaaaagatataacctaaagtgttgcacaaaggaaatgactaaacaggatatatattgttgactaagccaactaaaatattgaccagcaatagcttcaacactctcgcactctccataaagcttttcactacctcatggtgtttcctgtgaattgtacacacaaatgatgatgattactatataccaaagagtttaacaggaaaaaatgttgcaataagtaatggaccaaactttatgttattctcacgtatccaaatgcataaatactaaacaaaaatcagagcggttccaaacatgcgtacggtacggatattttgagttatagatcaaatactgagatcatgattaatagactcctaatatcctacgcatatcggatcagatttcaaatgttttgtccatccctatatcacaatatacatgcatgatgaaataagctttcattctcacgaccaaaaccttaccctgcacgaatgaaatgaaatatgattttgtcatatcgagctaggcgacaatctgaggtcatggaatgtatgttaacaccgcggaccacggtgcacccaagtctctccaactcttccacgttggcttttccattgttgtagttacgacctagcccatctaccgtacacataaaacattaatcagtaaagttgataagctatattgttgagtttatttttcatgtagtgattatgctagtatatgatgataacaattaaaacaatataaaacgattgatggttttagatctactactacctcgaatatcaaaagatgctgcagtgatgttggtggaagaaccaaatgctttggctagggacaaagagaatgaaaaatctccttcaccgaccagaagtatttgcttatcactatagtggcataccattttacaatctgctgtttttcttttcacaacatgtccttatatacacatgtataacacatatggatgcatgagtcaaattacgagaactcgtattaaatgtttagttctgtctcttcgaactttgtgatcattgaagtacgttgaagaccattcatatttctttttttttttggttcaaatttttttttttacaacgggtttattttaagtttaggaccatcaatttattttggccctaataaataagattatcatacactggaagaggtgacttgctatttgcattcttttttctagtaatgaaattatttttctaaaatgctttcttgataaagatttatatttgcgaaaaaagaatataaaaaaagattcatagtttctaaaacaataccagaagttttattagtttttttgtaataggtttatcaatgacaaccaccacaacatcctccaatgttgaatatcattagagattgatccgggttatacgtcagaacgatatccttttacaaaatagtttaaattttaaattacatttattttgttaatattgtttgttttgttaagtatttaagattatacaattttatttcttaattctataatttcaccgtagtattatcagatgaattttgtaaagactgaaagtgaaaatactaaatactttaagaatttttggctaaaaatctacaaaaacgtacatgtagattatcagtttcaagtattttataaaataaataaaaaaagtaatataataaagagtaacaacagttagtagttggtggcaagcttttgtctaagtctatataaattatcaataaaggtgacaacaatatcccaaaatgctgggatatatatatttacttttgttataaagaaatgaaaatgggctttttggtatttcatgatcagtggagaagtagtggtgacaagatctatatttcacccaacgatttccaaacacgtatttaaagaggatatactaggttaagaaacacaaacaaaactacttctgttcctttgtttggcgactcttcaaaaagcttttggattttattttattttgggaaatactggaattagaaaacttatacacataaatcaaattctttcagatacattgtattctctaatatactttaaagttacgtaattttaattacaaattcttacgttcacctttaacaacaacgaaaaaggttcttcttatgtagagaaagaaaagtcaaaagtattgatgaagtaatatggtgactttgatgcaaaaccaagcttaattccatttaacaaagaactcatcttcttctattgaattaataaccttataaattctataaaaagcttctatttttgaggtaaaattgcaaaaaataagcagaggaaaacagacaagaatgttcttagtaagagacaaagaaagatgtgtgttctggtcaaacatttagcagcaaaagctttgaccttttcctttcgtctctcttgatctaagttttatcctttagtttctttattcattttctttttcttctcttcttcttcttcaatggtcatttgttgttcatacgaaaacagggtcaacgaatgtgtgcaaatttcatttttgtttcttgagtttaattcaagattcatcatatttgattcccaaatctttgatttttgacttgcttacatcaaaagattcatcctttttttaataatctgagctcaatccaatccaagacataccaacttcaaacaactctcttgtcctcgcccctcggatctgtttttcagaccaaacccatatcaaaagtttcaacatttaagctcaaaacagagccaaatcttgaatctttctcctccttgcaagtt

SEQ ID NO: 5411 - DNA, 3000 bp, Unknown
  misc_feature (1)..( 3000): cDNA_ID_2147908_gDNA_ID_1620786_Annot_ID_168146 3000 nt of promoter + ATG
ttgaggttgatgttgatataagtagctcggcgattatgacggcgcttattaggtttatgttggggtatgttacgtatttaatggttgatattggttttgttgtggaagcgcaaacggaggaggagttgccggagagattgattggtggtgctaggatttgtcatatggagttatcgtcggcgtttgtgatttatgatgatgttgatgggaagaagagttcgcagcaacggcggagaatgatgggtgcggcggaaggaaatcacagcgaggatgaggattgagatttgaaacgaagatacgtcaacgcttactttttttttttgttgggatctgagttattaaaaaaaattgattattttgtttccacgaggtgggcaagatttgagattagtttttttttatatatataatgtaaaaaatttggcaaaattaataaatatgttttgtttatttctaaagtagaacatcattttttaattatctaaacatgattcaactaataataaaacaatttaacaaattaaagaatcaaatttattaattttattttaaaaactaaaaacatcatttatgttaaaagaaatttttcaatgatatatcagaaaattacttacattatgatcggtacgaaaataatatttatcatatttgaaaacatagaaagtggcgccataatatttaaatctattaatctgtagtgtcttgtgtgatacaatgctagcttgtcaacacgataagctgcgaagtttcattgaactgaagagtatagcttgtgcgatacattcaaatgtaaatttgacacttgttaaatgcaaaatatgattacgatgcgaagatatttaaggtttggcaaaacgaagtaaacaaaaacataatcagacatatatttgagaatcagctatttcttaaacatgtaagtgatagctgatccgataggatatataaaatcacaattacttccactttctcttttgttggaggaacttgggaatgcccatttaatgaattgcattctctggattaaacgcaaaccactttcttcagctagagcctttaaatcccacttgttaaatgggtttagtgtgtttagagtgatatgaatctctccatcttcgtctttcatcatctctcttgcactctccataaatcctccaaataccttattgcgtttcctgtgaattgcacactcaaatgttgaatatacattcatatgaataatatatatataatcataataaatattatacatatatatttttaaaagtatatatatgaaagtggttccaaacatatatggatgtatcaggaatccaagatcttgttatgaatttccaaatatcaaacttttgatatataagatctgaaacaagctcatcaaaaaccaaaccctgcatgaggaaaattaaagatgattatgtcgtaatgagctaagcgatcgtctgatttcatggagtgtacattaacaccacggaccacagtgcaaccaagtctctccaactcttccacgttcccttttccattgttgtaattacgccctagatcctctaccatacaaaacataatcgccaaacttgataagctattgttctttatatcggataacgacaataacaaaattgaaaaaaaaatgattgataattttagacatattactacctcgaatatcaagcgatattgcagtgatgttggtggcagaacccaaggcttttgctaaagacaaagaaaatgaaaactctccttctccgaccacgagtattttttgctcattgctatatcgacttaaccttttagattcctgaacatccatctcagatcagttgcatgtttaagtcaattcacaccatgtccttttatacacatgtacatacacatcacagggatgcattagtcaaatttagacaattttagtgttaaatgctggattttgtaattcgtctcttcgaatttagtgatcatttatgtacttttgaaagaccattcattttttttttccgttcatatttttatttttatttttgttaaaaccattcatattctacagaggataatcaaacttcttgttttgtttttcttggttcaaaagttctttctatcacggattagttttagtttaggatcatgaatagccctaataaatatgattatgatatagtaataataatacttaggaagagtgactagctcgttttacattctttatctaatgatgaaatcatatttattattcattttgtaatatgtttatagataacaacattcttcaaaagttaaatatcatttaattttcaagtattttataaaatagaaataacaagtaacaacaattattaattagttggtggcaaggttttttgttttttttgtctatttcagtatttctatataaatgatcaataaaggcatgacacactcccaaagatgctgggatatttaatattatttcttttgttatgaagaaatgaaaatggacatttcactttttggtatattataaaatcagtggagaagtatagtggtgacaagatctacctttgatccaacgatttccgaacacgtatataaaaaaggaaatactacgttagaaaaaacaaaactgtccctttgtttggcgacttattttgaaaaaaacttagtagattttttcttttttttgggaaatactgaatttagaagacaataatgcaatgaatattatacataaattaaattctttcagacacattgtattatttgagatatgtggtcatatatacgtcggctatctttttccctttatcctttattttcttcttcttcttcttcattgtaattcatacgaaagcatgtcaacgaagcttgacttttaacttgcgtacgtcaaaagattcatccttatgatctgagatcaatccaagaaatatccacttcagacaactgttgtcctcggatctgtttttcagacaaaagtggagctcaaaacggagacaaatcttcaatctttgactccttgcagaaccagtt

SEQ ID NO: 5412 - DNA, 3000 bp, Unknown
  misc_feature (1)..( 3000): cDNA_ID_2147922_gDNA_ID_1620786_Annot_ID_168149 3000 nt of promoter + ATG
gaaggaaacagtgttttcattatgtgatcatagtcataaagtattaggagaaagaatcgttttttttccttagacatccacctagttggcaattctagagatttgctttcaggtgtcaaagataatcagaagagaacattaccatgatatattggtaataaatcaggctgtaccaacttcgacatcatctgaaccatcagctgccgctactaaagggcccttcaaaccattttcattgtgaccgataatctcacgagctgccttttcaagaaagtccttcgcagctgactgaacagactgtttctcatttgattggtatttcctctttctcgcagatgtttcagaatacctgatcctcgatttctctcctttactgaggtctctaatgctttgcttttgggctagattcatttagcaatgactgttagagaaacaatgatatacagtaaaagagagaggtggaaacaacaaactgtacaaaagcttactcgatgtaagatcaggtagagaatgttcgatgaaacgggttgctgcctgacggtttaagacagtggtcgggcgcaaaggtcctacggtaaaaaaaaaaaagagaaatagataagagaacatttagaggataagatattgattagaggtagccattcaatgtctaacaaaatcgaaatgactacaaaatttccttatcagataaaccaaacatcaattagacaagttaaatatgaaacgatgtgcatgaaaagaaatactttcgagaaactaagtcgaactagtcggcccattagtacccggtagcatatcgacaaaacgattcttgcccgaaaggcccacgagtcatttcacaaaaacgcagagcacaagtgttaccaattgagtaagcactttctaaacggaatataaaagctcgttgataaacaaagataagacactagcctccaaaatttgagatagtagacaagaacaaatggatcttccacaataagaaaaaacttcgaaaaacatcgcgaaacattaacatcaacaatgagccacaaataaattcaaatcaaataagttgtctaaatggaagtaaatcttgacaaaacaaagttgaaactatccactttgattttaaagctattcaacggaaaaacaaatacagagaaactagatcacgaatcagtctccctaatttcattcaatagactacgagaggaaatctcctttcaatataagatgataggtagatgcaatagtaaggtgactaaaagataagtccagaacaatggattaggcgcgattcattattagaaagccttccaatggaaatactacttccctgcatttaagatgggtacatgcaataaagagtctttcaacgaaaatcatcatatctaccaaaaataaataaaatcatcactgagcatagaacaaaacaaagaaaacaatctaaagcagatacatcatcccaacaaacagaggatcagaaaagcaagtcctcggaaaatgtactaatcaacgaagaggttagcacctatctgcctaatattaagactggctaaataaattctaagctgagagcaaaatccttgaacacggttgaaatattatccccaacaactttataaggtaaatggatgcagcaattctccaatgaaaagagaaagccttctaatggaaacactacttccctgcatttaagatgggtacaagcaataaagagtcttttaaagaaaatcatcatatctacgaaaaatagtatcaacactaaacatcgaacaaaacaaggaaaactatataaggcagatacataatcccaacaaacaaaggatcagaaacgcaagtcctcaaaatgtactaatcaacaataaggtacacagaggatatcatttaacgcttaagaaatcgttagcacctattagcctctaaaattacgaaaggctaaataaattctaagctgagagcataatccttgaacatggttgaaatattatcccccaacaaaggtaattgaaagcagcaattctccaatgaaaagagaaagccaaaaaaacttgcttaatccacgagacaatacaatggccaattcaaactgaaacaaatggtttaaaccaaaagacacacagaaccaaacaagtttttgatctctctacaaatcaatccaggcaccagaaaatcaatctttacctttactttgatcaacacacttctgaaacttctctctgtacacgtttatccgctcctacaaaaccaatactaccatcaatcaaacaacaaaagataccattttgattaagttaacaagataataagagaactaaaacatccaaagacacatacaatttcagattttacacgatgatcatcaggatcaacaccagtacatctcaacctcactgtaaacacacaaaacaacaaaaaaattcaaatttatcacaaacaaacaaacttcaatcgaaacagattcacaaagaagaaagagtgttacgttcgtaaagagtagtggtggcttcagctagcaagtgcatagtcttagctcgctgtaatggttgcattgcagcgagaacctctggctcagctaaagtcagcatctgctcaagctgtggcttcagttccttgaggtacgcaagtgtttgattcaccgcttcaatcgctgattccggaaccactcctccagctcctccgccgctacttcctccacctccttccatcttcaatcgaatcgagaatttgaaaattgaaaaatccggcgtagatagactcagaggtaaagagattaggtttccggttagattctctgagtcgccgacaagtgttgaaatttttatctttatggagatgaagaggcgctaacacaatcgggaaagagtgacgtcagcattatcaaatatgggccgttaataggcccaagacaagtcaaacatttaaggcccattaaactagtgaatttatttttatgaattattaaaaggtttcaaactcaaatgtagatcagatcggtgattgatcagatcggcggcgatg

SEQ ID NO: 5413 - DNA, 3000 bp, Unknown
  misc_feature (1)..( 3000): cDNA_ID_2147937_gDNA_ID_1620786_Annot_ID_168154 3000 nt of promoter + ATG
atgttttttcaacattttttttatttagaaacactaactaattataaataaaaaacttcataaacttaaagtttgaaatgtttttctattagtatcttttaagctattctttttatgatattttatgaataagatatttctataaatatattggatttgtgtaagtttttttttaatgttttttactggccattgtagaataactccaggtatgttttgtaaatattttacttattcatgtagttaaactcaaaaagaaaatatatttatgtagtatttccttagtttatacatatatatatatatatatatatatatatatatatatatatataagttcctgaatatgcaaatatactctacaactacaagtggattcaaagttctctgaagtttagtcatcaaccattgttgtgtctcgtgcatattatattgctcatttgtaaatcgacaattgatgattatcaagatatcatacagtagctagagtgtaaacgacatctgggaatgtacttgtttttgcacgaaacagtaaaatgaagtagtggcttctatatcggcagttttgaaaatctcccaatgctacattgcataatcgaactatgataatgcctctcctcaatccaaaaaaaacataagatacgtacatcatgctaaatgtaaagacacataacacttcaaaaaaccgttttacattacttctttcagctattttttaatgttcatttcatatggtagcattgtagttaactttctcaacataagtctttaataatctaatgtctacacataattccataaatatgaaatttagaaaaacgaatattaaaaacaaacgcaacatagcgtggatactcatctagtgataaggataagaactttaggatacttcttaagggttacatttagaactatgaaaatataaaatcaactccattgggtaaggaccgggataagctgaagtggaactttcttaggacagacaagtccatatgattcttcaagatcaacatcttctacctccattccttccggaagcttccaatcaaatcggtaaagaagattgataagagtcaagtgtaccaaagccatacccatccctataccagggcacattctccttccgctaccaaacggcaaaaactcaaagttcaaacccttataatcaatctggttatccataaacctctcggggatgaaagcttctggatctttccaaacgtttggattcctatgaatagcccatatgttgacatggatccatgttttctttggaatgtcataacctccaatctttacatcttttgaagcctctcttggaattagaagtggaacgagcggtaataccctaaacgtttctttaactaccattttcagatattcgagtcgttctatatcttcctcaatgatatcgtctttgttttttataacttctctcacctcggcttgcgctttcttcataactcttgggtttgaaatcaaatatgtcatcacccatgtcataacttgtgcagaagtgtctattccagcgttaagaatattctgtaataatcaaagagtacatatttttaaaatttatgcaacatgtgaagaatgaaagtatattacaaagtgagaggttcatattacttacgaaaagaattcctttggtgttgtctcgagtaagttgaaactccccaagttcaatctctcccctttccatcttgaggagcaagtcaatgatatcatccttaatactctcatcttctagatgatgctttatagattgatcaaaaaatgcatccattgccttgaaaatcttctcacatttgctatgtaaccctgtgatcctatcgatgattctaccaatgatcgggaagtaatctgctgctgcaaaactccccaccacctccatggttccttgaataacttcctcataaagattctcaagtttacttcctttaagattgataccaaatacaactctacaaatcacacttcctgatagtttcattaacttcgtgttcaagttaaccggtttctccaatgacgcagcttgtgtgatgaaatcaacgagtgatgcaacttcttcttttcttgtatgttgaaatgattgtaccctttttgcagtgtagagttcaacaactgtcatctttcgtacctccctccaatatttggtgtagggacaaaagccaatatcttttaaattgtatgtaagtcttgcaggataagtcatataaggccgcgaacaacattctgcgtcaaatgtttttaaaacttcctttactgtctctggtgtagaagccacaacagtagacacacttccaaaccttagagccattagaggtccatatttttcggataatttgaacattgaactatgaggtttagatcccaattggtgcaagtttccaataataggaagtcttgggggtccgggaggtagattcttctttgtctttctagtgttccttacaatgattatagttgaaaagaagacgaatgcaacaatgatataccacaaactcattttgcttcctacacaaaaggataagtttatacaaagcaaattagtttatggttgaaaagaagacgaatgcaacaatttatattttacaatcctaaaagaaatactataagtttataactagcaagcttagtggatcatttaaccccaaaaaaaaagtgtggtgttcattagttatgagtgtgacaataaattctgatgttaaaatgtttgttccagtaattttgactttaaaaaggaaaaaaactactaaaccaaacacatgggccacgagaaattttagaagattttttagggctatgaatgtgttaagtttgattcaagaaaattggattttaaagactcaacaaaaatatattatctaaagtcttaaaagtttttgtaatcaatcaccaatagatgaaaaatatagaaccccataaaataaaaccaccaaagcatcatcactctgtcgtttttggcaaaacaaaaaaaatcatcactctgtcgtaatg

SEQ ID NO: 5414 - DNA, 3000 bp, Unknown
  misc_feature (1)..( 3000): cDNA_ID_3076908_gDNA_ID_1620786_Annot_ID_168156 3000 nt of promoter + ATG
tagcaaatgtgagaagattttcaaggcaatggatgcattttttgatcaatctataaagcatcatctagaagatgagagtattaaggatgatatcattgacttgctcctcaagatggaaaggggagagattgaacttggggagtttcaacttactcgagacaacaccaaaggaattcttttcgtaagtaatatgaacctctcactttgtaatatactttcattcttcacatgttgcataaattttaaaaatatgtactctttgattattacagaatattcttaacgctggaatagacacttctgcacaagttatgacatgggtgatgacatatttgatttcaaacccaagagttatgaagaaagcgcaagccgaggtgagagaagttataaaaaacaaagacgatatcattgaggaagatatagaacgactcgaatatctgaaaatggtagttaaagaaacgtttagggtattaccgctcgttccacttctaattccaagagaggcttcaaaagatgtaaagattggaggttatgacattccaaagaaaacatggatccatgtcaacatatgggctattcataggaatccaaacgtttggaaagatccagaagctttcatccccgagaggtttatggataaccagattgattataagggtttgaactttgagtttttgccgtttggtagcggaaggagaatgtgccctggtatagggatgggtatggctttggtacacttgactcttatcaatcttctttaccgatttgattggaagcttccggaaggaatggaggtagaagatgttgatcttgaagaatcatatggacttgtctgtcctaagaaagttccacttcagcttatcccggtccttacccaatggagttgattttatattttcatagttctaaatgtaacccttaagaagtatcctaaagttcttatccttatcactagatgagtatccacgctatgttgcgtttgtttttaatattcgtttttctaaatttcatatttatggaattatgtgtagacattagattattaaagacttatgttgagaaagttaactacaatgctaccatatgaaatgaacattaaaaaatagctgaaagaagtaatgtaaaacggttttttgaagtgttatgtgtctttacatttagcatgatgtacgtatcttatgttttttttggattgaggagaggcattatcatagttcgattatgcaatgtagcattgggagattttcaaaactgccgatatagaagccactacttcattttactgtttcgtgcaaaaacaagtacattcccagatgtcgtttacactctagctactgtatgatatcttgataatcatcaattgtcgatttacaaatgagcaatataatatgcacgagacacaacaatggttgatgactaaacttcagagaactttgaatccacttgtagttgtagagtatatttgcatattcaggaacttatatatatatatatatatatatatatatatatatatatatatgtataaactaaggaaatactacataaatatattttctttttgagtttaactacatgaataagtaaaatatttacaaaacatacctggagttattctacaatggccagtaaaaaacattaaaaaaaaacttacacaaatccaatatatttatagaaatatcttattcataaaatatcataaaaagaatagcttaaaagatactaatagaaaaacatttcaaactttaagtttatgaagttttttatttataattagttagtgtttctaaataaaaaaaatgttgaaaaaacataaactttcatatttggaacgaaacaaacataaaatttaaaatgccatgtcaaaagcaattgtttttattgttttaaatttgaaaattcatgttgttttggatattattttttcatttctaaatcattcaaggagtgtatttgattattttggtggattttagaattggtctgcttttcagtgaatttcaaagatattctaatgattgttaacaaaaggcttttcgattgagtgtggttttataaactgctaaggagaattttggtatcaaagttagatacccctacacggctagtgatgaagaagacaacactaagaaaaccctgtgaattgtgaaaaagatttgttacctgcattattgttccatcactatctcacaacataaaatgtgtaagaataataacaaaacgtcttgcgtctccaatctccaaagctaaccaaaaaaaacaatcagaagaagaggaggaaagaggagtagagacgccaatagatctcacggactctcacctattgttaaaataacgccaataatttgttagtacgagatctagtaatagtagttttatttaaatacaaaaccctgtgaaagagatttgttaacttcaaaattgtacttttatttaaatactaaactgcagtaatagtggaaagactgaacaagagatcaaagtaagaatcagagcttaaacgagattatgagaaatatgagaacatgagacctgcacgattgaatgatgatgagacatgaaagggtttcggttcctttttttttacataccttaaatgttgtctactttttttttttttttcaccaaattcttatattaaaattaaaaagatacatgaagattagttttcatcggacaaacccgaataacaaacccgaataacaagtttgaaaattgaaaagttgaccaaacataactcaaacatagagacactagctgaagtaagtttgataggagaccatgagacgtttcgaaactaactaacacaagcatgcccatgagagaaatcgtaaacaacacaaaaacctcgactggtaagaaaatagtcaccgtaactagtgacattaaaacgaaattcaaaccatcaaacgtggttctaggttggaaacaacgtggatttgccttagacgcagacatagagacgtcggagaagtattcggtaaacaagcttcgctgacg

SEQ ID NO: 5415 - DNA, 3000 bp, Unknown
  misc_feature (1)..( 3000): cDNA_ID_2147955_gDNA_ID_1620786_Annot_ID_168160 3000 nt of promoter + ATG
catttaaaatcaaataaaataatatcgtatatttataatcatctttacaataaaagtttttagtttaactaaaatataagcttacatgcggtatactgcaagttaaaattataaataagcaaattaccatcacgatgtttgtaccttctcacatacacacctatcaaaaacttaaaacctttcaagacctcttggtatattcaaattaggatttcttcattcatggaatcattcttccaagggttttaggatgtcccatgaaatgattttggcagaagaggatgtaaaacttttcgaataaaacgtagacagcaaaacatatgtttttttgggagtttttagataattaaatcagagaatggggctgggcatatgagtaacctattcaagttcgggtagaacccgttcgggtagaacccgttcgggtttgggattaatgggtatatgatttactacccaatagaataattctaaatatttggttctggttcgggtcgggtccatttgggtttgcgtcagtttggataaaaagtttcaggccctaaaaatacccaaaaaaattgaaacgggtattttgtatgtagatagtgggtctccaaacaaaaaaaacttttagatttgttaagttttaataaatttaattatatttgaatatattttactaaattttgacaaacataacacataatttttgaatagtttagttgttttggatatttaggtccaaaattaattgacatatttagatttataattataattttagataattagattatattacgattaaatataattaatattttggatattaaattaatgtttgggtttttgaataccctctttggataaagggtaatttctggaccaatcggatatccacgggtttactaaaactctacctaataaggaaatttcctaaaattctaacccgctctaacccggttttttggttcggataatggattggttatcgggtctgttttttcgtgagccctatcaaagataatctaatatagggcccaattaggttcacaaatataaccaaaacattatacaaaaactaattttaagttaggccaaaaattagatcttttaatacaaaggaaacatgtttcttactagaacaacttgtatacaaattttacacatttacttaaaattatatatgttgtatttattataaaaataatatttttaaacaaattcaatccaatgcagcattatatccaaatagtaaaaacattgaaaaatattatgacaacacttttatattatactatttcttatgtaattcaaataaagtatacaatttagtttatacacaatattaatgtccgtgctatacagcacgggttatgatctagtaatgatgtaatacacaaccttatgtgggaaaccaacaacaagtaaactatatatcaattcaaatgacagattcactgctacaccacagttaaaaacaatcaatcatttctcatcgaaataaatctgccatcaaataattccaatgagtttttttttttttggataaaattccaaagaggttactagtgtgcataactccacgtggtaagtaaacccatagtggatgaatgttatgtctgcaattgataatatgtcaattttgggttaattagtttttagtaattttttaccaataaaattattccacttttagaaaataatcactgcagatttgtaactttcgttcactttgaaaacttttattgaattgaataaatttagctaatcatgttaactattagattataataaggcccaaaaacacttagatgaacccggttagtggttaatacttttactatatgatacttaattacttaccgatagcattgacagattaaaaaatacacaaaagctttgtcaaacaaagagatttgaaagacgaatcaaatctctctacatacagggaaaattatgaatagctacatgtcaccatctgtttaaagtaagatccaatgttctcatctgtatcttttgactatgattgatgactatgtgacctatatcatataaatacaacgtggtaaattgttatactcattaagctaccatagtccataatacactttaatttcccaattcacgatttcacattactcactaatctaacattttatgatcaatctattgagtattgaggattgatgaaacaaagaacgaaggtatacttaaatggagatgtcatataactcagaaagaacttcacatatacatttattaaaggaaaattagttttcttatgaaaataattagccattaattagaaactgaaaactcttaattagctttttcccatttttgtgtcggccatatgtaacgttggacccatcaactaggtcacaattggcatacgacaaatatacataactttaaaccattagatcttttctctttcattacaagctaaagtaattcaaatttagctaaataaatttaaactaaaactttggaaatgtggtttagattgttatcaaaagcttaagtgggtttgatcttgccgatgtggcttccaaaagaaaagtattaattggttgaagaaagtgacttttgtcatgcaacctagttgtatgtcatgatgtgaaattaagtgggaaaccaaaattcatattgacaaatccactaaactctttagatgataaagtagaagagcgtgtggaagtttcaaatatcatttcctttaagattacacaacaagagaaaggttgatccatcataaagacgaaatattctttaagtcatatacatggtctacaatttctcactaagatacaaagtaaaatcgataaatataataatgaacgtacgagtggtttccaagttgttctaaccaggtgctttgtcaagatcatcgatctatattcttacccgaaatacttacttaactattattacaaagttcgaataaccagttcttttactttgtgattagtttgagctttggtttgactcaatagaagacaaaagaaagaatag

SEQ ID NO: 5416 - DNA, 3000 bp, Unknown
  misc_feature (1)..( 3000): cDNA_ID_2147947_gDNA_ID_1620786_Annot_ID_168157 3000 nt of promoter + ATG
ggaagcttccagaaggaatgaaggtagcagatgttgatcttgaagaatcatatggacttgtttgtcctaagaaaatcccacttcagcttatcccggtccttacccaatggacttgatgttattttttcatatttcaaaatgtaacccttaggaagtatcttaaagttcttatcattattatatatgaataaagaaattatttgatgaataatgctcattttatttggtaacgtaaccttaacttttaataaccattgctaaagttagtctaacaaatttagagatttaattacacaaaagagactcttatcaatcattcgttccacatattttgttcattccacttataatgttgatcagttttttctgcattgccctttcagttgtcactatttaaatccctactcacaatcgtttcgtaaacattggaccccagctattgatatgcttgctggaaattttggcattacctctcatattcaaataaacatatacctcatattgaaaaaattggcattattaattcgtttgtgtggacaaatatattatgctttattgcaaagtaaacttatcgtgaaggaattctatccaaccatcctttgaataaacaaggattgataagactccaaaaactattactataattttgtggttgagtgatagagattcccctgtaacaaacaaggattgataaaagacccgtgaaaactctcttttaaaagaattcacgtaaaatatattttatcaaacagacaataaatactaggatttcaatataaatataattgccgaccaggaaaatatgtggtggttcatttcttttggacaccgccacaccggtcaatttgatcagtcatcttatgaagattattacatatgtgtttgacgtaagacgtacattataaaagggcaatttgtatataataaattattagtttaattttccaaaaaacaccactaaaatatattatttccaaaagtaacaaaactaaaactaaacaataccttcaaaaatcaaaactaaaccctaaatcttaagcaaccatatcccataaaaactatattctaaacttcaaattgaaattttaccattgaacatcaattttggtgtttatggtatttttgaaaaacatttttagtggttttttagaaaatcctaagaatattgaatacccaagcaggacaaaataaaataatttgagacagcatgagaaatggaatcgttgagttggatacaggtaggaatccgaagaaataattatgtttcaaagacatgatatactgcaagaaaacatagtaaatttttaccaattttcctatgaaaattttggtacgaaaaaaaaaccatatacctacaacctttttatgaatattttgatagaaaaatggtaaaaaaaatttatgatttttttacaaaatattttacgaattttcctacaattttttttttgtataaataacatgcatatatatatataaatattttacaataattttgaattatatcataaataagatcaacattaataaaataaatgatttttttttgtaagatgtgtttggcgagacattatttaataaaaatggtaaactataaaatatatatattttataaatatatataatttgttaacttttatatatagtaacttcaaaaaataaaacgttttgcggtataccgcgggttaaaatctaactatacttataatacatataataataccaaaatcgttgctaagaatcagacctagatacgtcgccggcgctgctaatcaatcctcgatcgaattccttttaatacactgtcacggatatgaatatctctatcaggtttgtcgtgtcacctgattcttgcttcaagattacttctttataccattaaagtttggatttagcttctggtttctcatctactaaaaaaataattattaaaagcaacattagtatttagaacgcaaaaaatatatatatgtggatagattaaatttctttgtaaatatttatgggacaacgagtacgaaagccattttgaagattcaaaataacaaaattatcattttgttaaagtgttttgtaagagttcaaaaccttgaaggtttaaagtataagtaaatattcgtttgaagatttttaaatggattttttcctaaaactaaacgttgaataaaacttgtggagttgtggtattgcaaaccaaagttgtactatagagttggtgggtgtgaaaacttctttcattgggagacctatgatttgtagctatataccttttatgtagttgccaataagtcagtatataattagaatatgtataaaaacccttataaatttaataataatatttatgaaatgagataaatatttttactaacaacaattatttctaactttaggtatacttaatatataaaatatattaccaaaataaggagctcaaaatgtgatgttttctagtggacgcttatataaatgtgcgattgtcacacagtgtcatctctccctctccgtctccctctttctaaaatctgcggcacaaagtatatgaattaaggtaatcttcaattttatatttatttgtgtatatatatgtgtattagatgttgcaatattgtagattttgaacccggaatttaatacaaaaaaaattcttaaacccggaaaacaaaaactaggtgaaattaaaataaataaataaaaacgaaaaggtaaaatttgttaaaagctataagcgttatttattacttattcgaatattgcatgcattttgcctaccgtgatcatataacgaaatttgcaattcttacggcaaattgattctttggtgatcatcttggtttgtgcagctctatatatatttgcatccacttaacatgtttttttttgggtagttggcagcatcatgctatttatttatattctcttgttaatcatcaaataaactgaacaaattgaaaattaatttactttacataaactatccctttttgtgtagaaagcaac

SEQ ID NO: 5417 - DNA, 3000 bp, Unknown
  misc_feature (1)..( 3000): cDNA_ID_2147939_gDNA_ID_1620786_Annot_ID_168155 3000 nt of promoter + ATG
aatagtccaaagattttggtgaaagagattagtgttgttgactgaaatatcgaatataaataagtgatgatgacgcaatggtagtatttgtttgtagctatcgttggagaagatatttctagcggaatttttgtcattagctccaagtatcaaaaaagaaaatactaatgacacaaatagtgagtatacttatacatgcatctatatattaaagtttttatgtcgacgagaaaggacacgatgtggaagtcaatttcgtcatgttgttttggatctttgttttttgaggctaaactatagctaattaatactaaacacgattactgtatatacacgtagaaatccttaaatgttgagctggtttatttatttcactaatatcattttgttaaacgtacaatttttattccaatcgagtaagctttttcctttaagttgtttggaattttgtttgacatgaaatcagtaaaaaaataatcaaagtatttggtatttatacaaaggcctagtaacaatataaacaacttacaaaatcaaatctatttatagaacgatcttaaaatatcaagatactaaaactttgggaaaaatacaaaacaattacaaactttaagcttaggaaggttgttaaataaaagaatttgttagagtttctaaataatttaactatttaagggtctattggattaaggattttgattattttggtggattttaaaattagtgggcttttaataaatatcaaatatattctaatgattataaaaaggcttgagattcagtgggctcttatgatttttttaaaatgctgctaaggagaattttcgtatcaaaagttagatacctctaggcccatagttttgacgaagacaacaactgtgaaagaaaagtgttacctccaaaattgttctactacctcacagaacataatgtgtaagattaacgtcaatgattttttttatttttttgtcatctacgtcaataatttgttaataagagattagagatccaactactaggatataaaattttaaatagtaaatgcaataataatagtagaaagatcgaacaagagatcaaagtgagaatcagagcttaaccggagattaagagagacatgagaacaacgaatggtcaagatgaataatggagactaccatgaagagatcaatacgatagaatccgacgataacgaggcatgaatgaggctttttttttgtttttttacgttgatgttgtatatatgggagatttcatatttttaatttgtttgaagtcactccaaatttcatgtttaacaaaaaatagtaataatatatgaagtttcataaaatcctttttcattagatttttcccccaaattgctatattcctattagcatcacattttctatgaattttcatataattaatcgtataacgagatatttcaaattatttttcaaaagtttcaagttcactaattacacatttgagaagatattattgatgatttggaagtccttcaaggctttaacaaaaaaagatgattagtgatttaatttgggctactgtcacggatgtgttactatccgaattcgaactcgtgtatattacatgacaaagaaaaacacatttaaaaatcatcgattaaataacatgaaaacatatatacactcttcaatttttttctaaattttagattttggtggaaaatttgtagaaaaacctaataagtagatctaaaatcgaaagttcaacactaacaacatttatattgttgattgttcataataatttataataaaactaaatcaaaaatatttatagtgataatataatataatatatttggaacaaatataatatctaaagcatcaagtttcacactaaccacatttatattgttgattgtttatcacacaccgtagatttgctgccacgagtcaaatccacaatccttttcgcaagcgtttgacccagacttttgatactcgtttaattataaacacacaaatatcaaaataacatatcaccttatcttgaaaattgtggcattatattcttttgtgtggacaagaataatatgcttaattaaataaacttataatgaaagacttccatgccaccacatccttgaagcttatgtaattgaaatgtcgtgaaatgatgtataaataattaaatatgaaatcgtcacaattattgctcaaaaaaagaagaaatcgtcacaattatatatcccacacaacaaagtccaaaaagaaagaagttatcaacaacaaaaaaagaaaaaaaaaagtcccacaaacacaaagtgtaatatctaaaaatccatatctccatctctcccctctatctatcgctccctctctctaattcttcggacacaaagcataagacttgaaggtaatcctacagaaatatcaaatattacatattctcaattattattttttaaacacaaagtgttctttacttgttcgaatgttgcatgtctcttgaccgtgaaaagaaatttaggattcttcattacgacagagtgatgattttttttgttttgccaaaaacgacagagtgatgatgctttggtggttttattttatggggttctatatttttcatctattggtgattgattacaaaaacttttaagactttagataatatatttttgttgagtctttaaaatccaattttcttgaatcaaacttaacacattcatagccctaaaaaatcttctaaaatttctcgtggcccatgtgtttggtttagtagtttttttcctttttaaagtcaaaattactggaacaaacattttaacatcagaatttattgtcacactcataactaatgaacaccacactttttttttggggttaaatgatccactaagcttgctagttataaacttatagtatttcttttaggattgtaaaatataaattgttgcattcgtcttcttttcaaccataaactaatttgctttgtataaacttatccttttgtgtaggaagcaaa

SEQ ID NO: 5418 - DNA, 3000 bp, Unknown
  misc_feature (1)..( 3000): cDNA_ID_3593861_gDNA_ID_1620786_Annot_ID_168152 3000 nt of promoter + ATG
tcttattattttctaataccgtccgtagcattttaatcattaacttttccaaaaagtttatattttcttagaaagaatcttagatgattaataaatcggttggcaaaaaaaaaaaatgttagatgatttctttgataaaaaaaatctaatatgatttctttaataaaagaatctaagatgatttctcatatttttcaattactagttcatactgaattaaagtttaagggtattattgttttatgatttaaatagagttttagtgagttaaaatgtatgtagaatctattgttattcaaacaagatttaaaaaagtttattaaaatttggtattaatttaagatttgtaagaagtaatttaaaatcttcagttattggattaatacttttataaagtcataaaaagtatatatttttttatgattgagcaacaatcaaattcattgattctctaaaagctgtctctttctttacatttcctggaattgtaggtatgatattttagaagaagaagatgttatatatcacataacacaagattgagactgtaacaaccacatgacgtgaagaacactctaaatatgtcatcttccggttatatactttggtcggaagattcgacaacatatacaagtaatttcatcatcctccaagtcgggagatcattatgagaatccataatagttatgagaaccaaccgaagattcttcatggatagatttactcttcaaaagtcaatgaatttttctgtcttctattgttgctattcacaaatatattttccaaatacacaaagatccacttataccaaatttaggtgaatccttcttcttcttcataacaaattccttagctaaagaataataattgaaacaaaaccaaagatgaacatttgtgaaaactaattctcattcttcaacaaaactcaaagcctagactcttttcttcttatgcttcttcttcacgtcatccttcacaatgatagcatcggctcatctgaatttcaaatgctggaacaatctgactcctgcatttagtacactggtacgtaccaccactactctcatttaacaatcctgaaccagtcctcaactttaacatgtgatatttttgcatgtgatggcaatacttcatgtagtaaaccaagcattatgaagtctacatgtgtgactgtgatggcgtctatttgttagctgactatcattttccctaatcaattttatccattcatattgcttcttctcacaactacaagcacaaaatcgtcaaaagcttttagctccaggactgtggaaccgccactatagctatgttgacaaaagagagagattttgaacgagagaaggaagaaagaagacagagcatgaatagtatttgacaattaattagaaaatctaaatctgttacaaaacaaagacaacatctttttatagacgtgaaacagatcttggccgaaacaacacaaacaataagagttgtatagtaactcttcagtcatgactcttaacataaaacaaaacaacttttacgattgtataaacaaacaaccaaactcaattatacactaacaagctattgagtcttatagaacttctagaagatcattacaactttttggatctgtggttctttttttattcatggccttattttttaccttgggttacatttcaattttgaatcttatggatttggatatgattttcttcaaaataatacaatttacttttcattttttatatatatattatgattcttggcttttattcctttttttttttttggggggacactatatatggttaataagtactcttcttctactactcatgttacatatacttccttctcatgcttctttatccttctttctcttcaatttttccattaaagcttatggagatttcttaaaaagctctctaggggattgaacttcttgaagaagtcaccagaggcgattgaatcttcaatttatccattaaagcttcaacgacgtctgacgatttcttcaaaaagctcaatggaggcttggattcatcatcatcatcaacaattcatcaccatcttcatcatcagtattgtcactcttagtctttttggaaggaagacttcggggttttcactttcacaatgtatcctctcatgaagatgaagaatgccttttctgtattcggttgtttgattcaaaaaccttcttgcatgatttcaagatctttggcatctctttttccgaacaattatccttatttggactcatatccatcaaaggcttggactcctcatgagatgtatgctttcagcatccttagagacagccaccaaagatcttaaaaaccaaaaaaggaggtttgtgaatcaaagaacccaaaacacaaaaagccttcatcttcatcaaaacctaggaattactcgaaaaaagatcaagagaaattacaccaatgacgaagaaggtggtgatggtgatgatacatctgatgatgagtctaatcccaaggccttgccttttatatattttgtgatcgacatgatgtaaatgttactgtaacgtttataattaataaaatatactgttttcctttctcatcgatatggtttctttctttacatgcattaattataattaagtcgaaaattaacgtaaaaatctctaactcgtaaataattccaaacgtatgaaatttttgtactagtttataaaacatctttgtggcatataggtttaactggacatcaaaatactgtatagccagttgacgatcattatggatcatcatgggcttaagaaattaggcccatttaaagttttctcgacggggttagacacgtggcggaatatgaatggagaagaacgatgttacagaaacgaagcaataacggagagagaaacaaggatctaattcatagtgctgcttcttcttctctctgagactctcacaaaatagaaacacaagatcgttaaaaagcttttagctccagatctgtggaaccgccatagctatg

SEQ ID NO: 5419 - DNA, 34 bp, Unknown
  misc_feature (1)..( 34): cDNA_ID_2147566_gDNA_ID_1620787_Annot_ID_168164 3000 nt of promoter + ATG
tgagtcatctgagagtaaatctccatcggcaatg

SEQ ID NO: 5420 - DNA, 3000 bp, Unknown
  misc_feature (1)..( 3000): cDNA_ID_2147570_gDNA_ID_1620787_Annot_ID_168165 3000 nt of promoter + ATG
aactcgttcttcatttagctcacatgctatgatttttccttgtccttccataagagcagcaagatgaatagttttgtttcctggagctgaacaggcatcaagaaccttgataacataggaaaaataaagcacattaactaggcagacaagatacattaagtctattccacaatcaccatgagaaacaccaaatgggacattttttgtcaaatggaaaaatactggtaaatgaatgcgagaactgtggcctacctcccatcctgcttgtggctgcagtgctgctgctaccattgaacttgctttcccctatcatttgaaagaataaatgtcagtcaaattaaccaaatatcaaacagaattcacaaagatcattcacaatttacctgcaaaaatatacgtccattcgcaaccaaacgatgagcatgcaaatcgctgccagggggcaacaccaacaagtcaggaactgtctcgtccttctgcacctgtttttatagtgaaaaaatacgagttaaaatgaaatctcataacaaagagaagattgtgacatcatagaaagcacagttcacatatattgtacacatccaagattttaacatcactaactatacgaggattcagagaaaactcccccggtgaatgacttaaactagacctcccttccacaataactaattctaacactcatcctgcgagaactaaacaacatatctagcacacaagtattcttcaaggtttatataaaaaacttggaaagtaccgtgtaatgcttctccagctcctgcactgcagaatccacatccatcttaagcgtattaacacgaacataccgtggtttcaaatgacctgcatccaaatttaaaaatcaagctacagaaacatactcaaaagccaaaagtaagtgaaacacattatataaaggagggtaacaaaataccagtaagcttagaacccaacaactgatcaacactatcgactttcttcctcactaaaagcgtagctaaacctgacaataacgcctctttatgccgcataagaaacttctctgcatcaccaattgatggagtatcctacaatcacaaattcctcttctagtaaaccaaaacatcttaattcatcacagaaaattgaattaagctattacaacagaaccagtcgcaactggcgaccacctaccttgccaaagaggatatcgtagcaaacgatgaagaccaatggctcttgcctctacaaacaaaagtaaactaagcattaaagataagtgaaacagagcaattttagcaaattcatatgaacaaatacataccttccatttactattcaatacattagctatatcaagaacatctttaatcacagtaagatctgaatacacaacaaattagttccttaagctcaaaattaggaacgaagaagaagaagaagaagtttagttacatttgagagtctcgcagacaagagcgaaagtgccgcgtttgttgcgaacggaaggacttaagacgagtgatttgatggaagcaacggctcgtcgctcggcgtcaccacggagaacggtacggagtatattagctgcttctcttctggcgtagagagctgatctctctaagctggaaaacttttgcttagtagctggtggtgtttttggtttgcgactctcggcgccggaaaatcgttgttttcccggcggcgtttttggtttgtgactctcgacgccggaaaacttttgctttgtagctggtgatgtttttggtttgtggctctcgacgccggaaaatggttgtttagtagccggtggtggttttggtttgtgactgtcgccgccggaaaatcggtgtttcaccagcggcgcttttggtttgttacgacgcgccaccatgataacctctcagtctctctcccctcacaaaaactaaaaccctttttcttcgtcttggtgactttaaacgcaccgttttcggtttcagttaaaccggatcaaattcctatagcaccaatttacatattttactccggttcacaacaaattgtggttcaagcccatgttggcatgttcagtatcacgatcttgttcagtttcagatttgtgtccttgagtttttatgagagttttccaaatgtctacatctatcgacttattacatttttcaatcttgttaagtcagtatttcaaaaatgattacataaccatcaaattcataacacaaacaagaagagtggtgtataatatctagattcacagcatcacgtcgatcatgtaatttattcatcgatctcaatgactcaatccttacataagtgtatatgttttgaaacaacgtcttgagaattgtttcaaagttagatattgcaatttgcatagtatatacactaaaacatatttctatatcatctaacaatactttttgtataaaaaagaagaagaatatgactccgcattagtgcgcaagtccttagaaaccgaggaatggtacataacaagtcctcttgactagaaaattcaaagtgttctaagttataaagataaggcaaccaaacgttgaaaattaaactcaacagtctaatccaaagagaatctatcttttgtcatttaatttatgttcaaatatgtctctattgcttggaaacacagatgcaaaaagaaagaaaaaaatggtgtctttaagatgagagatggtaatttgcggtagcgtaacttaagcattaagtccttgcacaagaagacttgtgaaaagacttgaaaaaaacaagaaaaataataaaaagagtaatcgtggaccaagacacaagtcaaccactagtctttgtcatagagaaagaacaaataaggctttgaagcatccatcttcctatgtaagtttccttaaagaaactgttacacacaagtactcattttcttacaaacactaaacatcgaagcttcctttctaaagtaaagtcttcagaccaagaaaagggaagatcacgcattcttataggcgtaattcgtaaatagtggtgagtatg

SEQ ID NO: 5421 - DNA, 3000 bp, Unknown
  misc_feature (1)..( 3000): cDNA_ID_2139660_gDNA_ID_1620787_Annot_ID_168171 3000 nt of promoter + ATG
tatataagttttactgtacactatatacttcctgtttttctaaatatttgtagtttaaggttttacacacaaattaagaaaacatacaaatctcatttaatttatttctttcctataaaaacatcattaattacaactaatccaatcaataaaaaaatatgatgtaaaatataattggttaaaatctattaaataaatttaatttttgtatagaaacgtgaaaaacaacacttatattaaaagaagtaaaaaaacctttaaattacatataattagaaacgtatacagtagctactagtgtgactaatgattagtcgaacaattagtaaaacaaaaaaaatgggtaggttacatggaaatagacagttaatgataaccagtgatatgtgtttagtaagatctttagagcacctccaatgtagagagtcccttcaagggctctctcccctttttaatgattaaattttaaaaaagaagaagtagagagctttgtgttttttttatagttttttatactccaatggtaggttctctaacatgagttctctaaaaaaaatattaaaataaaactattttattttatataacttaataattattacaaagcataaactattaaacatacattattctgaaatattttgaaatagatgtggaaaaaaatggaataacgatcagttgttctgttgattgttgcaaaaaatttcccttatatgttctaccaaatcacctttcaattgcaaatgcatcttttgatcacgaacttgatatcgaatgcccataaaatctctgagacttgtaggcatacatgtacaataagataaatcgacttgtgaagttcagtttgctttatattttgttgttttagcaaattcccaaatcttatagatattttgttaaagtaaaggtcaaaatcaatgtaagtggaattgtattgattttcatggctgaaccattttcaaagttgaactaaattctcaagtacaattgtatgttagcatattaacaagattacgaagcacactcgcaattaagataaaacaaaacaaaacagagtggtctctttttttcttatttgttcttcttccacctacaacacacttcttcttgttctcttcttcttttgcttacgagttacgattgttcttactctcaccatcttctcacatctttctcttccaatctctgttgcatattgttaacaaagatgagattccaacagtctctcttattgagagataaaaaatggaacctatctcatcaacacaaatccggcgtctgccaattaaataaatccggcgtctcagatccacgattacacacatcatcgccgtcgactaattgcaaatcataccaccggatttttgttttgtagagagagagatgaaaccgtcgggttcttttttggcggaggaaacaaagcactagtgctttatttttttggttttgttacaaataaaacccaatcacattcggccacgtcgtcgcctctctcactctcaataatctctcttcgtagagccagctctctcaattttaatgacttctgtagcatactagcatcgctgtctcaacgacaatatttattacatgctctgaaaatttaaagagtttgtgagactgatcgtcacagtgtcgctgtaagactactttcggcgaacaatagaagaattaattgaatcagctaacttaattaattttcaatattttggtaacaacttttatatttccgtgaagacaaaaattcagtcaccggaaatatatatcttagtgatgttgctctgaaatcaacgacgttggtgccattctttgaccatcgatcgtttcctttgctttcgtcggcttctacatttctgccgttgaaggtcgtcgtcaacgatacggtgctacacatgccctacgtatactgactatatagagcgtaaatgtctaaataacaaaagaaacattatgacggtggtataattaacaatttggagttgaacaataatagtatataatgactttagtatttgtttagggagtgacagtaattacaagttacaaccaaaacgtgccaccaaatccaaaatgagtggtccaacaccaatgaacccacggctcaacgtgctttcaagctaatataaataatatggctgcagaaccgatactagagtcattttgtttcttcattttttggttgtactttcgtagaaactatattttcttaagaaggcccaactattctccccataaataaattcagccgttttaagagcccaacttgtagataaaagaagatgcgacccaactaaggacatccacttgtgtagcttacaccaacttatagtaaaatttagtcatcaatttgactcccaaaacgagtcacttctccataatcatctctcccaactcaaccaattacacatcgatctctttcgagtagccaatcatcgtcaacattacatccatatacaccaaatcaacaaaaaagatagatattttgagagttgtgcacttgtggctctgtccactcctctccatctcccttttgtttccaccaaccaatatttaaagacaaaatttgacttttacccaaaaaaatatcctaaccagaatgaaaaaacgtgggtttgggctaagacttatgctatgttggaccatttctgtctctattaggtaagaataataataacaaaaaggtgtcttgattcaatgtatcacaaactaaaaacaagaaagaaagaaaaaagatgcgttagattagagttaggaagagagtaggatctgctttaaatgccgaaatgtacggtaaaaaatgtataaacctcaaaaagccgtctagattcaaatcattaactcccacacatctcgggattctatttttacacccaaaatcttttttcactctgtatatattaatacaattctctcccacttctttcaaaaatatcacattctttcttcttctcattttctctaaagattgttgtttgtgtgtgaggctaaggatcaaagatg

SEQ ID NO: 5422 - DNA, 3000 bp, Unknown
  misc_feature (1)..( 3000): cDNA_ID_1842707_gDNA_ID_1620787_Annot_ID_168177 3000 nt of promoter + ATG
ttcttcaatgactaaacattgtagaatgtgtctgattttcttgtaggcggtaccgcttttcttatcagagattgctcccgcgaggcttcgtggaggtctcaacattgttttccaacttatggttacaattggaatcctaattgctaacatagtcaactacttcacctcctcaattcatccttacggatggagaattgccctcggtggcgcgggaattccggctctcatcctcctctttggatcgcttctcatctgcgaaacacccactagtctcatcgaacggaacaaaaccaaggaaggaaaagaaacactcaagaagatcagaggcgttgaagatgttgatgaggagtatgaatcaatagtccatgcttgcgatatcgcaaggcaggtcaaggacccttacacgaaactgatgaaacccgcgagcaggccgcctttcgtgattggaatgttgctacagtttttccaacagttcactggaatcaacgcgattatgttctacgctccggttttgttccagactgtagggtttggaaatgacgcagctctgctttccgcggttgtcacgggaacgatcaacgttctcagcacgtttgtcgggattttccttgtcgacaaaactggccgaagatttctattgctccaatcttccgttcacatgctcatatgccaggtaacattagttaagttaacttttcttgtgtcacaagcgatcctcctaaactaacaattttctcaaacagttggtcattggaatcatcctagccaaggacctagacgtgacgggtacgctagcacggccacaagccctagtagtggtgatcttcgtgtgtgtttacgtgatgggtttcgcttggtcatggggccctctaggatggctaatccctagtgagaccttccccttggagactcgaacggaagggttcgcattggccgtgtcttgcaacatgttcttcacgttcgtgatcgctcaggccttcctatcgatgctttgcgcgatgaagtcagggatattcttcttcttcagtggttggatcgttgtgatgggacttttcgctttgttcttcgtgccggaaacgaaaggagtctccattgatgacatgagagatagtgtgtggaagctacattggtactggaagaggtttatgctcgaggaagatgagcatgacgttgagaagagaactgattgagcttgttgatcgatcacattctttctctaactttccttagttttttttttgtcatatggggaacaacatacagtaataagagaccaacttgttattcttgtattataatatgctttcttcaggtttggtatcttacataaaaaaagaaaactccagggtcatacaatttttatgtgttttaagtcacttgatacaagataaatattgttcataataaaataaagttgttgttttacagtgggtaaaagtgtcacattattatcaacgattgatccatgtacaatactttctatgttccttaatatttgatttaaaaaaaaaaaacacatgttaagaaaacatattaaaaaatgattctaaatattttgttttttgtgatttatatttgttataattttaaaccaataatatttaactatttattttgaaatttgatattcatcaataataactaattaatattgcttaggaaacctaaaaaatcaatctgttaaaaacatttttttttctttcaaaaaaatcaaataataagaaacagaaggagtaattaacaaattatcacccgaaaatattcggtgctccatttgtttctgattttagttgtggatttcgaattgaaaattttattttattttattatacaacatttgccattttatttccacagaaaaatctgaatactgagagtgagaggtacatggtcatgaactcatgatcacatggttttggtagcacatggaactgcatttcagttctacatgtagttgtaaacatcagaataactacatgtatggctatatgcatgtaaaaccgcagttgtccgtattcacaaacgtaccaatttttaaccgctaaaatagtcgttcaaaatgctttaaaaccgcaatcgcaggcatccataaattctcgcagtcgtgatcgcacgtcagctccgtttaaacatgtcaagccttgagtcgatcattacaataatatctcgtgtaccacgttatgcttaaaaaaattaatcatatcttaaacacttgccttgccacccactacttctagatctcccacaaatccacagaaataatatatatggtacttagaaaaatcataaaaatatcaaataccaaattgaagtctctggcatgagtcggtcactacaataataactaaactgaaatacattttatggctaattgatgcagaacctgaaattaaaaaaaattaaagatacaacaaaccatacctttttgtctttttttttttttaattattttaaagataactcatttattttgaatgtatgtacgcagttttcggttccgtattgtgtattcatagtctaccataaaatttaacatctacctttcccaatggacccaaacgcttcgaattgaacatgggcgttgctttctcttgtgagttgtatctaatataaaatttggataattatgatttcgtcggtgattttgatatactatatctctcgtgtacaacgttttgcttaaaaatttgttcatatcttgaacacttgtgacttgccacccactacttcgagatctcctacaaatccgtagaaatatcgtttcacaatagacttgcatgttacttggaaaaaggattaaaatattaataaccaaatcgaaatctgatactttacacattcgaagtcaaacaaaataataaaaatgaatgtgtaacaaatatatttttttccccacgaagaatccacttttagtattaactaaactcgatcagtaagtaatccgtctatataaatgtggaggcttcccaaaacaaaacaaaacaaaaaagatctcaaaat

SEQ ID NO: 5423 - DNA, 3000 bp, Unknown
  misc_feature (1)..( 3000): cDNA_ID_3050787_gDNA_ID_1620787_Annot_ID_168180 3000 nt of promoter + ATG
tcccccacctttttaatatattgtaatatctcgtgtacaacgttttgcctaataatataatcatatttcgaaaacttgccacccactacctcgaggtctctcccacaaatctataaaaatattgtttaataatagaaatgggaacttgcaaaaagcattaaaataacaataacatccaaagtcaaacaaaaacaagaaaaaatgatttgtgtaaaaacatatacatatacatatacatatacatatctctcgcttttctgttcatcacttcagctgagtttctcattcaacatgtaacttttttttgaaatatgttgcaaaaacaaattccaacatatttataaaactagtaacattattatttataatttgcaaaataggtcatgaatcccttttttaatcttttttttttttcatttcccctcatgtttaattattaaactacttaatagtataatatttttcaaattttctatttatatacaaaagcctatgtttttttttctataatttgatatgtagtgtctaataaattcaaaaacatttttattcatacatctcattaattgttaagatgtatacaaattgatacatttttattcgtacaacttatttagtatacattagctatgaatatatgaataaaatatgtatattatgtacatttgtatactaaatgtgttgtatgactcttagtatacaaaacaacacaaaaaactttatcaaaaaaaaaaaaaaagctcccagacccgactcccgaggaaacctaagcttcttcttgctatggccttcgtggccgccggcgaggaccctcccttgccagaaccccctgacccgcctgatcctccctccatcttcgcccaaaccttcatacccgatccaccttctacttcttctctctttccaccttcatcgagtctagatctagatctatgttctaccgtttcttcctatggtgttactcctttcgtttttttgcgattctttactgctgtgtgcagtcccttctatcagatctgtacccgttccgtgtctttgcggttctttactgctctatgcagtccatggaaactagcctattcccagatcttgggatatcctctcgtttcaagtggatatgtttcacaggccataacctttgatgtccacgctgcccctcctacctcaactcagagagcctctcctactcgttccatggcccagacacgacaacggtttgttacttctgtaagatggtgtatgtctttgtttctggttttacccctcattcaaaatttcgtagtggtgcgatttaatgctgcagtatgcagtctctttgaactcaatctggccttttgtgctgtttgttttgtttctctttcttggtggcagtttgaaaagaaactaattaatacacctcgcctgatgaatctggttttatcgggtatttggtaccctagtagcttcttatcggagctagttatcttcccaaagttccctcctcagtggagtggtttggatgtccaagagtcgtcggtattgcaaggatcttcctcccgattgatgttcttctctgcatttgatgcagttcttgtaacctcttgtgttacgttggatacagtcttccaagaatctagccagatcgttcttattgttcgttttgccttatgttattcttatgacttctgttgcatatctatctatcctttaaccattgttatatggtctgttttggcttctgttgttgtgttttatgtagttttcttcatgttggttgtaattcctctttctgaggctcctaaaatttagtgaaaacaactattggtttgaaaaaaaaaaaaaaaaaagaatcttagtatacaaaacaaagagtaaaattgtctattttgcaaattgtaaatagtagtgttactagttacataattatgtttccaaaagtaactatatttccaacaaacccttttttaatgtatttttttgatagatatattagtagattttttttaacaatggaaaacgaacaaggttataagggcagatgagcagagtacaactgttcttaaagtctcatggcaaatcttggcacacttgtgttatctgaaatagccagtctttagattttcttgtactttttattttgttgattggagtttgaagagtgttgagagaggagcgacgaggacaataacaaatttctcagtgattaaaggtagcagagaaccctatacaattatgggttccgcattatcctttcgtaacctagatttttttttttatatatagttaaactcctagcctaaaactaaaacacagttgatgactaattggtggagaaccattaaaaaaaaaaaaaaaagacagagtagactaacgaaaccacacctttacatttttctatttatctcaccttcctaaataaaaaatatttattttaaacaaaaacacattttctgtacagacgtgggtttcgtaatgtccataagtccatccatagtctaccatataatttaacatctacttctctccagtggacgcaaaagcttcgaattgaatgtgggcgttgcttctctcgtgtctaatataaaatttggataatcatgaattcttcgatgatagtgatataccgttgacactgagtagttcattgcaataagtaagatcttgtttttgctaaaaagattcaatcatattttgaacacttgccacccaccacttccaaaacttccacaaattcatagatatagtaatacacaggttacttgacaaaaggaataaaagtacaatatgatgctttacacattctcagtcaaacaaaaacgataaaatgaatgtgtaagataatattgtttaaaaaagaaaaaaagaacaaaaaaaagataatattgttttcccgacgactaatccactttcagtattttataaaataactgaactcaagttgctcgatcaaacaagtacccttaaatgtctctctgtctatataaatgtacactcttcccaaacaaaaccatatctcaaaat

SEQ ID NO: 5424 - DNA, 3000 bp, Unknown
  misc_feature (1)..( 3000): cDNA_ID_3076949_gDNA_ID_1620787_Annot_ID_168179 3000 nt of promoter + ATG
cccaggagaaagtgacttagacgacatgtgttctatggaggtaagcattttcaaaaatatatacactaaggattgtaattagggaacccaagcaattagggaatagagaacaaacctaagaggagaggagaggaccggagccaagatgaatcttgttacaatgaatcatgagaaattatcattttctcttgttcgctgtatcaattgcagaggcagagcagacggtgttaagcgcgagaaaagcagcgaatcagacggcgttaaacggcgcaactttggcgagaaaagcatcggcggaagaaaataattgtacctgatcagattagttggagagaaatctccaaatatagaaacgagtgagtgaatggtcgggtatatgggcaacgacactagtcaggtaggtggctctaaaatggggaaaaatttagaagatgcttcaacagtagaggaagaaaagaaataaactagaaatcaaataatttagcggaagctttgaggggtgaagttgtaaaagattagaatgtataagtacctaatttggtgagtaatttgagatgttcctaaattcacaaaggcatagagttttttgtgccaatctcataattgatccaacttttcatatgaaacatttacaaagaacatggtaggattattttctaaaaaattcctacccgaataacggaaaattttgaattgctttcaatctcgtaccatatttcttactaacatttatgttgcaaaaaggtaggatatttcctaacctttttcaaaattttcttacaaatttcctattagttcaggtttcgtcaaaaaatcataggttaaaattaggatattttcttgtagtatatatcttattatataaagtatgattttcaaagttactaactcagaagattatgccacttgttgatttgatcgatcttagattgtgacacgtgttagaagaaaatttcttgaaataatcttaaaacaataaaattataattataaggaaataaaaaaaaatggatatgtaaataagatcattataaaaacctataattataaggaaactaaacaatttgaaattttaaataagatacatttataaaacctaagttagtaactcatacgattgtcctatgtgtcaatttatcgatcttagattttgagacatgtaaaacattttttattaattttaaaacaatataataaaatataacaaatttttgaaacaggaacttgtttaaatatatattattattagataactctaaaatatagatgtcagcaaaatacataaaatgttgagatgcatagataaatttataatagaaagaatcaatagtatcaacgatgttagaattaagtacaatcatgtttgagtaagacctttagtacaagttaataatgttcaaagtttaagtcacatagtagtagtaattttgtaaacaaaagataataacttacatgatttaaggataaatctagatagattggataaattgatataagcgttaaaatattaaatattgaaaaaatttgtgtggtttactatttaaaatttaaatataaaacaataatatggagtgagtgtaattagtattttagcttttattttaagatggagtctatagactaaaaatccagtttattttaataaaataaataggttaatttcattgtaaaataatatgtataaaaatgaaatataatttaaaaatatttagataaaatgaataagtatgaattactaaaagaattcaaaaattattaaaaattctatttatttgtcaaatccgcctatttaggagagttttatctagtatatatatacatgtttcctgtaaacttttaaaggaaaatgtttttcgccaaagaagggtattatcaaagtttatcattaagaagggtattatcaaagtttgattatctggatagtgatattgtcttgtgcctggataaaagacaatctacctttcccaaattgtcttgtgtttggactttggataaaagtttggttatcggtgacagtgatattaccattgacactaaatcgatcattgtagtaatatatcgtgtacaatgttttgcttaaaaatataatcatgttctgcaacccaccggtgttcaaaggaaaaaaaatagttttatgccacccattactcccaaaaatccatcgaaatattgttaaataatagactcattctaagtcgaaacaaaaataatatcgtttcccccacctttttaatatattgtaatatctcgtgtacaacgttttgcctaataatataatcatatttcgaaaacttgccacccactacctcgaggtctctcccacaaatctataaaaatattgtttaataatagaaatgggaacttgcaaaaagcattaaaataacaataacatccaaagtcaaacaaaaacaagaaaaaatgatttgtgtaaaaacatatacatatacatatacatatacatatctctcgcttttctgttcatcacttcagctgagtttctcattcaacatgtaacttttttttgaaatatgttgcaaaaacaaattccaacatatttataaaactagtaacattattatttataatttgcaaaataggtcatgaatcccttttttaatcttttttttttttcatttcccctcatgtttaattattaaactacttaatagtataatatttttcaaattttctatttatatacaaaagcctatgtttttttttctataatttgatatgtagtgtctaataaattcaaaaacatttttattcatacatctcattaattgttaagatgtatacaaattgatacatttttattcgtacaacttatttagtatacattagctatgaatatatgaataaaatatgtatattatgtacatttgtatactaaatgtgttgtatgactcttagtatacaaaacaacacaaaaaactttatcaaaaaaaaaaaaaaagctcccagacccgactcccgaggaaacctaagcttcttcttgct

SEQ ID NO: 5425 - DNA, 3000 bp, Unknown
  misc_feature (1)..( 3000): cDNA_ID_2139674_gDNA_ID_1620787_Annot_ID_168175 3000 nt of promoter + ATG
gagccttttaggcagagatgggtactaaggtgcagatgagcacggcttatcatccacagagagatgggcaatctgagaggactattcagacgcttgaggatatgttgcggatgtgtgtcttggattggggaggtcgttgggcggatcactttagtctggtagagtttgcttataacaatagctatcagatgagtattgggatgactccttttgagacgttgtacgggaggccatgcaggacaccgttatgctggacccaagtgggggagaggagcatatatggtgcagattatgttcaagagaccttagagaggatccgggttcttaagctgaacatgaaggaagctcaggatcgaaagcggagttatgctgacaagaggaggagagagcttgagtttgaggttggggacagagtgtatcttaagatggccatgttgcgaggtccgaacagatctatctcagagactaagttgagtcctaggtacatgggtccgttcaggattgttgagagggtgggaccagtggcatacaggttagagttgcttgatgttatgcgtgcgtttcacaaggtctttcatttgtcgatgctgaggaagtgtcttcacaaggatgatgaggtgttggctaagattccagaggatcttcagcccaacatgactttggagacgagaccagtgagggttctcgagaggaggatcaaggaacttcggcggaagaagattcctttgatcaaagtcctgtgggactgcgatggtgtgacagaggagacttgggagccagaggcgaggatgaaggcaaggttcaagacgtggttcgagaagcaggttgctgcatgagtttgcctttccttggtttccagtttcagtgttgttgagtttttgagcttttgagttgttgttcttatttctcttttatttgtattttcgtttggagttgtaacgatcataacagttgatgattaataagatgagtattttttcttggatttgacttgagttgtcttatttaagattgtgttgtgcggtttccaaaaatgaaaagtttcctagaaaggacttgtctatttttggaaagtttgagtaaacaacctaagagatccgtgtgtttacgagatggccgggagttggtcataaggatattctcgagggatatgatggatggtgagacatagaggtgtcttacgcgaatccatgagagagtctggagatatgctcggaagcgtttaatattgttgctcgagggacatgaaggtcccaacgactcgtgaggagcggggtatgctcctgaggtaccggtaactcgagggacatggtgtatttagagaacgaggggtacggtggcttcgggtgacgatccgagagcacgctttagggtgacgacccgagagcgagttttgtggtattattttcgccaagtgtcgtaactcgatgactttgtggctgagagtgagccgacacaactcagggtttgactttgagtggggaagataatatgtgtgatacccgagataccgtagccgaggcctgagagtgacggtttatgctcgaagattgcagtctgagagtggagagtgagttgtgagcaacaatgactagtaaatcgtgagtatattgactggatagagagacctagagggggtctggttgaagggagtgcagactgtagtgatggttgcacggagttcctcggagtggaagggtgaagctagattcgaggacgaatctatgttagtgggggagaattgtaacgcccgtgaactggaaaatcggttagggtttgtttttaaatcatccggtttaattggttatgttaattggaaaccctagagtgtgcctataaaagaaggaaactcgaaattagggctttagttagccacttttcgttttataaaggagaaaaagagagttatttccaagtcctttatagttattctccagtttacagaattggatttggattaaaattggttgagttattcgcagtttcgtgagacacgttttctcagacgcgaattaggaccagcggagattgaaactgagatcgtggtctcgtcttttttccgatcggcacgagattttgtgggcatctttgtgacgtctgcagataggattttaccggagcgattgaatagttaacggttagcttatattttagggtttcgtttttgagactgcttgtttctggtttttcctgtccagtttgcttcaaggttgcttttggttgtggacttgttgtaggacgtttctgaactgtttcagacgcaaggagagtctctcctgggtttaattggtattagaatcaatttgttaaggtgagtgcgtgaccatgaatttatctgagcgattgagttgtgtgatgatatataggtgtggtgaatatgttttgggtgaattgttcaatgactggtttgtttgtattgtattcgtgattatatttttttatttgcttttgtgtatagctcgtagatgggagaatcgcctcactaagtatttatgataatacttaagcatcttattgtgttgttgatgcagtaaaaataaagtgtgattgtggaatcatggcaaggaagagaggatgatgtaggaactcgtttgttttatgttttgtgtttttggttattggaacccggttaggattgtctgttatttttggttttgttgatcgaattatttatttatttataaaatagtatttctgatttgcggtttaattattatgttattggttgatttaattaaatatttaattatatatatatatatatatttttttttttaaatgggtctggttgtttcacaaagatatctgagtcatatttggggaatgctgacattaatactttcgataacaaaaagaaaatacactcattaaacagaacaaacctcagaaacagaatttaattaaaaacccacaaaatgaatctaagatagtttgctttacaattcaaaaacccgtctctgtgattcaaaatccctaaatccagagatcgaactctcgatc

SEQ ID NO: 5426 - DNA, 3000 bp, Unknown
  misc_feature (1)..( 3000): cDNA_ID_1828614_gDNA_ID_1620788_Annot_ID_50428 3000 nt of
gacagtctcaaccctaaatatacacgtgtagttcttttagtagtcaaactctattaaaaaactaaaatataataacaacattaaaatattattattattttggtttttagggactcataagatagaccaccattcatgttgctctaaggagttgaaatgtgtgtcgagaagggtaaagagaggtgcaatttgttgtctttagccaccggatatcaccggtcattacttttttttttattggcaacgtttcagattttggtgtcttgttcttgtaatatctccaccgtcacgtgtctatttattcgatcaaaaatattgtcaatttatgttctgagttaggtttggctttgcatgcattttataaaaatgaacagaattgacaaaagaaaattgcatatagaagaaactgaaattggtaaagaagagttttggccgtatcattaagaaacaagagagaattatatatagtatttgggcatactatatatagatctagtaaaatcagaatattgtagtatatatatactgtataaaacagatctggtagggctaaaacaatatttttttaatcagttacgttggagtaactttttttgggaagtatataagactaattaattttctatttcaaatcttacacctggtaagatactttgaaccaattctacggatagtagtaattatacatacactatattcgacgtatgcatgcatcttaaatgcacacatcaaaggatgtggaaaagcttatattttagtgtatctggatgattcaattctaaacagtgaatcaatgtcaaagctacgtaaatatgattggtgaagtgtatacatcatttctgttttcaacttttttaatttctcgagtactaaaatgcaagaaatatatatacaatgtgctaccattgtatacatatctataaatccttcactgattaatgcatcttaatgcatgcatacacatattttatctgtctatgcatgtttttacggcattttctaatttgtatattaaatatggtacttaagaaaagaaacattaacatttattttttaaactgcatagaacagatagaagacgataattttacaaacaaagtcataatcttgatcaaaccctagacacaacataaataaatataatctttaaactattgttatatagtactggcaaaaataatcagaacttgggcaataaaggacatgaaatcttgggaagctagcataattagaataaagaggtaattaatcaacttggggtactaaataatgaaacacaatagcactccataatttatgtttcgtgtttctcttagttagcgagtacattatataattgtgtccttgatgaatttcatgcttgaaatcttgtgcaaagaaaccacttaatttagccaccataacaaagtcgatcggaacgaaatcctaaacccaaatgttgttgtgcagttttagtcggtttgggtattagaatgccacttattgaaatcatcgactttactcgaacaaatcgtttaatttaatgatgtataacttacctatattgtctataatattctctctatgcggtagtcggtgaagaaattaatgaaacaatttcagcatgtggtgtctttatatacatatttgaattataggacactataaatattgcacaaattcgaaatgagataaaggataaatatatacatataattgacatacaatttaccgggttagtttatgtcgggtaaatttttctctccgtagagttttatgtcaaaccaattactaacaaaaaacaaatgttgaatcgggtaaattcagaagttttaaaactatgtagagagaagttctttctaaactctatttttcttttgatttaatttatgcaatcttattcaaacatgctttctatttctatgatcatatttgagtatcttcttaggtttaggtttctcattagagatttagataaattagtagatcgataacctgttaggatttatctttacagtttttcatctttaattgttcttaattctagttgtagagtagctaactaaaatttgttctgaagttaataggtaaaatccaagagggctcttgttgttagaactatcataaatgggtctaaatagctagatgcggataggtttgatttagatacgtaagtaaacttaccaaaccagatattaatgtttgcttaattctaagaatctacatataaggtggggtaaatactattgaacatagtaagtcaatgcaacgagagttgattgattatagaattgagatttgcagttctagaacggtgcaataacaattttaagtaactcatagatctactatttgactatttcttgagaattctctaaacctgatattttaattatctgaattttacgtcaatttaatttgattttttgtcttttaatttacaatgacttgatttagcttaatttcaaaatttaaacttaccttgtgagtaaaagaggtttgtagaatttgaccattaagtagtaactgtggatgtcggattcggcccacttcggcccaatccgcattctatgggcttcaagatgaattgggcccaattcatagcccagtatgagcctggccgcttaaagggtgatccgacattaatacagaaacggaaggatcgcgacttaaactgcgcattaaagtcccgagttgaagattcgtaacgtacgacgtaaataaggcgagatccgcagcgtgaaatcagcaaatagtttaatacgtttgatccgatgtattgagtataaatacgagttgatgacaattgtaatggggacgattcatgaaatactaatactatacacaaaattcacaaacacattcttctcttctcgattcgatcattgttcgtttaacaagactaaagatcctcgtaaaaacaaccacaagattctaattgcggattccgacatccacaatttggcgctagaaggaggggaataaagtcttttacttcagagcaacgatcaatccaccatg

SEQ ID NO: 5427 - DNA, 3000 bp, Unknown
  misc_feature (1)..( 3000): cDNA_ID_1828587_gDNA_ID_1620788_Annot_ID_50436 3000 nt of promoter + ATG
agcccaacttctttccaagaaaatgtaatccgaaaaccacatcgaccaacctatgatctgtgaaagacttgtaatgtttcagtaaatcattaaagagagtaaactaaaaacaggaaaattcaacaaaagatcaaaagaactcactggaagatacttggcttctttcttcatgatggctaatgagcttccaagacaacctacacgctgttatatgattaatcagagacagtgtttatatttctccaaatttgaaaaatcatgtttcagtgaaagacaaaaacacctgagccatgacccatccaataagccaatcaatgtcacttcgatgattgcttaagacaagtgcgtgttctttccctgaaatttaatatcaagattaaaaagaatcattatattcaaatactgaagactaggttgcataaattgatctttaccaattaactctagagtctctgcatcgacgtataaattgatctgcagcaacaacaagacgaatcacatatcagactatgatacctctatgtaaaccacaacaagattcatgaaaatcaccaacctttatacaagcccaccaatcaaacaaccatatgagctgcaaccaaagtaattccgcaacatttttgtttattcttctatacaaacttcttgagaatggacgaacaatgatgaagaacacaagctggaaacagagaaaatgtgtccaaaaacctttagttgacacaagtttcgattttataacagacattatagaacataaaatgtttcagctatgtctcttccattgagaagacaatacaatgaagatagacttcttttggtatcagagcaaaacaagttttaacaaaaatggatgacctgaatgatgttgacgatgagccctgagatcaagaagaggacaccaacagggataaagacaagagccgcagggatcttcatgtctgagagagataaggaacaacacaaagcagcaacagaagaatatgaaaaattgttgaagaagacaccaacagaggatgactgttatctttgttctcaaattctttttgggagattagagaattgaaaataaggaaaatccttgttgttttgacgcaagagcgtttttcatgctctattttaagcccatcaaagctatgtctctctctcttacaatatttggttgccaaacacatggagacatgtgcgcatgtaaagctctcccatgaagtaatagagtaaaatgcaattaaaaacagcaaaactcacatatgtcataaaatttgattttggcggtttttgagtttatttttaacttcacggttgttaaatccggatttcacattggcaataagtggtgagatcaaccttccttatatactactaaagtccttttccatctttctaatatgtgatttttctccaatgttaagttttatggagttttaattcagaatcaattgacaaaaagtagaaaagcacatgttccttatatactactcaaatcatttcccatctttcgaacgtcggatttttctcaaatgttaagtttcataaacttccaactcaaaatcaactaacaatgtcttgaaagttacacgtttcttataaactactcaagtcccttcccatccttccaatgtgggatttttctccatacatccccattcccctcgaaataatggctcttctagccactaatctcgacataatccatcatacctctcgagataatgctcgtttctagctatttcacggaattgggctttattttggacaatcaattagtgagggtgatcaggtctcttttctgggccagattagcagggtagggtgtgttcggactctgatacaatgttaaattcgggtttatggactttcaattaaaaatcaattggcaatgagttgagagacctacatttcttctatactactcaagttacctatcatctttttaatgtcggatctttgtccacaaaaacttttgcaaagatcaaaaaacattaatcgtcccatgactctagaataacgcccgaaccattgcaagtggttcccttgtaaaatgctgcaaactgtccagcagctagagtgctaccttgaccaccttcaaataggtgtacaaccgcaacatgtgtagaaccaaaggtgtgcctagaatttttaatgccaaagtaagaaaattaatttcatgttctttttcttttggtacagtacttggtgggattcaaaaatgtacatactatatacaccaaccgccaaaaaatgagattcaaactacagtcaataagaagcaaggaagactaaatagagggagctagtgattatctgacaatcaaatcaagtagacaaccccgatggatgtcctctccctacataagggagttcagttcttactagcactttgagctccaaaacaaattcaatatttgaattttcccaaagcctggtcaagcaatatatggtcaaatttaattgaatgtttatataaaaatttatggtaactgtagaaaattgtaaactattgttaaatattttataagaaatataatacaaaaatttaagcaatatatttacttatttaggtctgggcatatgagtattctgggagccagaaattttagttaaagtttatatatatataatatttaattatatattatagtagatgatatatttaaagaatagattattgtttacatggtctagagaattgttttttttttcacctaaataaaactaaaattatattttttatatgtagtattgagtttttgaccatttctcaacaaactaacaagcatcactggttgtggataaatatttgaataaaaagaactctgacttttgatatatagttttgaaaatgacattatttccctctcactgtcagaggaaagaacgacgaaaggacgaattgttcttccgcgtatttactcatatatcccttcttgatcgacgaccatccaccatgaaaagggatcttccgttggcctcgtagatttaatttatcgacatctattcaga

SEQ ID NO: 5428 - DNA, 3000 bp, Unknown
  misc_feature (1)..( 3000): cDNA_ID_1828580_gDNA_ID_1620788_Annot_ID_50438 3000 nt of promoter + ATG
tcataaggtgtagtgttatacagacagaggctacgcattgtcttaattctttttgtaactgaatggttcaaccatatgtatacaaaaacgtgccttggtaaagtgtagcactggttccaagtaatctcaggtccaagtgattgagtttcactgtcatcagcttggttttcatcaatttcgcttctgtcactaaagaggaacaacaaatcctcattagctctctgctcgtttagaaggtttcttgttcttaagaaacaagttctgttctgactataccgagaacagatgaaagagacaaaccataatttgttggaacagacgttaaagctttcttccaaaaccatggtctgttattgttcccttcagtgtcttcatatcctctgaaataaccttgtaaaatatatgaattacttgaaaactgccttgatccatacattaatgcaaatgcaaatggtcgaaagagagtatcaatagtattacgattagaatgtctatcactgatatctactattattataagtaatttctgaaatgatctcaatcatagaaattaaatatttatttcattttcatttttaaaaagaaagaaatacagcatggtatatgtttttttagaaatttattaattagtttgactttttttatttagaaacggacaggagattcaagatattttggatatctgagtgtgcaaaaacttaaaatgctaaatgaaaataccataaaatccaaaatattaataacgttagatgatttttgacaattaaattaatatatcagttttaaaacgtaattatgtactttatcaatcttgaaaaaagttaatgaaattctcgcaagctcactgtaaaccaacaaaaccttctcttatataaataagaattctatggtgtatatataaactagatgttgataaataactcttgaactttatcaataagtgtgacttagaaaaatagtagctttcagctcttgccaaccaacagagtcgaaactttaaggttgtggacctttctcagcaaaagattagagatattatagatagacgatggtaatatttttccttgcaatgaaacctttgttaagttacttcattatttagggagctaatgtgtgttagagaaaacctacaaatgaattcttgtgttttcaatgtatctccattgaatgataaatctgtatatatattattacttctagttacagattagctcttgctctttggcatttttttaaattgtttttttgtagtgactaaaagttatattcagaaataatttcaattaagttggtttgttgaagttacctgaataatcaccaatcaatatttaaacttcatgatctgtagtgattcacaagttgttaataaagaagaatgttgctattatatgaatagaaatagttcacaccattttcttaaccttcccccacttttgaataaaagaagcagaatgaaaaaaaataaaatttgttagcattatttaattttaaatttaaattttgttgaaccagaagcaaaacttataaattcttccaaataataatgatcaatgtattagtttttaaatatgaatctcaattaaaattattagacgttgttaaaataattcttgcaatgaaatctcttgttggtttccttcattaattagtaaccaaacaaagattttgaacttttgattcaagggaatagaagttgtccgaaactatccacattaacctctttttgttattgtcatttctagtaaaaggttgatgaatacaaactctcatttcaaactgaactatttatggttcacaacccatatgatatatacatgcactctgattctcaccaaaattatcacatatatatatatatatatatatatatatatatattttaatcttaaaaaaaaaatcttgaaaaaaaacataatcaaaacaaagaaaataaaaaaaccctagaaatttcaaaagaaaaagaagcaaaaatctaaaaccacctagctagctaacaaatacctggtgtgttagagaaaaacaaattaattcgtcaattttctatttattgccattgaatcataaatctgtatgtgttttcaatttattgcttattgtagttgtattataagttatttttagaaataattttatgtaagttactttgttgaagttacttgaataaaaacatagtcataattttctaaaacctatatggtttgcaccatttttaaaacttccaccacttttggataaaagaagcagaatgcaaatgctgaaaactttgcattttttcagtattcaaatctttaatctggttgaaccaagagcacaaattataaattctttgaaatagtatctaatatatttcaaatatgatgtctcaattaaaattttagtctgaactttttccaattaaaagcacaattttcagtttgtttttgtaaattaagtgactggagcatattgagtaataactattttatataagaaaagttagatgactggaggtaaaaatagtaaatgaaattttcataagactctgtacctttatcgagagggttataattcttgagtttttatcaataagtgattcagaaataaggttgctttcagctgttggtaaccacatattcgaattacttaaggttgttatgggcctttttctgaaaaatagcaaaagattaaaagtattaattagccgttggtaaattgcaatgaaacctcttgttagtttccttcattaattagtgaccagggaaattttttgaccttttgattcaagggaaaagtgtagaggaaaagcaagctaaagtcttcaaccttctgtctcgtatacccaattgtcttttatcattatttaaaagaaagttatatcttgtatacccaattggtctataaattacaacttcactcaaaccttcgcttacattttcttttcttgtttcgtttcagggatccataagataacttcaaactttttgaaagaaactctgtaaagagcgttttaaaaaagtcatg

SEQ ID NO: 5429 - DNA, 3000 bp, Unknown
  misc_feature (1)..( 3000): cDNA_ID_1828561_gDNA_ID_1620788_Annot_ID_50444 3000 nt of promoter + ATG
tatccgcagccaaacctctcttgagtttcatgggagtaaaacacgtaacgtatcgatcttttgttctctataaatgatgttatgagattcaaaatcacttaacatggtttgattttttcaggattctccaatgatgagaccttctcagagatatctatctttaagatcacttggtgcaccagctgttctactctcacttgcggcacaaggcgttttccgcggatttaaagacacgacaactccgttattcgctactggtaatactatttttttcatatgttcaaaatccttaaaacagaacaaagctaatgatccactttacttttcttgtttgatgattaatgatccactttttttttgtagtgattggagatgtaacaaacataatactcgacccgattttcatatttgttttccgcctaggcgtaacaggagcagccactgctcatgttatatcccagtgagtttagttttgcatgtgaaccttgaataatctcaaaatggcctctactttaattgactagtggtttctatgttcattttcagataccttatgtgtggaatactcttgtggaaactgatgggtcaagttgatatcttcaacatgagtaccaaacatcttcagttctgtagattcatgaaaaatggtattgtaaaatacttcaaagaaaattcaatgtgtttacaatgaaatctctgataaaataacactgtttggttcttgttttcttgtgaaatatttctctcccaggctttcttttgctgatgagagtaattgcagtaacattctgtgtaactctctccgcgtcactagctgcacgagaaggatcaacttccatggcagctttccaagtttgcttgcaggtttggttagctacttcacttcttgcagacgggtacgccgtagctggccaggtttttagataatgatgtctctaacattgcatccttttacgattaagcgcgtggtttaaagttttaacaaatgtcttttcctttaggcaatactagcgagcgcgtttgccaaaaaagactacaaaagagcagcagctaccgcctctcgtgtactgcaggtacacacaatttatgcatttgtgtttgcgtttacattatgtttacgattttggatttatatgaagaaaatatacacagaaagtatacataataggtaattcaaaggcaaacaaacaatggaggcctatgtgtactttagcttataaagattcgattctagatcaatttaaagctaaagaactaaatcttgtgacagttgggattggttctcggttttgtacttgcggttatacttggagcaggattgcattttggagcaagagtgtttacaaaagacgataaagttttacacctaattagcataggacttccggtaactaatcatttcccattaaaccactaatcaggatcaatattattacgtaacattaatttggctaaaaatcatttcttgtttcctaaagtttgtggcagggacacaaccaattaatgccttagcgtttgtgttcgatggagttaactttggagcatccgatttcggttacgccgcagcttcattagtaatggtggctatagttagcatcttgtgtttgctcttcctctcatcgactcatggttttattggactttggtttggtctcaccatttacatgagtcttagagcagccgttggattctggcggtaaaactttgtgaaactctctgtttcttgtagtacaaatgtaaaaacttttccaactttcttataacagaatgtaaatgtgactgtaacaggattgggacaggaacaggaccttggtcttttcttaggagctgaagaaggaattttagagggaagagcatgttttaactgttcttaaacctttatttctaatgaggttgtgtaactaaataaaaataccaagagtacaagtctggagattcaaataattctatgcgatttttactgctactcttgtaaatattcaagttgtatcctgtaattagaggtggttagtccaatttttggaggttttatttcagatattgtagttaaatatagaaaatcgatagaacatatagaaactgatttttgtttggttgactatagtgttgaacttcagattaattttttcaaaacaagtagttcgaatatgacttctcaaatgatataattaggatgtcagttttggtttggttttgtttcagattttgtggttcgtgaaatacaaaatatatcagctggtttggttttgacaacagtggtttcaaatcagattcatctttcttaaaacaagtaattaaaaaataaactgagtgaatttcgtgagaaatatggtttgtttgaatataagagttttgatttaatttttcttcttttctttttggtttagttttggataggagtttatcaaagaaaattcattttaaaaatatatgttttgtttttttcttcattagaaaaaaaaaacacattctgaatatgcaatacatatttataaacaaagtgctaactctattcacattacacttcagtttattaactagattgataaaatttatcatctattaaatataaatagtttgacatttctaaaatacgtgaaaattcattaataaaaaacatttataaaataaaagagtggaggtatttgtcacatattatatatttctataatatccaaacttataagaataaatatcgtataattgaatctcaaccgatctacaattttttttacaaaaattgcaaataataaaataaaataaaatttaataaggcctatgtttagaaaactcttttcttcaacatgattggctcatagccaccctcaattattactttaaaccaaaaataaaattccaatctttattagcaaaattaaaaacaagaccaaaacaaaaaaaagtagaaacctttacggaactcctctgccattcttttccaatctaagccaaaactcaattaccctttttccgatttaccggagaaactaaatctccgcc

SEQ ID NO: 5430 - DNA, 3000 bp, Unknown
  misc_feature (1)..( 3000): cDNA_ID_1828549_gDNA_ID_1620788_Annot_ID_50447 3000 nt of promoter + ATG
tgtattaaataaaatctttttttattcaacacatttaaaagctcatttacgtcggtattaatcatattagaccaagaccaactcggtttcataagagttaagatgaaactagaagcacgaacactacacaccgttttcatcaaccccaactgagagataaacggcaaggctttcgcaattgaaattctcacagtggttaaaggcacttggatcgatggtgccttaggcttcattcatcatcttgctacataaccgtagaggaagacgaataggtttgatctgccgaggtaataattaaactgcaattaggtgagttcatgcttcttcttcttttaactgtttcttgatttttagtaatcttcaggaagcccttacatctaattttagttgttctatctctttccattacgatatctgttttgagtctctcaaagggcttttctttcatgtgaaaatttctaacatttcttaactggaacttaaaaggagtattttgcaatttatcagtattttgagaatcgcatccagattaggttgatacaatttatctcgttttttcactcgaaattagatggttgtttgtgggactttcaatattcagtcttggtaaattttgatgatgcagattatatataattgcgtgaagaaaagagaaatggtgggtggcaagaagaaaaccaagatatgtgacaaagtgtcacatgaggaagataggataagccagttaccggaacctttgatatctgaaatactttttcatctttctaccaaggactctgtcagaacaagcgctttgtctaccaaatggagatatctttggcaatcggttcctggattggacttagacccctacgcatcctcaaataccaatacaattgtgagttttgttgaaagtttttttgattcccacagggattcatggatacgcaaactccgtttagatttgggttatcatcatgataagtatgatctcatgtcatggattgatgctgcgactacgcgtaggattcagcatcttgatgttcattgttttcacgataataagatacccttgagcatatatacatgcacgacgttggtacacttacgactccgttgggctgtcttgactaatcccgagtttgtttccttaccttgtctgaagatcatgcattttgaaaatgttagctatcccaatgagaccacgttgcagaaacttatctcaggctctccagttctagaagaattaatactcttcagcactatgtatcctaagggaaacgttttacaattgcgctctgatacgctaaagagactcgatatcaatgagtttattgacgttgtgatttatgcacctctactccagtgtctgagggctaagatgtactcaacaaagaactttcagatcatcagttcgggtttccctgccaaactagatattgatttcgtcaatactggtgggagataccaaaaaaaaaaagtgattgaagatatcctcatcgatatttcgagggtcagggatctagttattagtagtaatacttggaaggtatacatcttaacatttgagcatatttgtttaaaaatattcctccacaaaagtttctcaccgtaacatttttttgttcacttatgttaccaggaattctttctatactcaaagtcaagaccattgctccagtttcgttacatatcccatttgaatgctagattttatatatctgatcttgaaatgttgccaacgcttcttgagagctgcccaaaacttgaatctctcatattggtaatgagtagctttaacccttcttgagagctcctatttacacatattgtttgagataacctcttatatgtatctctctactcaatttgttttcttttatttattcttttgttcctgtttttgcaggaaatggtcaagaaccaatccacgcgacgtcatggggagaagcgagaaccaaatgtgatggtttcaacagtgccttggtgtttggtatcgtcgctcaagtttgtggaattgaaacgttcaatcccaaggtatgaaggagaaatggagctagtaagatatgtcctgacgaattcaacagtcctgaagaaattaaggctcaatgtttactacacgaagaaggcaaagtgtgccttccttacagaactcgttgcaataccaagatgctctagcacatgtgtagtccttgttctttaattacttgaaaggtattgatgaacttttcgtttaaggtcaatcttttggtcgttaaattagttgattttcggaggctttgagccacatgtaaattttgcagttaagtccttcttatgctggttgctgctcatgtaataatcatcaatcaccaagtttgtttcgaatttgatggatacttccaccaagtcgctgtcaaatattttgtatgctcccatggataattattttgtatttttgtaactgcatggtgattccttacatttcaggcttgttagctttgcaattttgttatttgtattttggtttgagttaattacgagttggattgttcttcttacctactttatggttcctctgaataatctattcgtagtcttatcaaaaccaaatccaaaaaagtacttgtgaatctatttcctttttaattattgcgttcataaatgaaaatgacaccatttttatcatagtgaggagctcaaatttcaaaacttttgatccgagacatctaagtgtaccgaaatttgaaacgggttatgtctccggtgtaatttcgacggcggatttcgtcgattacagtcgtcgccaccgtatattaatacacatttggaagctcaaataatgggcttcttgcttgaagcccattgacgtcggtactattgtatttgcaatgattttaaacgtcgtcgtacaagtaataaatcagaacccctaaaacccttttcatctctccggacacttcttctcccgacactttcctcttcaaatcccaaacggctatctgactttggaagaaagagagattcagagtggagaatatt

SEQ ID NO: 5431 - DNA, 3000 bp, Unknown
  misc_feature (1)..( 3000): cDNA_ID_1828549_gDNA_ID_1620788_Annot_ID_168222 3000 nt of promoter + ATG
caactcggtttcataagagttaagatgaaactagaagcacgaacactacacaccgttttcatcaaccccaactgagagataaacggcaaggctttcgcaattgaaattctcacagtggttaaaggcacttggatcgatggtgccttaggcttcattcatcatcttgctacataaccgtagaggaagacgaataggtttgatctgccgaggtaataattaaactgcaattaggtgagttcatgcttcttcttcttttaactgtttcttgatttttagtaatcttcaggaagcccttacatctaattttagttgttctatctctttccattacgatatctgttttgagtctctcaaagggcttttctttcatgtgaaaatttctaacatttcttaactggaacttaaaaggagtattttgcaatttatcagtattttgagaatcgcatccagattaggttgatacaatttatctcgttttttcactcgaaattagatggttgtttgtgggactttcaatattcagtcttggtaaattttgatgatgcagattatatataattgcgtgaagaaaagagaaatggtgggtggcaagaagaaaaccaagatatgtgacaaagtgtcacatgaggaagataggataagccagttaccggaacctttgatatctgaaatactttttcatctttctaccaaggactctgtcagaacaagcgctttgtctaccaaatggagatatctttggcaatcggttcctggattggacttagacccctacgcatcctcaaataccaatacaattgtgagttttgttgaaagtttttttgattcccacagggattcatggatacgcaaactccgtttagatttgggttatcatcatgataagtatgatctcatgtcatggattgatgctgcgactacgcgtaggattcagcatcttgatgttcattgttttcacgataataagatacccttgagcatatatacatgcacgacgttggtacacttacgactccgttgggctgtcttgactaatcccgagtttgtttccttaccttgtctgaagatcatgcattttgaaaatgttagctatcccaatgagaccacgttgcagaaacttatctcaggctctccagttctagaagaattaatactcttcagcactatgtatcctaagggaaacgttttacaattgcgctctgatacgctaaagagactcgatatcaatgagtttattgacgttgtgatttatgcacctctactccagtgtctgagggctaagatgtactcaacaaagaactttcagatcatcagttcgggtttccctgccaaactagatattgatttcgtcaatactggtgggagataccaaaaaaaaaaagtgattgaagatatcctcatcgatatttcgagggtcagggatctagttattagtagtaatacttggaaggtatacatcttaacatttgagcatatttgtttaaaaatattcctccacaaaagtttctcaccgtaacatttttttgttcacttatgttaccaggaattctttctatactcaaagtcaagaccattgctccagtttcgttacatatcccatttgaatgctagattttatatatctgatcttgaaatgttgccaacgcttcttgagagctgcccaaaacttgaatctctcatattggtaatgagtagctttaacccttcttgagagctcctatttacacatattgtttgagataacctcttatatgtatctctctactcaatttgttttcttttatttattcttttgttcctgtttttgcaggaaatggtcaagaaccaatccacgcgacgtcatggggagaagcgagaaccaaatgtgatggtttcaacagtgccttggtgtttggtatcgtcgctcaagtttgtggaattgaaacgttcaatcccaaggtatgaaggagaaatggagctagtaagatatgtcctgacgaattcaacagtcctgaagaaattaaggctcaatgtttactacacgaagaaggcaaagtgtgccttccttacagaactcgttgcaataccaagatgctctagcacatgtgtagtccttgttctttaattacttgaaaggtattgatgaacttttcgtttaaggtcaatcttttggtcgttaaattagttgattttcggaggctttgagccacatgtaaattttgcagttaagtccttcttatgctggttgctgctcatgtaataatcatcaatcaccaagtttgtttcgaatttgatggatacttccaccaagtcgctgtcaaatattttgtatgctcccatggataattattttgtatttttgtaactgcatggtgattccttacatttcaggcttgttagctttgcaattttgttatttgtattttggtttgagttaattacgagttggattgttcttcttacctactttatggttcctctgaataatctattcgtagtcttatcaaaaccaaatccaaaaaagtacttgtgaatctatttcctttttaattattgcgttcataaatgaaaatgacaccatttttatcatagtgaggagctcaaatttcaaaacttttgatccgagacatctaagtgtaccgaaatttgaaacgggttatgtctccggtgtaatttcgacggcggatttcgtcgattacagtcgtcgccaccgtatattaatacacatttggaagctcaaataatgggcttcttgcttgaagcccattgacgtcggtactattgtatttgcaatgattttaaacgtcgtcgtacaagtaataaatcagaacccctaaaacccttttcatctctccggacacttcttctcccgacactttcctcttcaaatcccaaacggctatctgactttggaagaaagagagattcagagtggagaatattatggaaggaactttagatgaagagaatctagtcttcgaaaccaccaaaggtatcaaaccaatcaagagtttcgatgac

SEQ ID NO: 5432 - DNA, 3000 bp, Unknown; identical to SEQ ID NO: 5428
  misc_feature (1)..( 3000): cDNA_ID_3076986_gDNA_ID_1620788_Annot_ID_168212 3000 nt of promoter + ATG

SEQ ID NO: 5433 - DNA, 3000 bp, Unknown
  misc_feature (1)..( 3000): cDNA_ID_1828706_gDNA_ID_1620790_Annot_ID_50452 3000 nt of promoter + ATG
tacaaaaaatgtctacattgatagcataacgtagtagcacaactactcaactattattgaagattaattgtaatttttaattttgtatgatagtattttacaaatgttagtaaataattttattaatatagaatttttattaacgctatgatagaatttttctaaccttgaaaactaaaatactcataccgccaaacacttagacaaaaatttctctttttgcatcaaaattatttttgccatattttctcgagaaaaccctaaaacttaaccatcactcctaaagctctctcaaaccgacgaatcgattccgggagccagtgattaaactcgccgccttcgtcgttgaaggtagccaccgtcgttgaaggtagctgcgacacataacctcttttcggccctaattcaccgattaaaccatctctttgagtcccaaattgaaggcatgtctctctgaatatgtagctttatttcttccctttcgttaacctagcttgtttttttttagctgtcgtgaagctcgacaactattttgtttcttaaagtctgaatttatagatttctctcattcgatacttcaaagtttttatcttttgcatgcccgtgttctttgcaaaattataactatttgtttgtgtggtttgatttaggcgtagctggataaataggatgcacaattttgctttgtaaaaatcttagatttttagataacttgtattggcctgataacttgtattgacatgttctcgagatttagaagtttttgttgacattctattacaacaatttgtattgacttgttttttgaatttttaaatcttttcggtgcttgtaatgacatggtctttaaatctttatattatttttggaacttgtcaaacacattcttgcataaacaaacacaaacaaacacatgaaactagatatactcattcaatatttttgttttgcaagtgctgctgtgtaaataatgagaatttgaagctgatatttggctcttattacacgacaggttagtaccatcttaaacattactgtgacttttgtcttgaacattattgtggattattatgtgttgaacatttctatgggttctgtaagccaatatatagcatgaacagcccattggaaaataatttcattaaactccggtacaccggaagttctagatcgaagagaaatagaatgaagaagctaacaaacttttattattaattaacagaatgttacaacaacttaatcaacaatgtcattaactaagcttatatacataagattaaaccaacatcaataaccagaaataaccaatatgtaaaccggtccatatttgcaataattatatctcagaacattcattaaattgttataaatgccatacgtatggcccatatatttttaatactaaaatagcaattttggtgaagaattttccgtaaatccatcacgaatgttagtaggtatgtggtcatgatggatttgttgttttgttgttacagtttcaattacgagtgattgattttaaacccgttgttgatagtttggcaactcattgctatgagttttggtgattaatgatcacataaatttttgaaatttggttgaagaattagcagcaatgaaataaacatgaatttactatcgaaacaagatgttatcaccaaaatatgttggttttaccacaaacaaaaatgcctgatatatctttggtttagaaaagtaagattcacataacatgtattggtacacgtgtcccacctcctttcactgtagatccgcccctatgttgagcagacagataaaacaacacgagcattaaatagatgggacattccatagcccacaagcaatttcacgaaattaaatgagaaatgggtcaagattggatcactcgaaaaactgaggaaaaaaagaagaatacgtaaggagttgaaacggaacgtggactatgtcagcccgaagaacacgtttaatgactatggccccatgcaggaccattcccctttttttgaggtgttaccctgttagatccatatttgttttgaacactatcaaaaaatatttgctaaagaaaaacactatcaaaatatgttacagtattctcttccgttttgcctaaactcgaactcataactttaaacctcctcttttaagattaccatatgcatgtacataaactggtttaacaccaagacaccaaattttaaccacaaaacaccaaacaccaaatacgttggatatcttaacctatttcttactcacttaacctttgtgtgtgtgtgtgcaagtgtattactatatatataaagtaaaatatatgcatatattgttaaaaatatcacattaataatggagacggtttataaaagataagaagttttttctttcacttattgttagttaattttgaataaaacaaatcataatttcacatagtattaaacctatatatgtattacttaaaaaggtaaaatttgatacgagatgaataaacaaaaaaaaatcaaccatttcaaatttacatgttaaaatatctcgatttggatatagtcatatagagatgattttatattgatatataaatcgccttcacttattggcaattagtattgagttgaaaatctataatttttctacatgcattgattcaactattatctttcacatcatgcattaaattagcttgggttccatcgtacattagtgtatacatatgccatcttcttcatcattagataatttttcttataaaataaatgcaattataacaatttgattggatatgtcttgtcatttagttgcggaaaaatcttgacgtctcttcttgtctgaagtcttaagtatataactggaaagtccgtattggagttcaacaaaagaagaaaacgaagacttttagttagatcctacattactgaactcattatatatatctggtgagacattctcctatatatgcagtttcaactttcaaagccagcaaataataaacagaggagaaat

SEQ ID NO: 5434 - DNA, 3000 bp, Unknown
  misc_feature (1)..( 3000): cDNA_ID_1842723_gDNA_ID_1620790_Annot_ID_50453 3000 nt of promoter + ATG
ttggagtatgtaggcctctcaatgtctaaagatctcctgcagatatcgtatatggcttcattgtccaaaagaacaacaacatctgtgtgttcgagaagagaatgagtcgagagaacactgttatacggctccacaactgctgtagaaacctgagaccaagaaaagagtttgaacattttatctttctgcagtgaagagtttaagtatctgtggaaggttacctgaggagaagggtagatggtgaaaccgagttttgatttttttccaaaatctacggacaagcgctccaacagtaaagaacccaaaccagaacctgttccacccccaacagcattgaataccaaaaatccttgtaaccctgtgcaattgtctgccaatttcctcagcctttcaaggcaggtgtcaacaatttcccttccaactgcatcaatggaaaaatatttcaataccatatgaaccagtcatggttaaatatgccgtttctcgtcataagcaatggatgaaacagagccattttgagcaaagcaaataaagaagacagagttctttgttacaatggcaagcaatcatttggacattgataccctacttgttagcttatacatgaatagttatctagatatgaagtacccggtattaccacgaaaacacatgacacaatttacaacaaccgaataaaattgcattaaagctcacacaattacgttattaaattttgtcttagctttgttagactctctagtacaaaactcaaaactcagacatacatacttaagaatgtccaatgttttgctagttaccgtaaaacaaaacgaaagaacatatgttttcagtttaaaatggcaatgttcggtaacccctgaaggtggatcaatctagtaaggctaagaagaatactataaaaaaacaagagaggtggaaaatgttaataaccagtgtaatggcctctagcaaagttattggctgcatcttctttgccagagataagttgctcgggatggaaaagctgtctgtaagtgccggttcttacttcgtcaatgacggttggttcgagatcaagaaacacagctcgaggcacatgttggcctgagcttgtctcgctaaagaatgtgttgaatgcatcatgacatgcaccaacagtactatcactgcaaaacaaatccaattattaaaaaacatgaacttgtcaaagttttttttattactaccctaaatcatcagagccatgtcaataacaataacaagaacaaaaattcgaacccacaaacaataaagatggtcataaactagagcgatgagtataaagacctgggcatggtgccatcgggttggataccatgttcgagacaataaagctcccaacaagaatttccgacctgaataccagcttgtccgatatgaatgctaatgatctccctcatgttcgaaaatttctcagagacttcttcttcttcttcctctttctctctgttttcgcgaggaagaaggttgttttgttggctctcccgcttttagatgtgaaaggacaaaaagctggaatggactggacgaacttaaaaaggggccggccccgaaaagtctcttccgctcgaaatgcctaattaaagaattcaccaatcctgggtcgatattttcttttttggattttaatccattccatttctgttttcttcttttttcccccataaaacttttaaaacatttagttaaaaaaaaaacttttaaattttccaattgaaatcatcctgttaaataaagtataatttttaaaatcagtaactcataacattgtatcacatgtaaagtttatttattctttcgtccccttccacatatctcaaatcttaaatatttttttaaacattttctataaaaaaattaacttgtgtcaaaaaaaatgaaacatttctaaaataaaataaaaaatactcattttctcgttcatttattttctcatccccttccacatatctcaaatctcaaatattatttttttgtttagttttaagttttttttttattgttgtcgtagtatgagtttaaaaatatcattgtaaaagcttagttctaaattttaattttagactatgaaatttacattgtttttttggtttttttttttgttttaaaataaatctgcactgtctatttttaattacatcttatatatagtaattctctcatcatcttccactatattcatgtatatatatatatatatatatcttatattgttatatgggttgaaaatcaaagaattcatcatggtaagaatttggttctaaatttattttggaaagtatggcatatagctatcattgtttctaatttttattttatttctaacaccatacaagattatatttattttttaatttagatacttttaattttaatttacatatgtaaaaagttaaagtttttttattttatttgctaatctttttatactttcaattaaagagtttttagaaaaagaatctatgtaaccacgattatatgaccaattatatacaaaatctattctaatgctatatttttaagttatgaaatatgcttagttttgcaaaagatcttttttaattaataaaaggtttttttttataaagactttaatcttaaaaattttaaatggtagcagcaaatataatagcaaaacagaaaagaaaaaaagaagggggagggagggatgcggcgaccacagaatcgaaacgagtggagacaggcagtaataaacactttggtcttttttttatccacttattaaagaaatgggtaatggtagtcgtgtataaaattgagagagaggtgtgtatagaaacgagaggcgaagattgcatcgaacgccgaaattgggcctacagtaatcccaaattctaatccttatcctcttctctctcgtttttattctccttcttcttcaatctcttggtctcctcgactcctcccagcgcttcaatatctcccaagacccaaccatcggagggagggggcgagatg

SEQ ID NO: 5435 - DNA, 3000 bp, Unknown
  misc_feature (1)..( 3000): cDNA_ID_1807104_gDNA_ID_1620790_Annot_ID_50454 3000 nt of promoter + ATG
cactcggggataaacctgctcccgctgctttagccctctgatatgcacgtaggcctggctcaatcttcttgactgcaccccacataccctgtctcaccccaagctttgcaatctcccacggtattcccatatcttcatggtgaaatagtagtacctcacatgatgtcatctcaccatcgcctctttttgattcaactacaccatggtaatatccatttgagaaactaaacaacacttaaataacagagacaacttgcttagtagtacctgcacggatacaccagcttgaatagtacaagtcgactcgccttggcttgttttgtctaggtacagacgggtattgtactccctgatgcaaatacaaaggagcatacttactataaacacatgaataaaaagagtgaatttaaaagacaatattcacaagaagaacacatgtttaatagctcgcactagaagaataagttggatatttgcttggttactagcagcgaaagaatggaataccttagtaatgcagtaaaagactcggccagcatcccatatacgacggcctataatatactccctgtcgctacaaaagaaggggaactgcaacagtagcggaagatatgagtaaagagaagggagaagaagcaaacagaacgaagaaaaaagagaaacaagtagcgacctttcgcacccattgcacaaccatagtgcccgtgtccttgcaacgctcgagagtagaagaatacaaaagcatatcatcccacttggaacggaactcatcatcccaaaagaagtccctgaccatctcgggagtggcatcctcaaacacagttctgctacggtactggggaggcccattctggcatcatacaaaaaatgattcaacttggaggaacatgttaaactaaacttaaaggaaggagggaggggggtacctcaggatctcgcctccaagcttgatatgagaaggttggggttgatcggtccatcatttgaatccaacaaggaccgccatctttgacctcaaccaacttccatagatgcctaaaatcatcgtccgttacaaacccagttttctctttggaagaaaggctgcgacccaaagagaagcagagttatttatttagcagaagagtaagaaagaaagagagacaagtggggaaacgggttacatcaatgaaatcatctcaaccttacctggggttaacgtggtgagaagaagttttgaggatggaagtgggaagctgaagattgaggaatttaggtgaattggacaagagtttagaatcgagataagcccacttgggcctccaaacccaaccaaccaaaacaccggcagccacagcaatccagagtggcgcaacaaaaactataaggtcagagaagccgaggctgtgaaactcggtaaagaccaaggaactcaatcccatcatctcgccccctccctccgatggttgggtcttgggagatattgaagcgctgggaggagtcgaggagaccaagagattgaagaagaaggagaataaaaacgagagagaagaggataaggattagaatttgggattactgtaggcccaatttcggcgttcgatgcaatcttcgcctctcgtttctatacacacctctctctcaattttatacacgactaccattacccatttctttaataagtggataaaaaaaagaccaaagtgtttattactgcctgtctccactcgtttcgattctgtggtcgccgcatccctccctcccccttctttttttcttttctgttttgctattatatttgctgctaccatttaaaatttttaagattaaagtctttataaaaaaaaaccttttattaattaaaaaagatcttttgcaaaactaagcatatttcataacttaaaaatatagcattagaatagattttgtatataattggtcatataatcgtggttacatagattctttttctaaaaactctttaattgaaagtataaaaagattagcaaataaaataaaaaaactttaactttttacatatgtaaattaaaattaaaagtatctaaattaaaaaataaatataatcttgtatggtgttagaaataaaataaaaattagaaacaatgatagctatatgccatactttccaaaataaatttagaaccaaattcttaccatgatgaattctttgattttcaacccatataacaatataagatatatatatatatatatatacatgaatatagtggaagatgatgagagaattactatatataagatgtaattaaaaatagacagtgcagatttattttaaaacaaaaaaaaaaaccaaaaaaacaatgtaaatttcatagtctaaaattaaaatttagaactaagcttttacaatgatatttttaaactcatactacgacaacaataaaaaaaaaacttaaaactaaacaaaaaaataatatttgagatttgagatatgtggaaggggatgagaaaataaatgaacgagaaaatgagtattttttattttattttagaaatgtttcattttttttgacacaagttaatttttttatagaaaatgtttaaaaaaatatttaagatttgagatatgtggaaggggacgaaagaataaataaactttacatgtgatacaatgttatgagttactgattttaaaaattatactttatttaacaggatgatttcaattggaaaatttaaaagttttttttttaactaaatgttttaaaagttttatgggggaaaaaagaagaaaacagaaatggaatggattaaaatccaaaaaagaaaatatcgacccaggattggtgaattctttaattaggcatttcgagcggaagagacttttcggggccggcccctttttaagttcgtccagtccattccagctttttgtcctttcacatctaaaagcgggagagccaacaaaacaaccttcttcctcgcgaaaacagagagaaagaggaagaagaagaagaagtctctgagaaattttcgaac

SEQ ID NO: 5436 - DNA, 3000 bp, Unknown
  misc_feature (1)..( 3000): cDNA_ID_2166275_gDNA_ID_1620790_Annot_ID_50455 3000 nt of promoter + ATG
ttgtttcgattcggttttgggttgggatcaaatcatcacaaggaattagatcacagatgcaccaaaattttgaaatttttatgtcggtaaccatatgtcccatgaactaatttgtttattagttgttacgaggacaaagactgaacgagcattggcccatgacatgttctctccggagaaatagagccgttataaatccacccacaacgtcatgatacatcattattaaatagtactatcattcatttagcaacgaaactcaccgaaaatatctccaacttttatctctcttttagtttccccaaaaccaaaaagtttacctttttaggtttctctacagtctccacgcgtttcttcttctctctctgtacgcgttttatcagtctccatatctaaggagaggtaatgggtcctctaaaagtttctcatttcccaaatgttagatttatgaaactgttaattttacaattttgggttaaaatctcaccttttcgatctttctcaggtgaaaatcgatgtcgaatctgttggctctcgtcgtcggattcgtaatcgtaattggtcatttgggtattttggtaaatgggttgggtgtgaattggggaacaatggctacacataagctacctccaaagacagtggttcagatgcttaaagacaataacatcaacaaagttaagctttttgatgcggacgagacaaccatgggtgcactcgctggatcgggtcttgaagtgatggtcgctattcccaatgatcagcttaaggttatgactagttacgaccgagccaaagattgggttcgtaagaatgtcactcgttataacttcgatggtggtgtcaatatcacgtgagtttgtctctcttcctctctgttctgtctcaatgttattgttattgattggttgtagtgtttgtctaaacgtcaaaattaacattctttgtgtttgtttgtcgaaacctcataaacccatggttgtttagtttatgacattgccaaatgcataaccatgagtgagttatgtctatagacaaaatgtgtctagctatatatgtttgtttctgaagattggatgtttagggttgattttcaatgtctggtgaaatctgtgttgtctgattatgaaatcaaatatcttttaacactactgtcaaatgcagaacctgtttccactaaaatgtatttatatctataaaagtcaaatcttttaacagtactgtcaaaatgcagaacatgtttagagaaaaatgtgtttacatgtctcagtgaagctaatcacttgtggatgtgtttcaggtttgtagctgttgggaatgagccattcctcaaatcatacaatggatcgttcataaacctcacattccctgcacttgcgaacattcaaaacgctttaaatgaagccggactaggaaactctgtcaaagcaacagtccctttaaacgcggatgtatacgattcaccagcaagcaatcccgttccatctgcaggaagattccgtcccgatatcatcggtcaaatgactcagattgttgactttcttggcaagaacaatgctcccatcacaattaacatctaccctttcttaagtctctatgggaatgatgatttcccactcaactacgccttcttcgatggtgctgaaccgataaacgacaacggtattgattatacaaacgttttcgatgccaatttcgatactttggtgtcgtctttgaaagctgttggtcacggagatatgccaataatcgttggagaagttggttggccaacagagggtgacaaacacgctaatgcaggttgatatctgaccttctttagatggatttttatcctttatgaagtgttttagttttgattttgaaaacggttttttcacaggcagtgcttacagattctacaacgggcttttaccgaggcttggaacaaacaaaggaactccattgagaccaacctacattgaggtatacttgttcggattactcgacgaggatgcaaaaagtatagcaccgggaccgttcgaacgccattggggaatatttaaattcgacgggcaaccaaagtttcctatagatctttcaggtcaaggacagagtaagttcttgattggtgcacaaaacgtgccgtatctacccaacaagtggtgtacgtttaatccagaagccaaggacttgacaaaactcgcggctaatatagattacgcctgcactttctctgattgcacggcgcttggatacggatcttcttgcaatactcttgatgcaaatggaaacgcgtcgtatgcgtttaacatgttctttcaagtgaagaatcaagatgagagtgcttgctattttcaaggtttggccaccattacaacgcagaatatatctcaaggacaatgcaatttccctattcagattgtggcttcctcagcctcttctttttcttgttcgtcttattctttggttgtgttgatcgtttggtttctgttatcagggatgatgttttgaggttagattgaatttgttgaacttagtgaggttttgtgagcctaattgttttcttacagatatatatattacaatgattcttttgtccatgttcttagaagttgaatcctagataaatcggaatatccagatacttgttctatcgatattttaatacagttttacactacagttttattttacaaattcattaatgttacaatttcttttagcaattaaaaaataaatagaaaaccatcaaattttacaaattcacaaaaaggaaaacacggtcgaaccggttctatacaaaaagaaaaaaccttccctttattatttgcttcttctcttaagaaaaacaaaagttcgcttactctctcgttaaagctctcagagaggttagggtttcatcattatcaattccatgcttttgcaataataacttggaaaattttatcgagttttcgtcttcctcttcttcttcttaggttatctcgatctggttggttcctttaacaatctgtaactatg

SEQ ID NO: 5437 - DNA, 3000 bp, Unknown
  misc_feature (1)..( 3000): cDNA_ID_2107069_gDNA_ID_1620790_Annot_ID_50456 3000 nt of promoter + ATG
aaatagtttttggattgaaagttttgtgtaagacatcgtagataaaacaaaacttaaaagtaacatgttacatccacacattgagactctatatcaagattcaacatctaccaaaatagttttttttttttgcatcttgatgttgtatttggataaacagttgttttttgcttctttttctttctgagtttgctagaaaatctgaaaaaaaaacttatgaaattatgatattgatgatttaagttacgcttaaattatagcgttaaaatacagttttatcaccaatatagagttttacaatttttggaccaattttggtgagaatacataattccgctagcgtcaaaccgaaattctgatattttgtgtcaagatgcgattcataaatttttggaaattattaatttacaaaatgtatgatttattaatatatattttagtactaaatgagttggaaattccttttggtatttttattttgttttttgcatccaaaacttttttttttttctttttttttatgtaattggttttcattcgagatgcaacttggaacatatataccaaattgatgttgcatccaaatgcagaaacgaatggtcatactgaatataaacgaatggtacctgatctatagtttcaaatttggaaggtggagtgttatagactgcctttaatctctcagccggaggagcaccatatattctactcatctttttctcaagaagtgtaataacagaatcttctactgcccaaatccccggcttttccccttcttccgacccgaaccaccccgaagattccgccttcattgcctcagaaggagacaagagctcaaaaggcgatgacaaaggcgggttgggacaataagagcatccctttagtccttgaattcctgccccactccgtttcttgaacctcaagtaactcataatccccggtttaagggtaactggtttgcgaccattgttcttcaccaccagagctgtagccatgcttactgggtagagagagacgatatacgttatgtcgagaaccccggccgtacagctaagttcgatctgagaacgttcccaaagatttcatcattgtgtggacaaaatttgatatatatattgaggtattgaatcaatcacctgaagagcatcaatggcgtctgaatcagtatccttgacactccaatcacatcctgagattactgaagaccctcctttaggttcttccccgtttacgataacaacaccaaccccacctctgctctcatcaccatcaactgtgtaaaggacttcctcgaatccctcgtctttccagtatacctttggcttatatgaaagtacatgagcatctgatagactcagttttaatgaacttccatttctgaccttaagctctaccataggaatgttgtttgattccgagaattttatgccttttcgtccgaatttatcttcaagcttttcagtatttattgtctgtgtctgaggagctgaaattgaacttcttacggcttttggttttgggagcaaagaaaaagagataagagaagccattgatggagagtaaggagaggaaaagataagacaaatggtggagagaaaggagaagaaaagataagacaaatgaagtttgtagtggacttagccaccaacgaaagttaatcagaattgtcaagctttattataaacgagcttatcaaattatcattttctgatcataagattttttttttctttttttttataatcataagaagttgtcttgggtcgtccttatgttattgttatcaccacataataagtaaccatgattttgtttaatcttttgtttttgattggtcttcaaattttctgaataactaatatttaaaatagaaaataaattcatcttactacttatagaaaacggatggtccggagcctcggatgcattgctttatcatattttactatcatcgttgaaattgaaatagaagacaattttttttttttttttttttaaattattttttttgaaatagaagacaattgtatatatacatgacaaaatagaccttatattatgtatgtaattagtttctatttgtttttactaataaatttatcattcgttaactcacttaccatttttatttcataatttatcggttaaagtggtcgtaatggattattcacaatgtaagaatgtactcccctaaaccgaaagtgaaacaaaatgtagttcagaccatctcatatgagtttagttcaggttcagtttttgtatataaaggtaatctcgattcaaagggtttaaaactcttaataaaatgtaagtctaaggttctatcgaaattcgtttttctaatatagaaacacttaaccgattaaaccaaaatatgatctgattaattttgtttcgattcggttttgggttgggatcaaatcatcacaaggaattagatcacagatgcaccaaaattttgaaatttttatgtcggtaaccatatgtcccatgaactaatttgtttattagttgttacgaggacaaagactgaacgagcattggcccatgacatgttctctccggagaaatagagccgttataaatccacccacaacgtcatgatacatcattattaaatagtactatcattcatttagcaacgaaactcaccgaaaatatctccaacttttatctctcttttagtttccccaaaaccaaaaagtttacctttttaggtttctctacagtctccacgcgtttcttcttctctctctgtacgcgttttatcagtctccatatctaaggagaggtaatgggtcctctaaaagtttctcatttcccaaatgttagatttatgaaactgttaattttacaattttgggttaaaatctcaccttttcgatctttctcaggtgaaaatcgatgtcgaatctgttggctctcgtcgtcggattcgtaatcgtaattggtcatttgggtattttggtaaatgggttgggtgtgaattggggaacaatg

SEQ ID NO: 5438 - DNA, 3000 bp, Unknown
  misc_feature (1)..( 3000): cDNA_ID_1828698_gDNA_ID_1620790_Annot_ID_50457 3000 nt of promoter + ATG
cttctggattaaacgtacaccacttgttgggtagatacggcacgttttgtgcaccaatcaagaacttactctgtccttgacctgaaagatctataggaaactttggttgcccgtcgaatttaaatattccccaatggcgttcgaacggtcccggtgctatactttttgcatcctcgtcgagtaatccgaacaagtatacctcaatgtaggttggtctcaatggagttcctttgtttgttccaagcctcggtaaaagcccgttgtagaatctgtaagcactgcctgtgaaaaaaccgttttcaaaatcaaaactaaaacacttcataaaggataaaaatccatctaaagaaggtcagatatcaacctgcattagcgtgtttgtcaccctctgttggccaaccaacttctccaacgattattggcatatctccgtgaccaacagctttcaaagacgacaccaaagtatcgaaattggcatcgaaaacgtttgtataatcaataccgttgtcgtttatcggttcagcaccatcgaagaaggcgtagttgagtgggaaatcatcattcccatagagacttaagaaagggtagatgttaattgtgatgggagcattgttcttgccaagaaagtcaacaatctgagtcatttgaccgatgatatcgggacggaatcttcctgcagatggaacgggattgcttgctggtgaatcgtatacatccgcgtttaaagggactgttgctttgacagagtttcctagtccggcttcatttaaagcgttttgaatgttcgcaagtgcagggaatgtgaggtttatgaacgatccattgtatgatttgaggaatggctcattcccaacagctacaaacctgaaacacatccacaagtgattagcttcactgagacatgtaaacacatttttctctaaacatgttctgcattttgacagtactgttaaaagatttgacttttatagatataaatacattttagtggaaacaggttctgcatttgacagtagtgttaaaagatatttgatttcataatcagacaacacagatttcaccagacattgaaaatcaaccctaaacatccaatcttcagaaacaaacatatatagctagacacattttgtctatagacataactcactcatggttatgcatttggcaatgtcataaactaaacaaccatgggtttatgaggtttcgacaaacaaacacaaagaatgttaattttgacgtttagacaaacactacaaccaatcaataacaataacattgagacagaacagagaggaagagagacaaactcacgtgatattgacaccaccatcgaagttataacgagtgacattcttacgaacccaatctttggctcggtcgtaactagtcataaccttaagctgatcattgggaatagcgaccatcacttcaagacccgatccagcgagtgcacccatggttgtctcgtccgcatcaaaaagcttaactttgttgatgttattgtctttaagcatctgaaccactgtctttggaggtagcttatgtgtagccattgttccccaattcacacccaacccatttaccaaaatacccaaatgaccaattacgattacgaatccgacgacgagagccaacagattcgacatcgattttcacctgagaaagatcgaaaaggtgagattttaacccaaaattgtaaaattaacagtttcataaatctaacatttgggaaatgagaaacttttagaggacccattacctctccttagatatggagactgataaaacgcgtacagagagagaagaagaaacgcgtggagactgtagagaaacctaaaaaggtaaactttttggttttggggaaactaaaagagagataaaagttggagatattttcggtgagtttcgttgctaaatgaatgatagtactatttaataatgatgtatcatgacgttgtgggtggatttataacggctctatttctccggagagaacatgtcatgggccaatgctcgttcagtctttgtcctcgtaacaactaataaacaaattagttcatgggacatatggttaccgacataaaaatttcaaaattttggtgcatctgtgatctaattccttgtgatgatttgatcccaacccaaaaccgaatcgaaacaaaattaatcagatcatattttggtttaatcggttaagtgtttctatattagaaaaacgaatttcgatagaaccttagacttacattttattaagagttttaaaccctttgaatcgagattacctttatatacaaaaactgaacctgaactaaactcatatgagatggtctgaactacattttgtttcactttcggtttaggggagtacattcttacattgtgaataatccattacgaccactttaaccgataaattatgaaataaaaatggtaagtgagttaacgaatgataaatttattagtaaaaacaaatagaaactaattacatacataatataaggtctattttgtcatgtatatatacaattgtcttctatttcaaaaaaaataatttaaaaaaaaaaaaaaaaaaaattgtcttctatttcaatttcaacgatgatagtaaaatatgataaagcaatgcatccgaggctccggaccatccgttttctataagtagtaagatgaatttattttctattttaaatattagttattcagaaaatttgaagaccaatcaaaaacaaaagattaaacaaaatcatggttacttattatgtggtgataacaataacataaggacgacccaagacaacttcttatgattataaaaaaaaagaaaaaaaaaatcttatgatcagaaaatgataatttgataagctcgtttataataaagcttgacaattctgattaactttcgttggtggctaagtccactacaaacttcatttgtcttatcttttcttctcctttctctccaccatttgtcttatcttttcctctccttactctccatca

SEQ ID NO: 5439 - DNA, 3000 bp, Unknown
  misc_feature (1)..( 3000): cDNA_ID_1828690_gDNA_ID_1620790_Annot_ID_50459 3000 nt of promoter + ATG
tccttgtccgctggttttaatgtgagttggattttattatgacacctttgctgctttgcacaacaacaaaaatatatattattatttttatgacaccaaaatataatttaacgattaactattattttctataactaaataagaacgaatttgtcaaatggtaggtaaaagttaaaaagtaataactttaatagattatatttttttggtcgtaactttaatagaatttaggatcatattccttttgaaatagatttaaataaattttagttttgattttgattttgttctttcaatatttgtatattacgaaacataatatttttcccgtaatatgtatttctcttttatttatgtgaactaatttatcatcctaaatctaaaattacaaccttcaatatgttttatttataaattagatgttcatatagaaaataacatgttaagaaaagaaaaacttgtgaaatgtgaaatcttccaaaatttagttaagttatatcgttgatttatacttatttgtttccaaaattttggcatgagcttttaaattatcttgagttaatttttggctcagtcttttatccaaactttgttaacaatctttgtttttagccttgaattggtcaaaacattcaggattttcaacttttcacagcacattgttccagttatggataagataacatcaatttttcttatcaaacagttacatgaactttgttaatactgggtcttgtgttgaagttgaggtcagaaaatatatgattccaaacagtggttgtgtgtcgatgatcaaacatggaatcttcatgcatgccatcagtgaaacgtttttgcttagttttgtcatgtcctggagggaggccacaaagcttggcgagtgacgaagttgaatcgtaaaggaaatgttaacgtcgacatgtatactaatgcaaaattcattttattttctttgcagaaagaaatgttgctcctctatcccttacttttccgtcgtatctaaataaccaaacactactccgttccttctactctcttttacatctcaacaaacacattattatcaacacaaaaacaaaaatgaaaaatgtttggtcctagactctcaatgcaatttgaagtacatggctaacaaatatttcaatctaatccaaaatagaagtccaaatgcattcaaaagcctcaaactccaacctataattactaacccttttcactggccatctcacatcactaatctcttcaaacatctcattaccatcatctaagaccggaaacatagattccggtagactccaatcaagtgaggttgagatcatactctccttcatccacgggaactcaaaaactcccaaactctcttcattactcccacttctcttctcttccatcttgttttctacattgttggctctcacatgttgtcttttcttgctcttcttagtatgctcgtcatttttcttgcgtttgtggcttgtagacgaaccctccatcgataaagaaacgtgagatgatgagatttggagtgaattgagaattaaatttataaatggccaatgatgaaaaagtgggaggggaggagagggagtcacgccttcttacccgtatgtatctgtcatttagcattttaaaagcaaaccaaccaaatccttttgtgttgttttcgtgttttccttcttttacgttctcatttctctctctcccaaccacacaagcaaattataaaacgtattgagatatatatcaaggatgaggtggacattaagaaacaaatggctatttttagtttctttaatttcactcactgcccttcaaacactgatcttcacttatgataactaaatggaaatagaacacaaattattcttagttaatatgacaattaagtatcttaaaaccaatttatgttgttctaaacccttgttaaaaataataatgagttgtgtcgtatactataacgattgtgagtttcaatcatgaaaagacaataaaggaagaaaacttctatgcttgaaattcacataattgccatacattttttataataatttaatcgttttatgcggttttatgacctaaagatatagtttcacttctagtattgtcgtgtgtcttacgtctttacatgtcgagaacgtggaaaatgcaaaaaaagaagaagcaaaacagcgcattggacatgtacttaagagatttgacatttgttgaagtaccaaattgaatgatcttttttttttgaaacattgataattgaatgtcaaatctcttaagtataaaagacatgtcaatttggcggcaaacttgtgcaaaggaagaagttggcctaaaagattgattttgggtcgccctcatctaacctcatctgtggttgacctcagcacacacccacatggtcgaccaccaaggtaacttcataaatcataaccaagcctgttgtacaagctaaaatcttaattgagaaccgtgctacgagcgactgcaataattgtctagactatgacatagcggtttagatatgtcacagtttttaccacttttgactcttatcgtctctatgttttcattagggatgtgcattttgaccgaacctagccaaactgaaccaaacctagccaaactgaactgaaccgaattaactgaactcaaaccgaaccaaaccaaaccataatttacactaaacatttagttatgtccctatttaaaccgatcaaaccgagaactgacatctagtattatcaaaataaaacatttccaagaatttagtaagatatttgacttttttggtttgtttaatttagtggtgagaattagaagttaattattttattttgaacttattggtccaccttgtttttcgatgataaatgtttctctagccaaaggtttattggttcatgtttgtgtttaaatttagctaatgccttcataatgtctccatatactacactttgatgtcttagattcatattactacaaaagaacttatgaatccgagaaatg

SEQ ID NO: 5440 - DNA, 3000 bp, Unknown
  misc_feature (1)..( 3000): cDNA_ID_2166029_gDNA_ID_1620790_Annot_ID_50460 3000 nt of promoter + ATG
tagggacataactaaatgtttagtgtaaattatggtttggtttggttcggtttgagttcagttaattcggttcagttcagtttggctaggtttggttcagtttggctaggttcggtcaaaatgcacatccctaatgaaaacatagagacgataagagtcaaaagtggtaaaaactgtgacatatctaaaccgctatgtcatagtctagacaattattgcagtcgctcgtagcacggttctcaattaagattttagcttgtacaacaggcttggttatgatttatgaagttaccttggtggtcgaccatgtgggtgtgtgctgaggtcaaccacagatgaggttagatgagggcgacccaaaatcaatcttttaggccaacttcttcctttgcacaagtttgccgccaaattgacatgtcttttatacttaagagatttgacattcaattatcaatgtttcaaaaaaaaaagatcattcaatttggtacttcaacaaatgtcaaatctcttaagtacatgtccaatgcgctgttttgcttcttctttttttgcattttccacgttctcgacatgtaaagacgtaagacacacgacaatactagaagtgaaactatatctttaggtcataaaaccgcataaaacgattaaattattataaaaaatgtatggcaattatgtgaatttcaagcatagaagttttcttcctttattgtcttttcatgattgaaactcacaatcgttatagtatacgacacaactcattattatttttaacaagggtttagaacaacataaattggttttaagatacttaattgtcatattaactaagaataatttgtgttctatttccatttagttatcataagtgaagatcagtgtttgaagggcagtgagtgaaattaaagaaactaaaaatagccatttgtttcttaatgtccacctcatccttgatatatatctcaatacgttttataatttgcttgtgtggttgggagagagagaaatgagaacgtaaaagaaggaaaacacgaaaacaacacaaaaggatttggttggtttgcttttaaaatgctaaatgacagatacatacgggtaagaaggcgtgactccctctcctcccctcccactttttcatcattggccatttataaatttaattctcaattcactccaaatctcatcatctcacgtttctttatcgatggagggttcgtctacaagccacaaacgcaagaaaaatgacgagcatactaagaagagcaagaaaagacaacatgtgagagccaacaatgtagaaaacaagatggaagagaagagaagtgggagtaatgaagagagtttgggagtttttgagttcccgtggatgaaggagagtatgatctcaacctcacttgattggagtctaccggaatctatgtttccggtcttagatgatggtaatgagatgtttgaagagattagtgatgtgagatggccagtgaaaagggttagtaattataggttggagtttgaggcttttgaatgcatttggacttctattttggattagattgaaatatttgttagccatgtacttcaaattgcattgagagtctaggaccaaacatttttcatttttgtttttgtgttgataataatgtgtttgttgagatgtaaaagagagtagaaggaacggagtagtgtttggttatttagatacgacggaaaagtaagggatagaggagcaacatttctttctgcaaagaaaataaaatgaattttgcattagtatacatgtcgacgttaacatttcctttacgattcaacttcgtcactcgccaagctttgtggcctccctccaggacatgacaaaactaagcaaaaacgtttcactgatggcatgcatgaagattccatgtttgatcatcgacacacaaccactgtttggaatcatatattttctgacctcaacttcaacacaagacccagtattaacaaagttcatgtaactgtttgataagaaaaattgatgttatcttatccataactggaacaatgtgctgtgaaaagttgaaaatcctgaatgttttgaccaattcaaggctaaaaacaaagattgttaacaaagtttggataaaagactgagccaaaaattaactcaagataatttaaaagctcatgccaaaattttggaaacaaataagtataaatcaacgatataacttaactaaattttggaagatttcacatttcacaagtttttcttttcttaacatgttattttctatatgaacatctaatttataaataaaacatattgaaggttgtaattttagatttaggatgataaattagttcacataaataaaagagaaatacatattacgggaaaaatattatgtttcgtaatatacaaatattgaaagaacaaaatcaaaatcaaaactaaaatttatttaaatctatttcaaaaggaatatgatcctaaattctattaaagttacgaccaaaaaaatataatctattaaagttattactttttaacttttacctaccatttgacaaattcgttcttatttagttatagaaaataatagttaatcgttaaattatattttggtgtcataaaaataataatatatatttttgttgttgtgcaaagcagcaaaggtgtcataataaaatccaactcacattaaaaccagcggacaaggagttaaattcaccgtactacacggtctgagctgattgcgtgttctcttaaaactccagttcaccgacgaacaacgaagtatcgtggaatccatttcatgggccgaagatttctcacttctcttcagtgtataacttctctagttctctgtgttcttgtatatatgcacaccccatgttcgatgaaattacgaaaccatgtaatcgttatcaaatcctcatctattttcttaaatgttgcaggaatctgggaaagtaatcgtttttggcttaattctgatttgggttcttacttatatagtcaac

SEQ ID NO: 5441 - DNA, 3000 bp, Unknown
  misc_feature (1)..( 3000): cDNA_ID_1828626_gDNA_ID_1620790_Annot_ID_168269 3000 nt of promoter + ATG
atagaaaatttaatattatcataaatgtaaagaacttgctaatcaagttatgatttttgtataaataatcctattagctaatgaataaatagagaaaacctgtattattgctaaagtttcctccaaacttatcagacaccaatcgatgatgtataatataccatttttcataacgtgattctattatttttaccattcacaatatttatcatacatttatatttgattttcatgtgtatgttatatttgatgcatgtggaaaaaataattcaaaattaaaaaaactacaaaacgtttttcttattatatcacaattatttaacaaaaaaaagttttgagctattttgtttataatgtttttatgcttttcaatcctacatttcactatcagaaaaatgaggccaagttataaaaataaaaataaaaactaaacccaataagcccattaaggcccataagtcaatacagcaaaaacagctcatctttgctaaaacgtagattactgatttaatctaccggaatcgaaaggcaataccaaacttccggtgaaccggaatcggatccatttgacttgccgtagaaattaggaaattgattacagtgttcttcgagaatggagaagaaggagatggagaagttgtgccaaaggtgcaaacaaagctacacagatctttcaaacgaaacttcctcttgccgttttcatccttccttcttcgtttgtcgtcgtcacgatgaccagaaaaggttatgtctcctacaaaccctaaatctattcactaatgaagaatctcacatcccaagcagcttgattcgctaatttataatggcaaagcacaaattgttgagatgggttttgaaagccatccactttattgtattaaggttctggatctatagctaatttagttagataccttagattctttgtagccaataattttgaagtgatagatgatcatgatctcagtttaatggctatttgtgggtcaaaggtcatgttttggttgatttgaaactagctcttagccttctttgcagataattagctactgttgtatttgccttgcccatttcaaactctttaggcataatcatgaagctgtttaatgattgtggtcactcttaaacgtcgaatactcttaaccactgaggataaaaaattatctcgacaagttttcaagctgtctagtggcctacactttgttctgctagttgaaaaaatggtttagtcgacggttaatagcataaataaagagtggtgaaaaatacagtttagagatttatcatctgattctatgttgcgtgttttatcttggtaataaactttggactaggaaggaacgtaggtgtctctgttccgttattggctcctttggttatttacttacttcctctgtttgtgattctctctgttccatgcattgtagttacccacatagcatagacttaactatcttttgttgagcttttatcgttatgtgcaacgaatgagtttattttggtgtttatggttgttggttttggcattcatattcttgctggtacctgatatttgttatttcattttaattttaaggtgtttcgaaactgaatatatatttattccaaaccatgtttaatcgacttgagtatgatgcatctgtttgatttctactttttactaagaagtggaattaactagaacttgttttttttaatcaataaatgaaggtactatgaattgaaaccagatgatccaccgtatgctgccaagttctatgattgttgcggggcagaggatcctaatgcaccaggttgtgtcacaaaccctcacatttcatatgatgactgatgtatgagtgagagctctcataagcctttttttttccataaaaacatcatgtaaataatcttaaattattgtagccttcttaggagtaaaagacttagcttgtgatctctctgctgggtactgtcttgaaccacttcttgcattgcacacagctacagagtgagctgttgtgttacagcttttgtcggttttgtgaataggagtgtcagaatcatttgacgtgagaaaattccggaacgactaacgattttatgtttatttgtaaggaatgttcttgtttctatggttgctttaaaaagagtcaaaactttatattctttttatgaacaccaacaacaaaaatctaaatcagacatataggttaattaactaatgcaagtaaatgtggaaaaatttacaaaacaaatttcagaagatctagaagtaatcttgagacagtacttatgagaaataatcttgcactatcatccctcttttctatgaacaccaagatttctgatgcacttataatttcttattttgtgtcaacaatagatatccaaacaaaggtagagaaaacatttgaatgtggacaaattataattatattaataaattgactgtctttaaagtttaaactaagtttagcagatctcattaagagaaaaaaaaaatcaacatgattgagtagagcacatgaagtccacatgacacaactccaagatctcaaactctctggtcttaaatcagatcgttagagagatttattctcacctccattattaaataaagccaacttgttttggtccacttcactcacagcttttattattcttcttttttcttttgtcatcataatatattactccccaaaaaaaaaaaaagcaaaagcggtgagaaagaaaggagagagagagggtgaccactatggagacagcgcaacccattactcattattagtctctcctaccattcttttgcctaaagttcaagactttgtgttcttctaacaagacccttaatcgtaagttcaagactttgtgctgttgtagtcctgtaagaagaagaagaagaagaccatgaaatcgatctgacttctcgcagcaatgctgaggatttagctgcatttattactctttttttgtcaattcaatttctcttttctttgaagctcttctcttgcaacaaca

SEQ ID NO: 5442 - DNA, 3000 bp, Unknown
  misc_feature (1)..( 3000): cDNA_ID_2166060_gDNA_ID_1620790_Annot_ID_168268 3000 nt of promoter + ATG
caagaaaagtataaatagttagtcattttgagctttttctttgaagatatttttcagcaaggtaatgctatacactcttatcaagctctcattatcggtaatgctatacactcttatctagctctcattatctttcgttgcaaacaacatcataccctctaatctagatattcagtagtcagtattatcaatattggtgcatataacaatggataaatatgccatattcatctatacagaaattaaattaggtgtaacactggtaccaagcttagttcttaaagtttataattatcactactgcaagggataaatgaacttagaagaggaaaatgagtagcaactagcaagataacgatgcgatgctggaaggaaaggaatggttacagtagtttgaaataaatacctttatctgctgaaggcatagggaaatgaactcccatacgccagaatgcgtaaaggaatgctgacaagaataagaaagccccaacagaggcacgctcccttcttacacctgaaatgttattttaacttgaaaaaattacagacagttcacacaaaatgctgtaatatgcggcagcgaacaataaagtgatgctttctcaaattcatttatctccatctaattgaactcatgagtgtttataaaagaagcaacaaagccagagataaggatcaagatttttcaagatataagatcaaaatgatgggccaaagactgtttatacacagctgcacagaagtgttctcaaagaaatctcagttgagtagcaattatataacaaaaatagtttcaggagctcctaagaaacttgcaatgaattaaccaattatagtgattaccttctaaacaagaagtgataagagcaaagaaaattcacatatgaaataaggcttaccactattacgaagcatcaaatagcaatggtaatacggcaacatgaaaaccagaagaagtatcaaacaaaaaagatccaccttccagtttatcatccttgccctgcaaaatcatcaaaagatcggtccaaggcttaaaactctaaattaatattccaactaaacaattgctacataatgccatgaattccccctccaatataagtattacgtacaatgacaaacacctcaaaagctcaatgatataagcatctagtatcaagtatcaaatttccacatgacataaaggaataaacaagagaagctagctaccacacagtttatatactcgattacattacacatacaccaaaaaaattgtcaagtaaaaaaattcttaagacaataactccatcaatctacactcaatctcaaaatcattgccaattaggtaagaagtcaacaaaattaagcaattgcaaacaaaggaggaccaagtaagtaacacaatctagaagacaacaaataagtaaagtttccaaaaacctccaatgccagaaaacaccaaaactagctaaatatcaaaaactacagagtggattactcgagaaaagacttactctctagagagaacaggtatgatctcgaacaaaacgagctgcaatagattacaagagaaagcgaagacgacactgaaaatgatttgaaccaaagctcgtttctcttcatactctttgtataatctccgattaagaaaccataaacctgcccatcctaagagacttagtgaagctatcaccaccgtgccttcgtatatcgcccatccgtaactcatcgtcgccaaattccagatctctcttacttctcgagaaaaaacctcagatctgcaaaaacctcatggcgattcaacaccagagcttctgttgtacgattcgattcgaatttgatcatttatgaaacaattaaaaaaaaagtatttaagaataccttatttatttttggttagggtttatttggtttaaactctaatcaacaacaacctcatcaacttcatcatcaccaccaccaccatgcgactcaactcgaactcgcagagaggaaggcgttattaaacgctaaccaaccattgagctacggagtaatgtgaaagaaactgcacaacaatagtgtttctatcctttttttttgtttataggttttggcgtctagtctagtgttgatgataattttaactccattttccgacatgttttcttatctggtcgattgatttttttgtttttctttcacttttacatatatacacgaaaaatgatcgattcattaaaattgttgtttagaaggcttgtccaatcttacacgtgttaccatatataaatttgcgggaagtgggaagggaaagatcgggatatcgatagttcatgataaatcttataattacgggatcaagataaatattttttttatcattaataaaaaattaatatttgtgtacattttcttattgttagatagaaaatttaatattatcataaatgtaaagaacttgctaatcaagttatgatttttgtataaataatcctattagctaatgaataaatagagaaaacctgtattattgctaaagtttcctccaaacttatcagacaccaatcgatgatgtataatataccatttttcataacgtgattctattatttttaccattcacaatatttatcatacatttatatttgattttcatgtgtatgttatatttgatgcatgtggaaaaaataattcaaaattaaaaaaactacaaaacgtttttcttattatatcacaattatttaacaaaaaaaagttttgagctattttgtttataatgtttttatgcttttcaatcctacatttcactatcagaaaaatgaggccaagttataaaaataaaaataaaaactaaacccaataagcccattaaggcccataagtcaatacagcaaaaacagctcatctttgctaaaacgtagattactgatttaatctaccggaatcgaaaggcaataccaaacttccggtgaaccggaatcggatccatttgacttgccgtagaaattaggaaattgattacagtgttcttcgaga

SEQ ID NO: 5443 - DNA, 3000 bp, Unknown
  misc_feature (1)..( 3000): cDNA_ID_2166050_gDNA_ID_1620790_Annot_ID_168266 3000 nt of promoter + ATG
gaatccatggcttcttcattcatctgaagattcttcaatttccgtttctgactactagattttcacttgattcgcattttgatttggttttgattcatcacgattcttcaattttgcttatcattatgagatgatatagatctttctcatttcttcgaaattcgttgtagatttctttgtgtgttacttcattcatctgaatatggcttcaatttccgattctagcttctagatttgcacttgattcacatttcgataaggttttgcttcataacgattctgtttcttacgaatttgcttaatctaatgagatgctacagatcttaacttttgcaatgaaatttatggcagattcgaattctgcaacaacaatgacaattagcaacggagatgtcaaatctgaaacctgcaacaatggctcttctgagaagaaaccattcaggatcttcgttggttacgatccacgagaagatcttgcctaccaagtttgtcatcattcaatcacaaaaagatcttcaatccctgtagagatcacaccaattattcaatcagatcttcgaaagaaaggtctgtattggagagaaagaggtcagttagagagcactgagttctctttctctcgtttcttgactcctcacttgtcagattaccaaggttgggctatgttcgtcgactgtgatttcctctaccttgctgatatcaaggaactcactgatttgatcgatgataaatatgcgatcatgtgtgttcaacatgattatactcctaaggagactactaagatggatggtgcggttcaaactgtgtacccgaggaagaactggtcttcaatggtgctttacaactgtggacaccctaagaacaagactttgagccctgagattgttaatactcagactggtgcgtttctccataggttccagtggcttgaggatgaagagattgggtctattccttttgtgtggaactttcttgaagggcacaatagggttgttgagaaagatcccaccacgcagcctaaagcggtgcattatactcgtggagggccttggtttgatgcttggaaggattgcgagtttgcggatctttggcttaatgagatggaagagtacaacaaagagaacaagaaggaagctgataacgcaaagtagaaagaaagaagtaagaggtatgttgttacttaccaacacgagtagtgaacttcctttacatagtgttggctttgtagagccagggatcattagtcttgtggagggctatggagttttttttaatttcattgaattcgttaaatcattcgcaaacactattagtacctatattgaggtcatatggtataataaccctattcgtttgtttatttgttgtgttttgtacctttgatggtattttatttgtataattgatatgtgaatttatgtagcatttctttttaattgatctataatgagcagtagctcaacatatttaaaacatggatggatgagtaatgatcattagctagcaaccttccagatgatcagcggctgtaacaaggtagactcgccttcgtggacgagtaactaccgttgtaatgggacttgtacatgtacttactgataattacctaactaaacgagactcagtgctagaatatgagcataaatcctcatattgaggaatcactaatcatttttatactatttacctttcacatcgtattcttattcattttgatccttttttggtatcaaactaacaatgttgagttattcagtttttcattctgattatctcttttcttcatcttctaatctagtactgatcaatagaaagcctttctcattttgatttgttactctatcctgcgaatatcttacccctaaatgttacccatcccgataaaaaaaaattacattgatacggactttatatattcacacccaccatcactatgcatcatattaactcataataaatgttgtcgaaatcctcttctgtgagtttgtaatgcacaactacaaatcttcaagtggataaaaacacgttactatgtttgtatgtgatttcaaatattataaattagtaggtgatacaattattactttatcttacaacattaataataggtatctatgtttatttttattttcttaaaacttgtaatttatatagtttttataaagtattaggccgcagattggtctttttctaaatggattcaaccatttgaaattgatgcgtgtgatatgctaatccacaatatccaaaaaaaattccttctaaaattgtgactttaaaattttgactggttttgttaagagtaacgttgaagaggaaggggaaggaaaagtcaataatgaaagaaaatagtttcttcatttttggatttaaatggtgagcatggttagaagaaaagaaaattatcaaaggaaacaatatctatatattacccaactatttatcagtcaaaaaaaaagaattgtttccaccctaccaaaaaaaaaaaaaaatattgtttccaacatattttttcttttttctgaataatccatttttgaccggacaaacagttgggtagtcagattaacttttgtactttaccattttaatctttctctaacctactcatccgtaatagaacggtgtccacgaggctcatagtcctacaagcatgtgatagttgtcacaattaccatattaagctctctttgcttacttcacttcttctatcaatatttgtttgccactgacttttcactaaattacaaaactaaaatgatggaagaaaaagaaaagttaaacaaaaaaaaaggagaaaaatcaaagtgataagtggatgtagacgattggccctttccccaagacctgtggcaacagaaagttttgtggctctaaagttaagaaaaatggtccaatgttatatatccaaagtttgatctcacacagtcacactgtaacaataatcaaataatccctgacttcgtcacgtttctttgtatctccaacgtccaataaatg

SEQ ID NO: 5444 - DNA, 3000 bp, Unknown
  misc_feature (1)..( 3000): cDNA_ID_3077043_gDNA_ID_1620790_Annot_ID_168256 3000 nt of promoter + ATG
cagatagagtgacacgaatttagcttagctaatcaaatcctcacattccttatcttaaataaccttcgaaaaaagtgtgatccacatgtctgtataaaacgaaccgattagattgtgacaacaatacattccaacaatttatccatcacttttccatcctccaaaatttttgcagtaaaatctcttttcactttcaaatcaattatgtcacatcccaccgtagaacaactacatgctttccatgcacaagaaagagagatattctctaaactagttcaaaaactccgaagaccaccagctgagtcacttcttgtcatggccacatggctttggtttgaagactttggcttcggaaacattttctccatcatcacggtttttagcgatctactcattgtagatctcgctaacgaggctgtcttgtgctttcggtgccttgaatctgaccagcccccaaatgatgtcagtcagatccctctcaccgagagattcatgaaaaatgacatatcccttcaaataatccacaatcatcgatacactgccattacgggaataaagaactttttaaccactatttgttctagaatattctctgatatccttcaacgagttcttccatcttcatcatcctcattcatcaccaatctccgccaccctctcatcattcccggtttccctcatccaacttttgggagcatcaacgtattgcctaatatcgttgctagggataatcttccaaacgcaaattcatttctttttcctcatggtctttggggctggaacgctaaccatgtcgcgactgataaagaacggacggtatttctaacgttttctcgtggttttcccgtgtcacatgctgaggtgattcatctcttcaccgagatatatggagaagattgtgtcgaaagcgtttacatgccagaggacggtggaaattcctccaatgacaacacaaattgcaatggtcatcagcaacaaccactattcgcgaagatggtcttggactcggttgttaccgtagatcgtatactcagcggccaggaaaaacaaaagtataagatcaatggaaagcatatttgggctcgtaagttcaagaataataaagacggtcttatctaattaaataaagtcataaggatttttagtttctagtttttcaatttgctggtgtcaaatcccttatcttatattgtagtctaataattagaaaccatatgtaacgtttcgacgatggtatcttcacttaatttgacgggaatgtgtttcacttaagtttgaggtttgaggtgactttagatatccaatatatttcacatttcttttaagcaagagtggtactcaatatttttatgcactaccatatctctaatgttttctcaacataaaatataattcacacgtttaaaataaatagcttttgatcaaccaagcttctaacgatactacgctgatttgggggaaatcaccatcatcgtcaccgtcactgtcaccgtcggttcctcctttgaatgaattttagtaggatccctttgatgtcattgacaaccgccatcatcatcgtctctattaccaccgttgatgctgccacgagcaccactgacgttaaaaccaccaggactaccaccacaacaaccactatcaccactaacaaagagaccaagttttttcataaactaccttccatgtttaattactatagtttgaatatagagtgctagtttcttaatttattaataaaaaaatggtagtcttgcacaaatttttcttctttataaagaaagatatcacaaaattttatcaattaaatttattgaataaaacaaaagattttctctcttctattgtttacctttctttttagtaagtaattaagtctaaatgtgcaagaaatccacagataataaattcaaagagataaactttgatgttgttagaaatggaggataatcatacaatagacggatcggtttctcgagtaattgtttttttattaaacggattataccaaatttagaccgattttcaccaataatcaaatcaaacagaaccgaaccaaattaccttcattaattggaaaaaaatcgaatttagccaaaaataaccaagttaaccggatttttttaaaatgaatacagagattatcgacagtggaaaaaggaaaagaactcgaaaagaagaccataaacgcagaaccataagcatacacagacgaatgttaagcgattagttttaacacatttcataggtcttttaaatgtatattatcgagtctttgatatcgagaacatatagttttcgatatcttttagtgtttttggatttgtggacctgctggggttaaaagaggtgtgttggaagagaaatgaagccaaatgagtcaagtgaagtaattggagatgcagagcagtgcaaaagcgtcatcactaattagtttggccgcctctgatagaagacttcctaccgatagatctttctcaactttgtacacaagatagagtaggatataatctctttattgatcaaagtatgataacaaagtataacaatcaaggcacatcaaatcaatttataaaccctagtcacgtttcaagaatccaaataggaaatacacaataaatattgtcttgtagagattgcaaatagttgttaagacgaagaacaaactatttttatttattacgtgggtcatattcaaaattgaataaatgtaaatttactgtaaatgatgcacttttggataaatcctgacaaaaactagatttatatcgttcataaacctttcacatatcagccattgcaaccatatgaagttttgaaaataagcttgtaggtgatttttgggaggatttactcacatgactaaattgggcccatgagtgaaagtgaagcccatttgtaaaataaatgtcacactacacacaaaaaccctaaaaatcatttcagtcttctcaaggtttttgaaatttctatcttccatttccatctgatgaatctctgacg

SEQ ID NO: 5445 - DNA, 3000 bp, Unknown
  misc_feature (1)..( 3000): cDNA_ID_2992645_gDNA_ID_1620790_Annot_ID_168253 3000 nt of promoter + ATG
tgacacatggtgttccaacttccaagccactttcatggctataaacttgaaagactgtacattctggataataagatgggtcatgtccatctcttatttatgccttggagccgaagttgagccgcacaagagattgaatgagcttcagccatttctttctcagtagaactttgataaggcattattttagtgtagtttaagcatagacatagatttgttgggaattgttgctttgtttgacagcttaccaactgagttggattttgaaaggaaactaggggaaactggtaaatttctgctaaataatgaaggaactcgattgttttttattccaaacttgtgcagctttcatgtcgtcccctctgccataccctttagacagcttctgttcttgcttttgactctgtttagagcctcttgcttgttgtagattgattttattttgtgactatggctacattatggttcaaagtagtgctgcgcctgcctagcatattcaatgggtaaaaaatccagagtcatcttcatgtttaaactggtccaaaagctgcaaagagcaacacttctcctgtagttgtattcttcagatggtaatgattaagataaacttggtaggcttgagttgtcttgtacttttagatttgtagtgatgtaccaaatctgaggtttaggcgtggaagctttgaccgtgtatcagggaaggtgttgaagaacaagaccatagattaattgtcaggttgtttctgatgcagagaaacttgaaaggataagaacaatcaagaatagaagcagatcttgtttagttcatgcttgttttgttgtcctaaggagagataaacactggttttgttaattcatttcagtcgtaaatttttacatcaaatctctcatcttgtaactcttttgtttcaattacttccccaaccatagagtttgagtaaatcagaaaaaaatagtattatccaaccgttcaaccaatccgtgcgttgtttctatattttcgtagcagttgagttataaacacatttattatggtgacaatatgagaagcttaacttgaatcagaattcacccacataactgcaagagtcacaagagaagcatagattgaagtaggcagcttctgcacaactttgccaactccagggacaccttccgtggccttcttcgtcgcaatagccacagtgggagcaacaatcaaagctatgatcaaaccctgactaaccacgttaaacgtctcagccgtaatctgctcaataaacttcacaaactcttccctatcaagttctccatccaagttgatatcacagtcctgttacaagaacatcacacaaccattatgaccactcaagttgcctagaccgaaaagaaatagtaacattatctgatttttcaacctattcttccaaaatcagagtccagatgatttcaagtgtagtgttacaaacagtggttaatactaaacgtttaaagctaaacgcaatcgccaaaagaacatccgtttctgctttaaaaattgcattttgactttttctttacacaaataaccacaaacgcaaaagaagtaattcagcgtttgcgttttaaaagcgtttcaaggaagtgaaagtaccgtcataatgctattgactagatccttagaaggtggatcgaaatgaggaccaggcaatctcttgtttatgtcactgacaagattacacaacaagacaaaaattgtcagagattaaacataaaagtttctaaatctgtaaattaacactaaaaaaatgttatggaaccaaaagattttacttgtaaacgagaagaacagcgatgtataactcttcaaacgtaagattggctcttccggtttgcatcttgaaccgatcgaaaacacgatcacatatcgcttgtacctgcttatgtctccactctttacctgcaatttaacattgccatatacatattatacataacaaaagaagcaattttattacatatgcacaattacttgaccataaaactgattataaatgaaccaatgtgagaaactgaaaacaattttacaaacctcggagcttgttaaagacttgtcccatggcgatggataatcttcttctcgtctgattgattgcacaaaaatgattttttttttttttaatatgtggatctgagtgggggtggaggcgtgagcgtgacgaatttgggccaatttatatgttggtcaacggcccatttatttgcgcaagctaatgaatcatgggctcaaatgggccttaatcgttaatggtgaagaaatgtaaatgggagagagaaggcagcgaaagcgaaacaagagacgtagctgaataccacagaaacatggagccagtatctgcttccaccaatcccatctcttctttccatatctccatttttttttatatctcctaattatcatattcgtttttttcactataatctaaacttctccaattgttgaaaccattttatatttatctcttcttattttctgcatggtggtttgaattaggccaccaaaaaactcttggataaaaaaaaaactgagaaacagaaaaaagaaaaaacaaaacacacattctcgatttgtctgtgccacacacactctcttgcacattcttgtctcgacaatactctcaggtgcgttattggctttgctctttaagatcttactcaaaatctctgtctttggaatctatccatagatgcaaaatttgattttgaagtgattcttcatcttcttaattgggtttcaatggattagtcaaatttgggtagtaatgattggcttcgagctcagaactagaataaagtacaattcttttgctggattacgttattaacttttgtaattttcaatacccacaagttgatattgattctttgtgtctgaaattgtgttatgatatctaaagtattgatttttgttagcagaatacgatcttgaagagcaaagattgttcctttattgatgaattgagtgcaaaagagtgttatata

SEQ ID NO: 5446 - DNA, 3000 bp, Unknown
  misc_feature (1)..( 3000): cDNA_ID_2166029_gDNA_ID_1620790_Annot_ID_168247 3000 nt of promoter + ATG
tgtttttgggcttcgatttaagtttggtttgttcattcgggcttttaaagtccatggataatggattcacttttaatgttggaatttgtgtgtgttttttggtgggaagaatttgtgtgttaaaaaaactagatctaagacaaaatataattaggggttttctcctgtcttctctctccccaaacctttcagagaggagacaccatcgttcatcctttttgattccggtttgtccggatttgtacatattctcgtctctgtgcgagataaataaagttccgactttagatcggatttccttaccggcaaagtctggtttagatctcttttacaactgcgatgtcgaagccctctgttttacttccaaatctcgtctgatctctctaatcttttgtggaattatatcttcgtcacttatttttgctcatgtcataggagcaaagaacagattacatcaattctcgatgtagtcagtggtggagcctccctggagatggtgatgttcagcgaatttcgaaacagtttggaattgggatccacagaaggaaagaggacgttcaccgcttcagagctgatcggtggtggctcatcggagtttttagcggtttccggcgaactaacggcggagcttgcatctgacgcgtggcaatgtgaagaccacgtatcatatacgtgtccaaccctaaatcaactatactttaattgtattttatttctctgtttgatttagttttgggcctggcctattaatttccatatgtaatcctctttggaccttctgtaatctgcccaatttgggctttatcaatcaaaatggccgacaaaaaataaataaaaaattgtgtgttaaaaatgataaattctaaacaaaaattagacaacaacactcacttaaatcacatcaaacaacatataaacggttataaatatgtatattattgagttaaaagttatagatttatgtctgtatagttagatattagaaaatacactaaaaatacactttcttaagatcacttaaaacggcttaaatccatttaataacacatgcatattaattttttacaaaaaaaaaacacaaaataatttttaaaccaatcatgcatacgtgtttgcggtccactatttttttctaagtaaatcccatcaatttttgcaatccatgttcgtttttgacgacatcgccgcttagaagctcctctatatgctttccataagatatgatgatattgaccttgtcttaaaagacacttccatattgttcttttgcttacatgctcgccgaaactaaattcatacttaccattgaataagacatcgtggacggatatagtgttgtctttagatgtgcaattaactttgagaatactattgggagcaagttcatttcgaaattctaatgtgttatccttgcaaccccatggtactactgtccaactttcatttaaaccaaaatatatggaaatgactattagaaaaacaatgagatggttcatttctcggattcataagttcttttgtagtaatatgaatctaagacatcaaagtgtagtatatggagacattatgaaggcattagctaaatttaaacacaaacatgaaccaataaacctttggctagagaaacatttatcatcgaaaaacaaggtggaccaataagttcaaaataaaataattaacttctaattctcaccactaaattaaacaaaccaaaaaagtcaaatatcttactaaattcttggaaatgttttattttgataatactagatgtcagttctcggtttgatcggtttaaatagggacataactaaatgtttagtgtaaattatggtttggtttggttcggtttgagttcagttaattcggttcagttcagtttggctaggtttggttcagtttggctaggttcggtcaaaatgcacatccctaatgaaaacatagagacgataagagtcaaaagtggtaaaaactgtgacatatctaaaccgctatgtcatagtctagacaattattgcagtcgctcgtagcacggttctcaattaagattttagcttgtacaacaggcttggttatgatttatgaagttaccttggtggtcgaccatgtgggtgtgtgctgaggtcaaccacagatgaggttagatgagggcgacccaaaatcaatcttttaggccaacttcttcctttgcacaagtttgccgccaaattgacatgtcttttatacttaagagatttgacattcaattatcaatgtttcaaaaaaaaaagatcattcaatttggtacttcaacaaatgtcaaatctcttaagtacatgtccaatgcgctgttttgcttcttctttttttgcattttccacgttctcgacatgtaaagacgtaagacacacgacaatactagaagtgaaactatatctttaggtcataaaaccgcataaaacgattaaattattataaaaaatgtatggcaattatgtgaatttcaagcatagaagttttcttcctttattgtcttttcatgattgaaactcacaatcgttatagtatacgacacaactcattattatttttaacaagggtttagaacaacataaattggttttaagatacttaattgtcatattaactaagaataatttgtgttctatttccatttagttatcataagtgaagatcagtgtttgaagggcagtgagtgaaattaaagaaactaaaaatagccatttgtttcttaatgtccacctcatccttgatatatatctcaatacgttttataatttgcttgtgtggttgggagagagagaaatgagaacgtaaaagaaggaaaacacgaaaacaacacaaaaggatttggttggtttgcttttaaaatgctaaatgacagatacatacgggtaagaaggcgtgactccctctcctcccctcccactttttcatcattggccatttataaatttaattctcaattcactccaaatctcatcatctcacgtttctttatcg

SEQ ID NO: 5447 - DNA, 3000 bp, Unknown
  misc_feature (1)..( 3000): cDNA_ID_3077049_gDNA_ID_1620790_Annot_ID_168246 3000 nt of promoter + ATG
gtaataactttaatagattatatttttttggtcgtaactttaatagaatttaggatcatattccttttgaaatagatttaaataaattttagttttgattttgattttgttctttcaatatttgtatattacgaaacataatatttttcccgtaatatgtatttctcttttatttatgtgaactaatttatcatcctaaatctaaaattacaaccttcaatatgttttatttataaattagatgttcatatagaaaataacatgttaagaaaagaaaaacttgtgaaatgtgaaatcttccaaaatttagttaagttatatcgttgatttatacttatttgtttccaaaattttggcatgagcttttaaattatcttgagttaatttttggctcagtcttttatccaaactttgttaacaatctttgtttttagccttgaattggtcaaaacattcaggattttcaacttttcacagcacattgttccagttatggataagataacatcaatttttcttatcaaacagttacatgaactttgttaatactgggtcttgtgttgaagttgaggtcagaaaatatatgattccaaacagtggttgtgtgtcgatgatcaaacatggaatcttcatgcatgccatcagtgaaacgtttttgcttagttttgtcatgtcctggagggaggccacaaagcttggcgagtgacgaagttgaatcgtaaaggaaatgttaacgtcgacatgtatactaatgcaaaattcattttattttctttgcagaaagaaatgttgctcctctatcccttacttttccgtcgtatctaaataaccaaacactactccgttccttctactctcttttacatctcaacaaacacattattatcaacacaaaaacaaaaatgaaaaatgtttggtcctagactctcaatgcaatttgaagtacatggctaacaaatatttcaatctaatccaaaatagaagtccaaatgcattcaaaagcctcaaactccaacctataattactaacccttttcactggccatctcacatcactaatctcttcaaacatctcattaccatcatctaagaccggaaacatagattccggtagactccaatcaagtgaggttgagatcatactctccttcatccacgggaactcaaaaactcccaaactctcttcattactcccacttctcttctcttccatcttgttttctacattgttggctctcacatgttgtcttttcttgctcttcttagtatgctcgtcatttttcttgcgtttgtggcttgtagacgaaccctccatcgataaagaaacgtgagatgatgagatttggagtgaattgagaattaaatttataaatggccaatgatgaaaaagtgggaggggaggagagggagtcacgccttcttacccgtatgtatctgtcatttagcattttaaaagcaaaccaaccaaatccttttgtgttgttttcgtgttttccttcttttacgttctcatttctctctctcccaaccacacaagcaaattataaaacgtattgagatatatatcaaggatgaggtggacattaagaaacaaatggctatttttagtttctttaatttcactcactgcccttcaaacactgatcttcacttatgataactaaatggaaatagaacacaaattattcttagttaatatgacaattaagtatcttaaaaccaatttatgttgttctaaacccttgttaaaaataataatgagttgtgtcgtatactataacgattgtgagtttcaatcatgaaaagacaataaaggaagaaaacttctatgcttgaaattcacataattgccatacattttttataataatttaatcgttttatgcggttttatgacctaaagatatagtttcacttctagtattgtcgtgtgtcttacgtctttacatgtcgagaacgtggaaaatgcaaaaaaagaagaagcaaaacagcgcattggacatgtacttaagagatttgacatttgttgaagtaccaaattgaatgatcttttttttttgaaacattgataattgaatgtcaaatctcttaagtataaaagacatgtcaatttggcggcaaacttgtgcaaaggaagaagttggcctaaaagattgattttgggtcgccctcatctaacctcatctgtggttgacctcagcacacacccacatggtcgaccaccaaggtaacttcataaatcataaccaagcctgttgtacaagctaaaatcttaattgagaaccgtgctacgagcgactgcaataattgtctagactatgacatagcggtttagatatgtcacagtttttaccacttttgactcttatcgtctctatgttttcattagggatgtgcattttgaccgaacctagccaaactgaaccaaacctagccaaactgaactgaaccgaattaactgaactcaaaccgaaccaaaccaaaccataatttacactaaacatttagttatgtccctatttaaaccgatcaaaccgagaactgacatctagtattatcaaaataaaacatttccaagaatttagtaagatatttgacttttttggtttgtttaatttagtggtgagaattagaagttaattattttattttgaacttattggtccaccttgtttttcgatgataaatgtttctctagccaaaggtttattggttcatgtttgtgtttaaatttagctaatgccttcataatgtctccatatactacactttgatgtcttagattcatattactacaaaagaacttatgaatccgagaaatgaaccatctcattgtttttctaatagtcatttccatatattttggtttaaatgaaagttggacagtagtaccatggggttgcaaggataacacattagaatttcgaaatgaacttgctcccaatagtattctcaaagttaattgcacatctaaagacaacactatatccgtccacgatg

SEQ ID NO: 5448 - DNA, 3000 bp, Unknown; identical to SEQ ID NO: 5438
  misc_feature (1)..( 3000): cDNA_ID_2166021_gDNA_ID_1620790_Annot_ID_168244 3000 nt of promoter + ATG

SEQ ID NO: 5449 - DNA, 3000 bp, Unknown
  misc_feature (1)..( 3000): cDNA_ID_2107069_gDNA_ID_1620790_Annot_ID_168243 3000 nt of promoter + ATG
cagattctattgagttcatagttagcattagaaaatcttccttaagcaataaacagagagagaaaattatatataagatatagaagttaattgaaatagtttttggattgaaagttttgtgtaagacatcgtagataaaacaaaacttaaaagtaacatgttacatccacacattgagactctatatcaagattcaacatctaccaaaatagttttttttttttgcatcttgatgttgtatttggataaacagttgttttttgcttctttttctttctgagtttgctagaaaatctgaaaaaaaaacttatgaaattatgatattgatgatttaagttacgcttaaattatagcgttaaaatacagttttatcaccaatatagagttttacaatttttggaccaattttggtgagaatacataattccgctagcgtcaaaccgaaattctgatattttgtgtcaagatgcgattcataaatttttggaaattattaatttacaaaatgtatgatttattaatatatattttagtactaaatgagttggaaattccttttggtatttttattttgttttttgcatccaaaacttttttttttttctttttttttatgtaattggttttcattcgagatgcaacttggaacatatataccaaattgatgttgcatccaaatgcagaaacgaatggtcatactgaatataaacgaatggtacctgatctatagtttcaaatttggaaggtggagtgttatagactgcctttaatctctcagccggaggagcaccatatattctactcatctttttctcaagaagtgtaataacagaatcttctactgcccaaatccccggcttttccccttcttccgacccgaaccaccccgaagattccgccttcattgcctcagaaggagacaagagctcaaaaggcgatgacaaaggcgggttgggacaataagagcatccctttagtccttgaattcctgccccactccgtttcttgaacctcaagtaactcataatccccggtttaagggtaactggtttgcgaccattgttcttcaccaccagagctgtagccatgcttactgggtagagagagacgatatacgttatgtcgagaaccccggccgtacagctaagttcgatctgagaacgttcccaaagatttcatcattgtgtggacaaaatttgatatatatattgaggtattgaatcaatcacctgaagagcatcaatggcgtctgaatcagtatccttgacactccaatcacatcctgagattactgaagaccctcctttaggttcttccccgtttacgataacaacaccaaccccacctctgctctcatcaccatcaactgtgtaaaggacttcctcgaatccctcgtctttccagtatacctttggcttatatgaaagtacatgagcatctgatagactcagttttaatgaacttccatttctgaccttaagctctaccataggaatgttgtttgattccgagaattttatgccttttcgtccgaatttatcttcaagcttttcagtatttattgtctgtgtctgaggagctgaaattgaacttcttacggcttttggttttgggagcaaagaaaaagagataagagaagccattgatggagagtaaggagaggaaaagataagacaaatggtggagagaaaggagaagaaaagataagacaaatgaagtttgtagtggacttagccaccaacgaaagttaatcagaattgtcaagctttattataaacgagcttatcaaattatcattttctgatcataagattttttttttctttttttttataatcataagaagttgtcttgggtcgtccttatgttattgttatcaccacataataagtaaccatgattttgtttaatcttttgtttttgattggtcttcaaattttctgaataactaatatttaaaatagaaaataaattcatcttactacttatagaaaacggatggtccggagcctcggatgcattgctttatcatattttactatcatcgttgaaattgaaatagaagacaattttttttttttttttttttaaattattttttttgaaatagaagacaattgtatatatacatgacaaaatagaccttatattatgtatgtaattagtttctatttgtttttactaataaatttatcattcgttaactcacttaccatttttatttcataatttatcggttaaagtggtcgtaatggattattcacaatgtaagaatgtactcccctaaaccgaaagtgaaacaaaatgtagttcagaccatctcatatgagtttagttcaggttcagtttttgtatataaaggtaatctcgattcaaagggtttaaaactcttaataaaatgtaagtctaaggttctatcgaaattcgtttttctaatatagaaacacttaaccgattaaaccaaaatatgatctgattaattttgtttcgattcggttttgggttgggatcaaatcatcacaaggaattagatcacagatgcaccaaaattttgaaatttttatgtcggtaaccatatgtcccatgaactaatttgtttattagttgttacgaggacaaagactgaacgagcattggcccatgacatgttctctccggagaaatagagccgttataaatccacccacaacgtcatgatacatcattattaaatagtactatcattcatttagcaacgaaactcaccgaaaatatctccaacttttatctctcttttagtttccccaaaaccaaaaagtttacctttttaggtttctctacagtctccacgcgtttcttcttctctctctgtacgcgttttatcagtctccatatctaaggagaggtaatgggtcctctaaaagtttctcatttcccaaatgttagatttatgaaactgttaattttacaattttgggttaaaatctcaccttttcgatctttctcaggtgaaaatcgatg

SEQ ID NO: 5450 - DNA, 3000 bp, Unknown; identical to SEQ ID NO: 5436
  misc_feature (1)..( 3000): cDNA_ID_2166275_gDNA_ID_1620790_Annot_ID_168242 3000 nt of promoter + ATG

SEQ ID NO: 5451 - DNA, 3000 bp, Unknown; identical to SEQ ID NO: 5435
  misc_feature (1)..( 3000): cDNA_ID_3077053_gDNA_ID_1620790_Annot_ID_168241 3000 nt of promoter + ATG

SEQ ID NO: 5452 - DNA, 3000 bp, Unknown; identical to SEQ ID NO: 5434
  misc_feature (1)..( 3000): cDNA_ID_1842723_gDNA_ID_1620790_Annot_ID_168240 3000 nt of promoter + ATG

SEQ ID NO: 5453 - DNA, 3000 bp, Unknown; identical to SEQ ID NO: 5433
  misc_feature (1)..( 3000): cDNA_ID_1828706_gDNA_ID_1620790_Annot_ID_168239 3000 nt of promoter + ATG

SEQ ID NO: 5454 - DNA, 3000 bp, Unknown; identical to SEQ ID NO: 5445
  misc_feature (1)..( 3000): cDNA_ID_2992645_gDNA_ID_1620790_Annot_ID_50465 3000 nt of promoter + ATG

SEQ ID NO: 5455 - DNA, 3000 bp, Unknown; identical to SEQ ID NO: 5444
  misc_feature (1)..( 3000): cDNA_ID_1828666_gDNA_ID_1620790_Annot_ID_50467 3000 nt of promoter + ATG

SEQ ID NO: 5456 - DNA, 3000 bp, Unknown
  misc_feature (1)..( 3000): cDNA_ID_1828642_gDNA_ID_1620790_Annot_ID_50475 3000 nt of promoter + ATG
agaatagtacattacttatcctaagtaattgacatcttttaaattttttgaaaacttctcaattctaaagtttccacatctacgatatttcagttttgggtcaaagtcttcatatgtctttaaaggaaagatcttgaattcattagaagaaaatagaaatgataataaagaaaaggtagtataaatctcaatagcacgtaattgatgatgtcatgaaaatccatgatagctgttgtttgtactttcacacgtagagctaaataaacctcgtgacttgtgagatgcaacaaacatggcacaaaattgttttacttgatttccccaaatttcaaaatagatttttatttcgttaaactaaaaaataaattattgtagatgtacagattatattttattatataaagtaagatttttaaaataaattaaaaagttagttttatatattctatattattattttttataatatttaaattttaaataaaaactcacatatttttaaaaatatttagtattctaattcttatctcaatttatttattttttaaatttttaaatatttctttttgttgtttaaactttaaaataattaagccatacacgtgtatcattattatataaacacgaaaagaaggaagaagacgcaaagaacaaaccagtgaaggaaaaatggagatatggttacttatcttgggctctctcttcctctctctccttctcaatctcctcttctttcgcctccgtgactcctcctctcttccgttaccacctgaccctaactatttccctttcattggaaccatccaatggctccggcaaggcttaggtggactcaacaactatctccgctccgtccaccaccgtctcggtcccatcatcacccttcgcatcacttcccgcccctctatattcgtcgccgatcgttctcttgctcaccaggctctcgttttgaacggtgccgttttcgccgatcgtccaccggcagctccgatcagtaagattatttcgagtaaccaacataacatcagctcttgtttatatggagccacgtggcgtcttcttcgccggaatctcacttctgagattcttcacccctcgcgcgtgagatcttactctcacgcgcggcgttgggttcttgagattctttttgatcgatttggtaaaaacagaggagaagaaccgattgttgttgttgatcatcttcactatgcgatgtttgcgcttcttgttctcatgtgttttggagataagcttgatgagaagcaaatcaaacaagtggaatatgttcagagacgacagcttcttggcttctcgagattcaatattctcaatctctggcctaagtttactaaattgattttgcgaaagagatgggaagagtttttccagatgcggagagagcagcatgacgttttgcttccgttgattcgtgctcggagaaagattgttgaagagagaaagaatagatcatcagaggaagaagaagacaacaaagagtatgtacaatcatacgttgatactctgcttgagctggagcttccagatgagaagaggaagctgaacgaggatgagattgtgagtttgtgttcggagtttctcaacggtgggactgatacaacggccaccgcgttgcaatggatcatggcgaacttggtgaaaaacccggatattcagaagaggttatacgaggagatcaaaagcgtagttggggaagaagcaaatgaagtggaggaagaagacgcgcaaaagatgccgtatctagaggcagtggtgatggagggtctccggagacatcctccgggacattttgtgctcccccacagtgtcactgaggacactgtgttaggaggatacaaagtgccgaagaatgggacaattaatttcatggtggcagagatagggagggatccaaaagtgtgggaggaaccaatggcgtttaagccagagaggtttatggaagaagcggtggacataaccggaagcagagggataaagatgatgccgttcggagcgggtagaaggatttgtccagggattgggctagcgatgctgcatctggagtactatgtggcgaatatggtgagggagtttgactggaaggaggtccaaggtcatgaagtggacttgacggagaagctcgagtttaccgtagtcatgaagcatccgcttaaggcccttgctgttcctaggagaagtcactagttgtctacttcttaaacttcagtttagtattcaccaaagactaggtgatgtatgaagaattgaagttatgggcattttgttagctgaagtcaactatggaactatcttttttattaaagtacattttgtaccttggaataaatgatagaaacaacaatccttttattttgtattaaaaggaatcttttatgacgagtgtttttacaagaaaggtacataggtctagaaaagtgtgggatttctagtgtttagtgactagatgatttagaaaagtgtgggattttgatggttgttgatacttttgttgggagaaatcgaaagagtaaaagcatttgtgatacaacataaaacaatcataaaaaaacaagattagagtttaagaagcacacatgtaaaatgacttgatatagagtgaaatcatgttcctctccttccatacctcatagatgactatgtgacatcatatcatatatcttgagtacctttgtaagttagaaatgagataaatttaacgaggacatcaacccaattgctgatgatcaactttggttcagtttcaattcgaaccaaagttaatttgctgatgaataattttactagttaatcttcttcaaatctaatgagatttattaaatgcgaaaatacgacatcttcacaagaaggaataataacttccccgtaggtcttactaaagaattcaaacaatttcattctccctctttaccgttccaaactaaattgaaatcaaatcctcaaaattgagactgacagtcagagatttccaaaacaaacaaaaaa

SEQ ID NO: 5457 - DNA, 3000 bp, Unknown
  misc_feature (1)..( 3000): cDNA_ID_1828630_gDNA_ID_1620790_Annot_ID_50478 3000 nt of promoter + ATG
ttggtgttcatagaaaagagggatgatagtgcaagattatttctcataagtactgtctcaagattacttctagatcttctgaaatttgttttgtaaatttttccacatttacttgcattagttaattaacctatatgtctgatttagatttttgttgttggtgttcataaaaagaatataaagttttgactctttttaaagcaaccatagaaacaagaacattccttacaaataaacataaaatcgttagtcgttccggaattttctcacgtcaaatgattctgacactcctattcacaaaaccgacaaaagctgtaacacaacagctcactctgtagctgtgtgcaatgcaagaagtggttcaagacagtacccagcagagagatcacaagctaagtcttttactcctaagaaggctacaataatttaagattatttacatgatgtttttatggaaaaaaaaaggcttatgagagctctcactcatacatcagtcatcatatgaaatgtgagggtttgtgacacaacctggtgcattaggatcctctgccccgcaacaatcatagaacttggcagcatacggtggatcatctggtttcaattcatagtaccttcatttattgattaaaaaaaacaagttctagttaattccacttcttagtaaaaagtagaaatcaaacagatgcatcatactcaagtcgattaaacatggtttggaataaatatatattcagtttcgaaacaccttaaaattaaaatgaaataacaaatatcaggtaccagcaagaatatgaatgccaaaaccaacaaccataaacaccaaaataaactcattcgttgcacataacgataaaagctcaacaaaagatagttaagtctatgctatgtgggtaactacaatgcatggaacagagagaatcacaaacagaggaagtaagtaaataaccaaaggagccaataacggaacagagacacctacgttccttcctagtccaaagtttattaccaagataaaacacgcaacatagaatcagatgataaatctctaaactgtatttttcaccactctttatttatgctattaaccgtcgactaaaccattttttcaactagcagaacaaagtgtaggccactagacagcttgaaaacttgtcgagataattttttatcctcagtggttaagagtattcgacgtttaagagtgaccacaatcattaaacagcttcatgattatgcctaaagagtttgaaatgggcaaggcaaatacaacagtagctaattatctgcaaagaaggctaagagctagtttcaaatcaaccaaaacatgacctttgacccacaaatagccattaaactgagatcatgatcatctatcacttcaaaattattggctacaaagaatctaaggtatctaactaaattagctatagatccagaaccttaatacaataaagtggatggctttcaaaacccatctcaacaatttgtgctttgccattataaattagcgaatcaagctgcttgggatgtgagattcttcattagtgaatagatttagggtttgtaggagacataaccttttctggtcatcgtgacgacgacaaacgaagaaggaaggatgaaaacggcaagaggaagtttcgtttgaaagatctgtgtagctttgtttgcacctttggcacaacttctccatctccttcttctccattctcgaagaacactgtaatcaatttcctaatttctacggcaagtcaaatggatccgattccggttcaccggaagtttggtattgcctttcgattccggtagattaaatcagtaatctacgttttagcaaagatgagctgtttttgctgtattgacttatgggccttaatgggcttattgggtttagtttttatttttatttttataacttggcctcatttttctgatagtgaaatgtaggattgaaaagcataaaaacattataaacaaaatagctcaaaacttttttttgttaaataattgtgatataataagaaaaacgttttgtagtttttttaattttgaattattttttccacatgcatcaaatataacatacacatgaaaatcaaatataaatgtatgataaatattgtgaatggtaaaaataatagaatcacgttatgaaaaatggtatattatacatcatcgattggtgtctgataagtttggaggaaactttagcaataatacaggttttctctatttattcattagctaataggattatttatacaaaaatcataacttgattagcaagttctttacatttatgataatattaaattttctatctaacaataagaaaatgtacacaaatattaattttttattaatgataaaaaaaatatttatcttgatcccgtaattataagatttatcatgaactatcgatatcccgatctttcccttcccacttcccgcaaatttatatatggtaacacgtgtaagattggacaagccttctaaacaacaattttaatgaatcgatcatttttcgtgtatatatgtaaaagtgaaagaaaaacaaaaaaatcaatcgaccagataagaaaacatgtcggaaaatggagttaaaattatcatcaacactagactagacgccaaaacctataaacaaaaaaaaaggatagaaacactattgttgtgcagtttctttcacattactccgtagctcaatggttggttagcgtttaataacgccttcctctctgcgagttcgagttgagtcgcatggtggtggtggtgatgatgaagttgatgaggttgttgttgattagagtttaaaccaaataaaccctaaccaaaaataaataaggtattcttaaatactttttttttaattgtttcataaatgatcaaattcgaatcgaatcgtacaacagaagctctggtgttgaatcgccatgaggtttttgcagatctgaggttttttctcgagaagtaagagagatctggaatttggcgacgatg

SEQ ID NO: 5458 - DNA, 3000 bp, Unknown; identical to SEQ ID NO: 5441
  misc_feature (1)..( 3000): cDNA_ID_1828626_gDNA_ID_1620790_Annot_ID_50479 3000 nt of promoter + ATG

SEQ ID NO: 5459 - DNA, 3000 bp, Unknown
  misc_feature (1)..( 3000): cDNA_ID_2160091_gDNA_ID_1620791_Annot_ID_168284 3000 nt of promoter + ATG
aacttacactctgttttcttttgagaatggttttttatatgagtgtgcactcaagcagggggagagtattctgatgtgtcgtactctgttccggatgatgtgggagatgaggatgtggaggaagaggacgatgatgatgagttagatgacaacacttaattgcttagtcctggtcattttttttttagttgggcattgtgttagggggagtttgtcactgattgtttttgtgtgtttgtgaaaactccctgatcttgttctttatcggcttcttatcggatcttctgtgtgtttaatgattagtcttatgtatagaaccaagaactcatttctgtttcatgtttaaatggttatgtcttttggcagtagttgcttaaacttgagcctttggtttctatgtttggtatggaatattgcttggcttgtattgtggtctctactcttttgcagattacttgaggtgtcacactcaaataaaaagggggagattgaagaaacagagtgtctgaagttctacaggcgtgtctgaaacaacacagagcagaacagaggaacagaggaagcgggaaagtagcagttgcttttgccagcgtggcatgttgattggagtgaaggaaaggcgtatcgctttagacaaaggagacgaagtcgtcagacataggacgtgtgcctagtgtcaagataatgatgaggagctacacttgaacctgatggataaagtagagcatcctgccttttccgagaaactacataagagaagttttggtctcttattagggttagccactttacttgagaaaagtggaagagaagaaaagttaaatagaacttgttcttgtggtttcattggtgagtgaacaaagagagcacacggctgttgctgtgtttgtgagctgggtagttttaggttttgacaagagcaaatcaggttgttgatgttgcataacactgtccaaacttatctgtgattgatcagtttgaaagttgttctaataaagtgtgtttattggagttgtgatctttatcttgtcaaagtacttaggattcttttacttcatatgttagatataatattttgcttaattgaatatattttacaatgttcataagctataagatcattatatgatgcatacgttttatccaaccatatcttcacgtaaccaacttcttctcaattaccttaactgttcacatgtttatatatctaagcccatatttttaggtgttatacatatatatatttatttactttttgaggattctggaaaattgaaagatatgatacaacagttatacgatatatatattgaatttaaaactttaataattataattttaataatttgaatagacactgtaaatatagttttagtcggacaaaccttactcaacattcaatactaatcatataccaaaacataattgttttatctaatttagagaaaagaaacatgaagctatttattatcattgtggtgaccagtttaaccatctcaaaggtatttgacaaaacacttgtcaccattgaagcaagaaatttgaggaagatggaccgtcatgagcatttcaatgctaatgaagatttcgtggaagcaaaaatgttaaagaaaattgacaataaaaataatctaaataatagatgtataaatgattttgcgcctactaatccaggacataattctggtattgggcatccaaaagttataaacaacaaatttacaaaagattttgcgcctactaatccaggacatagtcctggtattgggcatctaagagttgtaaacaacaaatttacaaatgattttgcgcctactaatccaggaaatagtcccggtattaggcatccatgagttatgaatgtttaaggattgtaaatcttattatataaatcttaaagaaataaaataaaactaacaaaaaaacaaatttatatgtctatatctcaaatgtttttaacttttttttctgaactaaaagaaaaattaacaaatttgtttttatatgtgttattggtcaaataaattaggatgtatttatatttatttgaagaaaaaattagcatgtattaatttttttaaagtcatttaatttatgtgtacaaaatattattttacggttttggtgggaaaacgttggcttacagttgttgcgggaaaacgtgatttttaattttggcggaaaatactttttgtgtgattttggcaagaaaacactttttgtgattttagcgggaaaacgtggttttacggttttgtcgagaaaatgttggtttacggttgtggcggaaaaacgtaattttaatatttaaaccaaaaactgaagttaaatagaataatttagttttactaaggatgactaatagaaaaagaaaaataaatagacttaattggataccaatttatttatgtgaaaccttatttaataaatgagtttagttggcttaatccatttaatctcatttaacttgtttttcctaaattaatttaaatgggtcaaaaactcttactcataaccattaattaaataggatttgcatacccaaattaacatcactagtcctagacaaaaaccaaaatagaaaacaatatttttatccatttttacttttgctcatcgaccaaatttgggcctagtttgctacaagctaacaattgaaaagcctcttaagacacatgaaatagtaacgacgtcgtttactcatgaagcgaaagacggcaaacacgaacgggtttacgtagaccgtcaaacgctcctccgtccgacggagaaaaaacgagacggtgaagaagaagaagaagaagaagaagaagaacgactcaaagatctcatcgatcactctctccaagatctattcacgcatcgtcggaagaattttcgcttccgacgacgtttctctcgtctgattttgtctccgaacatcctacctaatcgtattcggtgctggatttgaatccggtgaactgaatctgacaatttcgttcccggaggtgtttaaaa

SEQ ID NO: 5460 - DNA, 3000 bp, Unknown
  misc_feature (1)..( 3000): cDNA_ID_4255222_gDNA_ID_1620791_Annot_ID_168310 3000 nt of promoter + ATG
aaattgatattgtttatttttgtgatactatgtaagtgctgcaatcaaccatttttcttgtattgtatgaaaatgatttgcctaaaatcatatatcagctaatcaaagagatagatgcatatgtgctaattaattaaacaatacatatgaaattatacctcttatataaaaccatcgacaaagagttgtgatgaatgatgatttctgtatattaatgatttttggtgaaacatataaatgattttataaatatgaatggtttgcaatacaatatgcttttatgaattatagtcgtgataaataaagtaaaagcatatctgagacactaacatatacgatatagtctagaatgtggtaaaagtttttattatccttagcttaacatggccatgcatattattgtgagatgaccacctcatgcgtatgaggtagatagatgaagaattggtaaaaatctatgaattgattttacatgactaacttgaacttgggtgcaacactaatctagatcttggtccaatatacgttctactaaatgagaaacaaaacattaaaacatttgaaacacataatttacaagcaagaggaaaataaaatgttggtaacctaaaccacccaaccttgtgtcaacgactcaacgtacacaaatacaattcctcttggctttaatctattatattacacattcctaagacaataataaatattttctttaaaacggaaacagaccgaccaaataaacgaaataataaatctcatacaatgcgatccatttgctatggcctcttgtgacgtatttgaagttcatttaacacagacggtagaaatttattgtcttcttcatggcttacctaatactattttaaaatagatatctttcattgcttaacaaatttataccattcttcttttattcggcacaaatctatgttttgctatcatttgctttgttcggatacaaatgtaaaagagatagttatgtagtaaactaaatgtagtaaacttttaaataagaaaattatgaaataaactcaaatcagcattttcttgatactttctaatagtcttaaatatacacaagaacaaaacataagtatataaccataaattgaagttagctaaagagaacataaatctaaagatggtaaaggaataatatttcttgatttggcctgcgaatatattgagaaaaaagtttccaacaagttaaatgtatcttatataaagcattaagaatggtatatattaatttaaatataacctagaaaaactatgcaaaagatttgtttgggtttgaagattatccacttaaatttggcaattaaattcaagaaactattggtaaattatatatgccaaaaactaaactggcaaaaaatattgaaatctccggagataaccgaaaaacctaagttttatcgattaaatctaatcatattctctagattttctctgaaattaaaaattattctgatgtctataaaaaatcacaaattccatataaaatttcctgtaatcatatatttttggtttggttaaaatttttttttttccaaaacttgaaataaaactttgtataataatactatgcaatagatttgttcgggttagaagattatccatctaaatttagcaactaaattcaaaaaacaattgataacataatatatctctgtaaactatatatgccaacataaaaaatatttttttctgcaaaataaactggcaaaaattattgaaatcttcgaaaatgaccgaaaaaccgaagttttatcgattaaatcttgtcatattctctagatcttctctctgaaataaaaattgttttgatgtctataaaaaatcacaaattccatataaaatttctacagtattcaattttttttttgttttggtaaataaaaaaacttggttctaaaactggaaataaaacttgaaataaaactttgtataatactacaatgagaagcattgggaaataatatagcggaaaaaacaagagtggggggatgaaatgaggtagctgaggaacaagtacggcgcctcctaacaaaaagggatcgaaaaaaaacaatggaggtgtggagtgtggcggaggcagagaccacgtgctctctcttctcttcttctccttcatcttcttcctctcttcatcatctcccattattaactcttctgaccccactttccttctcctcttctaactccaacctaccctcttctctcttccctctcttaaaaccctttctctctccctcattctcttccatgtcctcctctctgttattctttagctaaacacccacaattctggccttctctgatgcctctttaagccaatttgtatctctgcttccttacaaggtttaaagttttctgcttttgctgattttgttatttgggtgttttaaagttttgatttttatggtttagcaatcggaatttggacttgtttttgtgattttttacttgttgttggagttgggttttgttgagtttttgttatttgggtgttttaaagttttgatttttatggtttagcaatgagaattttgcacttgtttttgtgattttaacttgttgttgaagttgggttttgttgagttttcgacttcaatattgtagaattttagtgggtttggggagtttataatcattagttctgagatctctcagatttctaaaggaactcattattattgggtaatgatgctttcttacttgcaagatctttgcttatgattgcgttttgctttttctatactctttttttcttcatgtgattacgcaaaagcattgctgtcatctttgttaattccaccttgtaatctgaagcatctttgtttgttagattaagcaaccagattaggaattgttttaatattcctgttatgttctttcaagtcattttggtagatagcatcagtttctttgtaaagtgattcagtatgtgtttatggctgttttgtagatatatctgaagcttaaagggcagtgaca

SEQ ID NO: 5461 - DNA, 3000 bp, Unknown
  misc_feature (1)..( 3000): cDNA_ID_3077079_gDNA_ID_1620791_Annot_ID_168307 3000 nt of promoter + ATG
ttatatgtttacaaaacaacttcttctttttttagataagtaaggatttatagcaacggaaaaaaattaaaataagatttttttttgaagaaaattatttacagatctttgactagtttccaacatttgattgagatagtttaattccaataaaaaattgaagaaaattatttacagatttttgactagtttccgaacatttgattgagatagtttaattccaattaaaaaaatttagaagttgacttacaatgaaagaacccaaagaagtgaatttttatggatcaatatcaaaccaattaaccagattggctcgaccaaaataaaggacactgagagggtgtattggaccttacattttgaatgaattgaattttagtgacttttagctcaataagaccatttataacacaagtttttagctcaatcaaatagaaacagaaacaacaaacttaattcgtcattgctcataaaaaccataataaccatcacaaattatttttccacaatccataatccaaaataaaagaagatgattcaacttattaaatacttaaaaaaaaacagaaaaaacccctaagctaagatgtaaagaaaagaagaaaccatcacaacagctatgaatagtttggatactaataaaatcccgctactagatattgatggtgacggtgacggtgacggggaagctgccctaggtgatgaagcggtcgatgatgagacagcctttaccggtgatgaagcagccaccaccggtgatgagtggctaacagccggtgatgagcggctagttggtggtgatgagtgactaactggcggtgatgagtgactaaccggcggggatgagtgcctgacgggcggtggtgagtggctaaccgccggtgatgaaggggttatggccggtgactttgcggaagatggtgaagtcgtaggtgactctaccggtggagaaactgcatggacatggttaattaataaaatactaaaatatatggccttgaatgttttctatattttataagagtttttggtttttgtttttcaaaattttcgttcatgattttagttttctaattctcctaaaattttctcaatcaacattatttttctcaaaaatcaaaaaccaattttttgaattttttaaacaaaaatctaaaactaaaatctaaatcgaaaaactgaatcgaaaatcagcatccattcaggggctatattacatttcacgagaattaattttattaaaaacataaaaatatattataaattcataacattattattcatatgatagatttgaatcttacctggtgttgatgcagccggagtagatacatcttcaaattaaataacaaaacaatgaattaatattaatccacattaaataaacgaataaataataatgtgaccaaaagagaaaaatatataccacaattaggatcaatagggacgttgcaaattttaggcatggcaagagcttttgtatcatcaagtacgaatcccatttcacgactactctctaacgcagagcaaagacacttagggctatagttaagaacggttttgaccccaacacaacatgttttggtcgggcttggatccgttgatccgacggttaagaaggagagacaatcaaccatgctgtatatgacgctggaacagtcggtggagtttgatggttgcggtgttggagccatcgacggtggctgtgacggtgatccaaagtcggctgcatccgatagtgatgatgagagtaatagtacaatagatagaagaacaaaggatggcttcattttgtttttggtttggttagtggttctcttgtttttctattaggttttctttaggagcttgtaacgtcgtgggaaggtttatatatgaaatgtgaagtgtgttctctcaagatgattttttttttttgagagttttcggtagatttataaagatttggttttatccattcgttacattgttatatcttctagtttaaacctttgaaattctgttgcttcaaaaaaaaaaaaaaactcgttagctaattttcgggattcgagtgtatttcaataaaataattaataaattaagataaataacaataatctctgcagtaagttttagtaaataattactcttagtctttactttagaacatgtgaggataaaaaattgatttttcatgtctcctttgtaatttagatatttaaatcttaacggttaactactagattaattttagtttagaacgtttattaataagaatttttgagtataaatataattatttgaattttaaaagatttttgtttatttaagtgcatctatattattatttaagaagtacgtttaatgagatacgcatgaagttggaagaaataacaaatttgtcattgggttaaaaattttatttcatgaaaaatccgtttcaaaacacttggatcctttctatccggttttaaaaagtcgggttcttacgtctaatcctggccattgaattgaattgttattaactgttcaaatttgtagtttcaccctaaaaacacgcggatcctttttatcctgttttaagaagtcggattctccggtctaatcctggccattgaattgatttattattaccgttctattttatcgttccacataatatttcaggcaacgaatcgcattaattttattttattcattgcatatattcgtttatagctttcgaatatatcacttatccataattatagctaatcaaatatatagtttggatcttcatttggaattatcataaattttaaatactatttcttaatttaaataactacttttacggtaaaagctaaacatttttttatacttatgggattcatcatattcactaaacttgaattccacgaataaaatcttgtgctcatattttttgacctaaaaaattattcttataaatccggacgtctcatttaaatctaatcactcaacttaaccttatacattcatttctaaatttctacaaaaatg

SEQ ID NO: 5462 - DNA, 3000 bp, Unknown
  misc_feature (1)..( 3000): cDNA_ID_3077109_gDNA_ID_1620791_Annot_ID_168287 3000 nt of promoter + ATG
tattgatgtttcaaatcttcattcactcatttcagactagcaaagtcgtgtaaaaatcttgagaatctcgaagtaagagggagtttaggataaagcaataaagttataattagttgatgataatgtactataattagctagcataaatcttattcatcatatttaatttctaaatctatatttagcgagttctgtatttatttgttatatattcaagaatattaatggagaaggttgttctcaagttatctttgatctataaattccagaagttacaagattctgcaaaaagtaagtttattctaacaagaacattatcagtttaccttccaaaataacaatactcacagctactggattggttattatcaagcattagtcaataaattataagagagacgagagaaagagattaccatttcttgcatgtgctgattatattagagttataaaatcaaccgatcagagatcctgaaattgaacaagaccacgcgagtgagaacatgaggacgaaacatattataaagaaaattccaactagagattcttataacataatatttaaacgaagtggttgaaaaattagaaaccaaagattgaactaagcagatctcttacaactaaagtcaagtagtctaggaaagcttttccctgtcgttgcaacgacctctcctccctagattggatgctcttctccttcaattaaagtgttttacctcgaggtcatccgaaatcttctcctaattggttggcatgttttgatctacttactgtggtatgcggtcatcgcgtaataatcgtgtgcaccaaattacttttaaatttgtcaatgctttgatttgggaggctgaactaactgtccgaaattgaataacaagccctttcgccaatcaaattcccatcgagcttctgtaatgcctcagtttgatctccttcaacctccattatcgacttttcttctctgtttcatcgattcttcatctcagcttcatgaaatccgtacatgattactctccttgggccatatcttttcttctacctactgttggggttttttgattcaaaattggttctcctttgaagtgtgttgggctacttagctattggcctatgcaacattttaattctcatgtttttagtagaatgtcgtttatcccaaaaaacatagcagactaaaatattttacatttcatattagaattgctatgttataatgtttttaaaattggaattgtttttaataacattttttaaaacaggttgttttaggatgttttaaatatatattgtaattgtttaacataaatatttatttttaaacataatataaatatttattatatccagccagattaattatttcgaataatataattaatttgtttcatgaaaaacaacgtttttattttaatcaaactattatgtgattgtgtgaaccatttaacttaaattatatgtcttttaaataaaaaaattatttaaaaaaaaagaaacaaatgatctttaattctataagacgagattatatggcatgacgggttttggtaaatattaataagagatggtatactactggttgttttggtataattaacaatcaaaatacaattatacaatcttacaaaagaaaacaaacaattaaacaattatacgagacaaagttatatggtaagacgggttttagtcgatattaatacaatacggtatacaacagatgaaatactagaattaacaattaaaatacaattatataatcttgaaaaaagaaaacaaattatattaacaaaataaatacaacttttaaatttagttataaagaaattaacctgcggtgtaccgcgggtcatatcctagtattagaacgttttagtagtcctatgatataagcacctaacagagcatgaaaaaggacttattacataatttagaaaagctataaaggggctctaacaaagcattttgttaatgctatggtgtaatgctctatcatagcatgccgaaaaaacgctatcgtatatgggaagtctaccataacaggggcataacacaacgtttatgaaaacgttattgatgacatataatagctcttctctcatgctaataatgttgatattttttgtagtgttattaagtataatcgcactttagcacgccgttactagaggaaagacacacttgatcctatcaagctacaagatattgacgattgtaatgagtggttggtaggatgaatggatggggaatcttctggtgagttaacagaactggtttttgatgatagtgatttgacatgggaaatggtaagccaagtatctgaaaagctaatgagtctaactattgtactaaaggcaaaagaggactagcatcgtcttcaagtagaactgaaaagggaagaatacagcctcatgctccattccaactccaagaacatcttagagcacgtcttcaactccaatggctttgattgatgaggatgatcaaattgaagaggatttcgaaaaagaagataaggataatgaattgtgtgtggaagatgatgaggaagagttttagagtttcagactcaaagttttatctttgtcggattggattctgtttgttttcatttttatgtttcagagtttcaggctcacggtttagcttttgttggatttgattttcttttttcacacttatggtttaagtttttcttgaattttctttttcagacttttggtttaagttattgtttggattttctttgttatctcttttttagactcacaaattgttctaaaatggctttatgtatcaatgaatacaactaagctattgttttttaagttgcacctcatacggcaaaggctctaaggctcatgcgcctagactcgaggctcaaacaagcacctcaacgccttacctcaccttgtgctatttaaaacacagtttaagcctaccttgaaatagtcaaagttgttcatcagggacaatcgagtgagagtgatatattacaatacaatg

SEQ ID NO: 5463 - DNA, 3000 bp, Unknown
  misc_feature (1)..( 3000): cDNA_ID_3077095_gDNA_ID_1620791_Annot_ID_168296 3000 nt of promoter + ATG
taacttagacatttttttgtatgtgcaggttggaataattattatagaactatcattttttaatgcttcctttattgtatgtagtttattaatatttctttttagttttttgtttataattatgagtttgaacaaatttatgtttgtcttattaatttgtcaaattttataattaattttacaagttactaaagtacacgaaaaaccacacatactatgtgtacaagtacatatactaaatatataattacgtacacaaaagtacatatcagttctataataaattcattagtatacatgtttaaatgataccaatactaaattcataaacttttaaaattagaatacatataaatatttaaagacaaacaaaatacaagttgaagagactatatatcctaaatatacaattatgtacacaaagggacacatcaattatataataaattcaataatatacatatttaaatgataccaataatatattgataaactttttaaataatagaagcaaatatttacagacaaactaaatatattaaattcgtaatatatacataattgagatttgatgagtgattaaagcatggataccgtgcgtagcacaggtactgacctagttatatgtttaaaatagtaaaacatatatcacctttcattataattttctctcgtcatcttcaatgattcacttgtcgtctcctttgattcactcgtagtctcccgacatctactctctttcacctaatattggttcacatataatatattcgactatgaattagttttcgagatatatcgtatctacttttgctttcctatctttcaatacttgaataggttgtatgattttttatattaaagtgaacacaaaaaaaaaaaatctagaaaaatgtttgtcaccatgtttctttgatcatctaacatttttctataaataacaaatctcatatatggacttacttctattcaccaacatcggatttcaacgtcaatttttacactttatctggaccgttcaaatacaaaattattcatgacgatttgcagtgacacgaagaagatgatacataaaacattttcagaaacgacgaagacgatagatttgcatttaatcgatgctactgaaaaagaaattatcaatggagaatagtgatcggacgaagaagacgatggattttatttccgcatggaggagatgatgagccatttgccgacaacaatttctgattcattattttttgaatctacaattaaaaaaaaattgtaatgaaacaaatatttctttcaaggcctgcctaaagcctaactcattattttgtgacactcataatttaaaaaaataaacgttgcattattgggcctaactcattattcggtgaccctcattaaaaatatacaaattgcattattggcccaaacacactttgcccatttagtaaacaacagtttaaattaacttcaataaaaatttgtaagtataatatatctatcaacatgttgaacactatatataaaatacaaaattcagttagattttactgattttgttttggaatttataaaattatgaccggcgaattaaatataaacctcttgtgacattacaaaattaaataaattcattcacacactaattcatatacattccaaaaaaataaaattacatttccacaaatacaattcatcattctttcagaaaatttcatgaaatgaaacgtaaatccctttattattaaaagggaagtacaaattaaaaaaatggtcaaatttcgcctcaatttcaatttcaattttggattttgttcattgttaatcataattgtcaagggtaatttagtaataaatttttattaaatattataggatccgcgtgttaatgactcggatgggttaggagtaattactcttaatcatggattcaagttcctaatcgggtttagcatccatattatgcaatcttaaccttttaacaatttttgtatatttacctcatttttggtatctaaatatgagcatattcgatccctaaaactgcacattcgatcatatactgcctaatcgctcgaagattgaataatttattctcttaaatctaatactaaccataaccaactcttcaatattcaccatttatctaaatatagtcaatcattcaattatattccaaattcgaatatatattgttcatggtatctttggatttactaatctacatatacatttttgcagccactttgtgaaataaatcctcaagttgagacttatttacagtggctgccactgacatttaataattatttttgataattagaaagtaaatctttaaattaaatatttgacatttaactatcttcccaaagactctctacattaactacacgattagttactaaaataaaacttccaaaatatttaacattatttaaaaattacaaaattatcatttttgatattgcttttttgcatgactataacaattcgattatacgcatcaatccacagagatatttgatagcagttaattattacaaaattacaaaatatttagacaatgattcataaacatatcataaataagttcaacattaataaaataaataggtttttttacgggacggattggcgggacgggtttggcaggatgttacttaataacaattgtaaactataaaataaattttttttatagatagatacaatttgtaaacttttatatatactaacttaaaaaaatatttattgtccccgcggtataccgcgggttaaaaatctagttaatacacatatttaaacacattaaaatacattcttctaatcactaaataacaactaaccaatacaaaatcccaatcattatttataaaggattaaataaaaaatattttttgtaaattatgaatataaaacataatcaaatacttaataaaaaaatcatataaaaccgaggcctgcggtgaaccgctggttgaatcctagtttaattacaaagtaaacatg

SEQ ID NO: 5464 - DNA, 3000 bp, Unknown
  misc_feature (1)..( 3000): cDNA_ID_2160140_gDNA_ID_1620791_Annot_ID_168299 3000 nt of promoter + ATG
tgaatgattgactatatttagataaatggtgaatattgaagagttggttatggttagtattagatttaagagaataaattattcaatcttcgagcgattaggcagtatatgatcgaatgtgcagttttagggatcgaatatgctcatatttagataccaaaaatgaggtaaatatacaaaaattgttaaaaggttaagattgcataatatggatgctaaacccgattaggaacttgaatccatgattaagagtaattactcctaacccatccgagtcattaacacgcggatcctataatatttaataaaaatttattactaaattacccttgacaattatgattaacaatgaacaaaatccaaaattgaaattgaaattgaggcgaaatttgaccatttttttaatttgtacttcccttttaataataaagggatttacgtttcatttcatgaaattttctgaaagaatgatgaattgtatttgtggaaatgtaattttatttttttggaatgtatatgaattagtgtgtgaatgaatttatttaattttgtaatgtcacaagaggtttatatttaattcgccggtcataattttataaattccaaaacaaaatcagtaaaatctaactgaattttgtattttatatatagtgttcaacatgttgatagatatattatacttacaaatttttattgaagttaatttaaactgttgtttactaaatgggcaaagtgtgtttgggccaataatgcaatttgtatatttttaatgagggtcaccgaataatgagttaggcccaataatgcaacgtttatttttttaaattatgagtgtcacaaaataatgagttaggctttaggcaggccttgaaagaaatatttgtttcattacaatttttttttaattgtagattcaaaaaataatgaatcagaaattgttgtcggcaaatggctcatcatctcctccatgcggaaataaaatccatcgtcttcttcgtccgatcactattctccattgataatttctttttcagtagcatcgattaaatgcaaatctatcgtcttcgtcgtttctgaaaatgttttatgtatcatcttcttcgtgtcactgcaaatcgtcatgaataattttgtatttgaacggtccagataaagtgtaaaaattgacgttgaaatccgatgttggtgaatagaagtaagtccatatatgagatttgttatttatagaaaaatgttagatgatcaaagaaacatggtgacaaacatttttctagattttttttttttgtgttcactttaatataaaaaatcatacaacctattcaagtattgaaagataggaaagcaaaagtagatacgatatatctcgaaaactaattcatagtcgaatatattatatgtgaaccaatattaggtgaaagagagtagatgtcgggagactacgagtgaatcaaaggagacgacaagtgaatcattgaagatgacgagagaaaattataatgaaaggtgatatatgttttactattttaaacatataactaggtcagtacctgtgctacgcacggtatccatgctttaatcactcatcaaatctcaattatgtatatattacgaatttaatatatttagtttgtctgtaaatatttgcttctattatttaaaaagtttatcaatatattattggtatcatttaaatatgtatattattgaatttattatataattgatgtgtccctttgtgtacataattgtatatttaggatatatagtctcttcaacttgtattttgtttgtctttaaatatttatatgtattctaattttaaaagtttatgaatttagtattggtatcatttaaacatgtatactaatgaatttattatagaactgatatgtacttttgtgtacgtaattatatatttagtatatgtacttgtacacatagtatgtgtggtttttcgtgtactttagtaacttgtaaaattaattataaaatttgacaaattaataagacaaacataaatttgttcaaactcataattataaacaaaaaactaaaaagaaatattaataaactacatacaataaaggaagcattaaaaaatgatagttctataataattattccaacctgcacatacaaaaaaatgtctaagttagtatttcataaaattgtatagaataattactatgttaaagtaatcataataaataatttatacatgtaggattaatctactaaaggttttggaatatttatttgaaaacaacatttgtgtttcttttttctgttttcctttactgcctataataagaaccttcaaccctccttttgatttcactctagacataacgacatataactgtctatttgagaaaataggcttcggaaaatatatatcaatattggctaatgattggccttggcttttattgatcgtcatagcaaatgcaacagataaaggaaactgcctccatcgcattttaaagggttgactatgctacattacccaaactataccgattcttcagtatacaccataaactttttgcttcttttttatacatcataaacaattatttgcctctattaaacatcacaattatatcacaattatagattctcttttaatagcaatatagtgattctaaattgtgatttgatttagtaaaccgatatttgcgtttagaaaactatgattagaataagtaaacccaaaaccactttttttttttcttgcatgaataaaaagggagaaaaaaaataaaacccacgtttaaaacccatcttcttcttctacgtatctaaaatcacaaacttagggtttctctcttcctctcaatttctctggtatggtcttttctctctctttggtttcatagtttctttctatctttggtttcatatagcttctctctcactggttttgtaggttcataattttttttaagtttcgtaatcaacgaaaaagacatggatgacatataacccgacattgac

SEQ ID NO: 5465 - DNA, 3000 bp, Unknown
  misc_feature (1)..( 3000): cDNA_ID_3077087_gDNA_ID_1620791_Annot_ID_168303 3000 nt of promoter + ATG
agtgggaggcaacccactggtttgatttttcttttccctttcttttattttcttttatttttgctttatttttcccgctttctctggatttgaatgccactggggacagtgtcgtttaagtctgggggagatttttactaatgatgcttttatttttgtttcttattttgcagttcatttggttatttctttcctttctttaagaaaaaaaaaaaaaaaaacgttttctttagtttagttaggaatcatgatctatatttctcatgtttattgcctgattgatgagtgctgcaggttcgattcaatccaactattggaaaatctagatggcaaaccaacatacttgaggatatcctagtttccaactcaaccactaaggctggagctaatctcactgctcttccttttacctcttcaaacggttagtattcatagatcttgacttcttgttcatacctgatattgagaccagtgtgataaaaagaatatgttcctctccccttataagaaaatagtaataatgagagattgagacaactttgagatagtgtataggggtaggaatgttttctatgaccccattattatacattatttggaatgatcaattacaaaggttggaaaatgccgagggtgttgatccagtatgcgagttcccctttgcttactctctaaaaagaataagtctgggggagagaaagaacaccgaaaaagaaaaaaaaaatataaagaatggtcaatttatcatggtatagtacatgaatgagtctagaaggatcttgaatgttggcttgtttgatgagacccgacgatgaaagcctggtgggtatagttgtggaacttaggtatggaatctagaatattgtgtaagcttgtagagaagtacatgttgggagttcctttgttttcaaaacctcttccacggattcggcttttctgttttgcttgagggtaagcaaaagctaagtctgggggagttgatataacccgattttcaccgattttatctatgttttaggtataggattttgagtttttatgttatttctcgagtctttttagtgtcttttcaggtattctatgcagtgggacaacaatggagataaggagacattttggagcaaaagctaaggaaaatgaagctaaggacgattttggtccaggaatcagcgaggagtgtcgatcgacacactcatggtgtcgatcgacaccagtttcggtccagcaaaaaccctagacgctatcgagtttacagaaggtcaagtttgccccaggagacttccctatttgcattattagtcactggacgtttttagggtctatacatattgtttttagacttaagtttcttttatcaagttcttttcaaaccctattgtgagagacataagctattcatccattgttcttgagagattcattccaatttttaatacaatgaagagatcccttatttccccttctctatttactgtgtttatgctttcacacttaatcatgttgtttgcttcatccaatatgtctgagaagtctgcttgttaggaatagagtttctcattagggattcatatggtttagtagattgccctttgctaggtgtaacgcccgtgaaccggaaaatcggttagagtttgtttttaaatcatccggttaaattggttgggttaattggaaaccctagagtgtgcctataaaagaaggaaaactcgaacttagggatttagttagccacttttcgttttataaaggagaaaaagatagagaaagagaaggagcagaatcgttatggtttggaagaattcagtttcgtcatatcaaatcgtggtaaaaagtaacgaaatttggtagagttattcccaagtcgtttatcgttattctccagtttacagaactggatttggataaatattggttgagttatttgctgtttagtgagacacgttttctcagacgcgaattaggaccagcatggattgaaactgggatcgtggtctcgtctgttttccgatcggaacgatattttgtgggaagcttcgtgacgtctaaggctagcgtttcaacacagggatttaatagttaacggttagtttatattttagggtttcgtctttgagactgtttgtttctgtctttcatgtccagtttgtttcaaaagttgtttttggttgtgacttgttgtaggacgtttctggactgtttcagacgcaaggagagtctctcctagatttaattattgttagaatcaatttgttaaggtgagtgcgtgaccatggccttatctgagcgattgggttgtgtgatttgttttgtgtgatgatatgtaggtgtggtgaatgtgttttggtgaattgttcagtgactggtttgtttgtgtggtatttgtgattatgccgcttttatttgcttgtgtgtatatctcgtagatgggaggatcgcctcactaagtatttgtgataatacttacgcatctctttctttttgatgcaggtaaagataaagtgtgatcgtggaatcatggcaagaaagagaggatgatctagaaactcatttgatttatttttgtgttttggttattggaacccggttaggattgttagttattcttggttttgttggtcgaattatttatttattcataaaatagtatttttgacttgcggttcaattgttggtttattggttgtttaattagatatttatgggaatatttaattatgtttaaaaaaaatgggtcgggttgtttcaatttggtatcagagcgatcacggttttaggatgtgtagaataattaattgatgaattattttttctgatgattgatgtgggatgagttagggcgttagcataatgaggattgattatggagtgtttagtcaattgtgtttgttggagtcctagcatcatcttctctgagccttaaatgagattccacggtaagttgtttgtgatatatttgtttgttttagtttcttagccatttgttcttgagtagcgcagatg

SEQ ID NO: 5466 - DNA, 3000 bp, Unknown
  misc_feature (1)..( 3000): cDNA_ID_2160125_gDNA_ID_1620791_Annot_ID_168295 3000 nt of promoter + ATG
ttgatccagtcaagaaatatgcacagcctgtgccacttaaacatggtagttggaggtgtaactattgtcataaagtcacaaatggtggagttaaaggtgcaaaacagcatattcttggaggttttaggaatgttactcaatgttctctagttcctcctattatgagggaagaaataaaagattccatgcttaagaaaactgaaattaaagccactactcaaatgatgccacccccagccacttcatatgacgattatggtgaagaagaagaagcagctgaagttttgggaaatgaaagaagacagccacctgtgaagaaacaaaaaggtctaatggacatgtttgtttgtccaactcttcctaatgtattgaaaggtagaaaagacaatagaataaataattgtggagtgtgtgataagaaacttaggcatatagcatgtagtgctattgcgaggtggttctttgatgcaaaactttcctttaatgcaattaactatgatagttttaaggaggctttaagccaccaatcatttatgaactaagagtacctttattgaagaaagaagtcattgaaacagagaaaaagttggtggagcacaagtcagaatgggcaattaaaggttgtttaataatgtctaatagatggcgagattctattgtacaaaagacattgtcaactttcttgttaactcgccaaagggatcaattttcatcaaatcaattgatatttcaacagttctgaaagatgctaacatgttgtacgatcacctggatcttatggtggatgaagttggggaagctaatgttgtcaaagtggtaatcgacaacgcatcaaactatgtgaaagctagtgtgtttaaaatcttttaaatttagctttatgagtttggttttttcatagctgcttctaactcgttttgtgtttcatttatgttctaggccaactatcaatggcaaaccgacctcatttgtattggacgccttgtgctgctcattgcatatacctcatgcttgaggatataggaaagatttcggaagtgaagactgttatcacacaatgcatcttcaagaatgattatatctatggtcacacttcccttgtgaatatgatgagaaaaattcacaagcgatggaaatctgcaaagatcggctgtaacacggtttgctacgtctttcacacaattgggcagtatcataagcagagaaaaaacttgaggaattctgcgacttctcaagaatgggcagattccaaatggcaaaaggaaataggagcaaggactgtgaagaggatcattatgcaagacagtttctggcacaaggatggttgacggagagaagaaaccagctacgagatacatctatgaagcaatggataaggctaaagtggccattgttaaaaccttcaatggtaaaaaagacaaatacaaagattcatttgaaattatcgataagcactgagattgtcaactccatcagcctttgcctgatggctacttcttgaatccgaaatttcagtataatccagagtctggagtgcattgtgaagaggttgggagaggtctatctacacatttgataggttggttcttgctgttgcaactcaagataggttaagcgacgaactagaatagtttaagagtgcttatggactctttgggattccaatggtaataagtcaaaagaaaaaagcaatcaccagctacgtggtggtctgcgtatggaggcacaacaccaacacttagagactttgcaatattcttcgtctcacgtgtagtgcgactggttttgagagaaattggagtgtgttttcacatctccataccaaggaaaggaatccaattggctcaagaactgcttaatgacattgtgtttacgctacaacaaatatccacattgatagcacaccaccaaagctcattttccgtaaatgttatgaaaaatgaaattttattttagatattgtataatagcattgaaacaacgctaagatataatttcactaaggggaaaactaaatcacttattccgccactacttagcccaaaatatttagttaagtgccaatacttgtgaaaaaaacacaataactttgagcgaagaaaaaaaagctctcgaggagcaactatcttcttctccatctatcaatgatgtctctaatctgctcctccaccgcctccgccgctatggctggaccatctccccaaacctcctccttcccctcagccacctcctccctccacctctaattttttcgaccaagctcacccaaaccctaaattacctgaacttttatcacttatgccacttttttgaaaaaactgatctggactgccatcagttaatctgaatgccaccgaaaatgtgatataccagttgtacccttaatgagttaattaaaaaaatgaaaaagaaattcaaaagctaaataaagaatcgagatcctccgttctctctcctcttcgtcgtcgtgttcttcttctttggtcgacgttcatcttcttcgtcggccaccatcgattccggccgccgccgacttgaaatccggcgtaaaagccaacgaattaggtcagtttcttctcatatttcctttgacattggtgtattgtgattttagattgggattttgaattctatataattcccagattcaatttgatagtttgatgattggtttgcaaagtaaagagtaatcgattagaggttgccgaaacgttatttgaggtgatgagcaaaggaatgtaggttgaatgtgagttgaatttgaatttcgagatttcatattaaagatttggggggtttgtgtttgcaaagtttagattaaccaattagtttaacgaataggtatgtattaacattggaaatcaattgaaaggtaacgaattaggttcagtagaatcgagtgcgacgagagattgatttcaacgtatgataagagtacatgtggtataactattaaaatgtttgattggagttgacctggttgtattttcaggagcgatg

SEQ ID NO: 5467 - DNA, 3000 bp, Unknown
  misc_feature (1)..( 3000): cDNA_ID_3077184_gDNA_ID_1620792_Annot_ID_168315 3000 nt of promoter + ATG
cctattggtcactcaactcttcttatttgaccaacgccaaaaaggaaaatgtttttcacaaaaacatctttattctaacaaaaattacttttgtggttatcattactaagtatttttggtcgaacgaaacttgtaatcatatagaaactcaaaccagcttcatcctggtataattcttgaagttcactgtcgttgcaagaacccaaccggtgatgtgggagttcaacaactaagaaattgtcatggaattcaacgataatttcatcaattaccaaaggagataatggaatgtctattctcatatatacctaaatataaactagaatattattatgatattcaagtatatggagtagctacatttcgttgatgtggccaactatgtggatggattgcaaaaaagatgtgatttactttaccagacattacaataaaccaccaagatttgtgcttcaatggatggtgaaggatcctaataacccctttaaatataaaacattataaactgttagacacgttttttcagaattaactaatagtaatgtaagttgattttgtgtttcatgtcattatgaagtaagtcattagagctaggacactgttctaatttcgtgttgaacgtctcataactacatatagtttaatgcttttaaagtagtcctcaacaattatcatagactgtttaaaccaaaccgaccgaaccaataattttagtttttggtttcaatttggttcaaagttataaaccactcagtgaaattctaaattgatttttgttctcggttatatggtttagcacatcaaaactgaacaatttttttgttcagtttagaaaaaaccatataaaaaaaatcctagatttctaatcatcatttcaccttccttattttctaatctcttgtcttcagcttgagatcctccttcttcgttcttttcttatctttttattcaccattgttttttttgaatctttttattcggtgttatgatatttttagcgaaaaccctaaaatttgacgagtttgagtttgttatataacttggactttgattgtattggaattacccaattattttattgatttactgttgactttagcctattattcaaaccaaattataaaaagtctgttattttataattgattttaaatcttataaccaaacctaaaaatcaagttccaaaaacaaaaccaaatcaaaattttattcggtttaatttgggcagaattttaaaaaatcgaaaaaacgaaaaaccaaaacaattgaaccaattaaactgattaaattgaatgcctattgttactttaaacaataatacaatatcatattaagatcaatgagactttgaccatcttcatattcactttcaaaagattttcttcactcatcttcattttcaactactaaataaagattttctcttattttattttcctctatacttagaaatctctatttttagtttacattaacatttagaattctccattttaaaggttggagaaaaacccaactccaaaatagagttattctaatttgaaagaaaattgaacatatttaagagcatcttcaactcatgtttttttttttttaattttgaacttggatttcccaccaatccatttctctgtttcttttaattctataacgaatattttaaatatatattatatttagttattaatttttgttatgagcctctatttattattattataacttcaacccaactattttaatttaaaagataagaaacaaattaccatatttatttttaatctgatcatttattgtataaaaattacattacacaatattaataaagaatttaaaacatagaaaatatgtcttcattctccatttacttctagaaaacaaaactttcatcaaacacgacaacgcttcaaaaaatcacctcatttttatttctaaaataatattgacataaatttgatttatatgaaaaaccaaaatataccaaatctgaataaattaatatcctctttactaaatatgccaaagtcaaagatatttttactttataaacctctcctattatgcaaaaaaccaaattttatttcttacaattcagcaaaattaaaattccttgcctaaaaattaaaaatcatcaaatttgaaattacttttaaaattattactcacgtgataataataatattaaagctgaagaaaggcaaaattcagaaaaaatcgtttttttttttttttgccaggcttctctcactctccttcgccgcggaatcgtctctcggagccgcgaaaggactcttagggttaaagattcttccccaaatctccttctctcttcctcagctgatttcgactccgatcaattttctaggtttcgattcatctccgttactaatttcgtcttttataccgttttgttcgtttttctagggtttaagatcgattcttctgttttttttctgtcaccggaagagcttagaacttttctggtgatttgattgaatttgatgaatatggtttgctatttattaagagttttcgaagttgagattccgtagcgtgtttattgattatgatcacatctttacctgttttcttttccgtttcttgtggagttggagtagttaaagacatgattctcctcttgattttgatataaagtgtccatctttacgaattttcagagatttagtcaagaatttcgtcttaggcaaaagctatattgcggtttcattgtttctcctgaagtcgtagtcttaagatttctacatgatttgaacgagttttattggcgtggtgaaattttcttagtgccgtccatgaaagtttgcttctttagggttttgtatgaaatatttcttctatagactcgaaaaagtgttgagttttgtctcagtgcttgatgatcaaaggttgtttttgcatgcagctgatatagctaaatataagctgatacttttattggttccaggtgtttgaaggcatttgaaaggatgggagacaatg

SEQ ID NO: 5468 - DNA, 3000 bp, Unknown
  misc_feature (1)..( 3000): cDNA_ID_3077143_gDNA_ID_1620792_Annot_ID_168341 3000 nt of promoter + ATG
tttattcctattttgatttcttttagttactagtaagggtattatgtataataaactacaagtaaaagatatttcctaaatatacttttctaatgataaaaagatgccttttttcatcaaagttctaccctttcccacctcatttaatgttcttgttcttcttgtaaattttgtttataataggaggctccataatttccttatataacgtttccataataagttcagtcaaacatttatatttactttatctaataccttacccataaaaaaaatatgctattcctattattgattttctcttcttgacatcataatatatatgtatataacaagttaagtcaaacatttatattactttatctaataccttacccaaaaaaaaatatgctattcctattattgattttctcttcttgacatcataatctatatgtatataaataacatagtgttttcagtcttgaggaaacaaaactaataaaatcataaaatgtctacaagagttaggattgctcttgttatgaatgtcttccttttttggttctcaccagccctaattcgttcggatccaaatatggtgcctctaagaaccttcaaggtcagttttgaaacaaaagaaattagttcaagtgttcaacatcatcgtatatagtcggatatgtcatgaacggagttcaacatctgtttgtttgttttttatttaaaatagtgatcgtttttttttttgtcattggcagatacgtgaaaatgtaacatatgactgcattaacatttataagcaaccaggacttgatcatcccttgctcaaaaaccataaaattcaggttcatgaacgtttcataaatttctctcctatggacattttactcttataaaaattgaattgaatttgactatacaatttattttttgaaaagatgaaaccatcagtttcaagacatgaattaaggaatcaaacagacaacactaaaacatataagaataaaatgggatgtccagatggaaccgttcctatattaagaaattcaaaagaatatattaccaatgcacaacttttcgccgagaagtattttcatccgctatcaagcgaaagtcctggatcacatgtaagcattcaattttttcttaattccttagttataataatttttatatgtatatttcaagtattatttatgtatatatttgtcactataaccggtttttggtaggttgctggagtaaggtcacaaaatggtccatatcatggtgtagatgcttcatttagtatacataaattaaacatcgaaagagatcaggcctcatatgctcaattatatgtaggcagtggtttgaaccatcagatcaattttatccaagcaggttggatggtaagctttacatttttgtattgttttttttgtttgctttatcaactcattaattctctaggtagagtcttaaagtatatcgaattttttttttagataaatccaagtatatttggcgatggaggtgtttggtcatatggattttggaaggtgtgcatgtgaaagaaattatttatggtttatatataagcaaaaatcgttaaatccaatatcatgtaaattttaaatataatttttctagggtgaaaatggaaatggatgttataatacggcatgtccagggtttgttcaagtatcacaggaggttcccatagcccagcccttggaccagccaaaggaagatttgttgcattactccatccatcaggtaatttttcaagatttaaatattttatgtttttcatttttaaatattttatgctatttcattcttcaatttttaatttttttattatgattattttcttatacacaaaaaggataaacaaacaggaaactggtggattacaaaactgatagcaaatgcacctaacatagatgtcggatattggccaaaagaattatttaacctaataggtaatggtgcaaatatggtgggagttggaggtgcagttcaagcttctcatcaaggtccaagtcctccgatgggtaatggtaaatttccgattggagacccaaaggaatcagcaatgtttacaaatattgaagtcttgaattccaactatgaacaacgtcgaatcgattcttttcctatggagaagttgctagatagccccaaatgttatggaataaataccgataaaataaaactactcggttttgcttttaattatggtggtgcgggaggagaattttgtggagtttgacatttgccaatgtaatctttttaaatcgccatttaataaacttattctaaattaataaatatgaaattgttatatatacagttctcttagcgtagggtgaatgtgagaccagataagtgttataatgagaaacataaatgtttgagctgaagtgaagtcctaatctactgagaagtataaataggtctttaggtcattgagagagagtgcgagacattgagagtgtgagaggtgttaagagagaaagctattcatagtataaacttgtattagttgttctgtgagtgataacagagtagtgcagagcaatcctaagtactagtgaaggatattaggtgtattgcttgtagactcttgttgtaaaaacaccatctgtttttagtggattccgaggagagtttcggcccagacgtagctaccctcaagggagtgaactgggtaaacaaagtctcgtgtgttctctgttttgtttctctgtttcttcaaagtcttgttcttcttacaaacactgttgctcgagttttcttaagtacatcgttcttctctgtcttagctctgttcttggttgttttgagtcacattctagaggaaagtccacgcctttagcttggtgaaatctcaacatatgtataattagaaatcgaactaacttgcttgattaaaagttttaaacacatctaaaattcttattcattttggtcgatcgatcgtaattctttccccgtttgatctttggttaagagtctttcgttttatttatg

SEQ ID NO: 5469 - DNA, 3000 bp, Unknown
  misc_feature (1)..( 3000): cDNA_ID_3077592_gDNA_ID_1620792_Annot_ID_168351 3000 nt of promoter + ATG
aaaattacgcaatatttgaaaagtaagaattattgctattaaaaaatcttgatacgattcaaaaaaaattatataaaaaatacggtttttaattatttaaattttcagcatctttacacaaaaaagaaaagaattcattctcatgttcaaaactatctattttgttaactttgtttttgaattatgcaattttaaatatatttcctaataatactagggatgtttgatcttaaaataaaaacaatttggtcttagtcatcaaattttaattttttttgggtttttttttgccgtctatatttattatttattgcaaattatgagaactgtttcatatacaattctacccagaacaatttttacgactcttattagatctacgagagatgatatctccttcttcttctccatgcttttgatagacatattcaatgatcctctttacgtagaatcttgacgaacggctataattgtacatcgttggagatctcatgtacatttacctccattaatctgcaaatttgttaataaatcttagtatctgggactcgaacctcaaattttttggtataaaaacattaataaacctttcgtcaatcaaagggatttccaaaatcacgcaatatccctacctaaactggaaactccgacccaaaatcaaacaaaaatttgaattcaacatccctacctaatactacgtatattatatgaatacaacgtacctcaaatagtattttgtctttaccaatataaattatataattataacggacctactaatatatatacaaaaaaaggttatcgatatctcttctctgtacaagagatcgagtcatgaggaaatgggcccgtaaaagagtaaaagaaatgtacaatgaagaggagacaaagcatgatcctgccttttgctttgatctcttcttttttgtatgggttccactacgttcgttacccatgccccacccacgttttcgacggttcctcgtctttttttggttcttctctcactcttattatacacttgtttatcttttttagattcaacattttaaatagtgattgttgtttgttcgaacttgggtcttataagtcctaatcaacatttaattggatccattagaaacagttctttcattggagctacgtgttacgtttttctgatatatgataaatattacaaataagactagccattttagattttcaaccgtaagtatgtgtagaaatacacggttttaaatttataatcaacaaggtagtagaaaagatagatagtccacactagatatgagtaaaatatatacatcaagtcatattatataaggtgggaactatttgtggttttattataatcgttagaacgatatctcgaatttatttagctcaaaaacaaatatcactagaaaactactacatcaaaatcaataccatttcttacaaaacaatatggcatattgatagaagaatgtacaaatcttcgatgccataaacagtcgcatcagaacagttgcatgaccgtgaccatgcgaagtagtgtacatcctcatcctcacgttcgaatgaacgttctcgtaaatcgttcctacaacacatatccctaaagagagagcaacacatcctgtttgtttaatgattcggccactaaaataaacgtgtagttaagaccaaaaacgtaaagcacacctgattagaatattgatctctaagagtaaagaacgcatatattggtggttttggcggagctaaattccaaaaaccgaacataagacaggtagttagaaatgattttagagtatttgtttttaaaaatgaaatcctttagaaaatgcaatttcttgggacgataagaatgagaagaagacacgattctgaatttttctgaggccaacttcatggccgactttggaaaccgcattcttagccactgaacggcgcccttaataccatagactattctcaattttgttattaaaaatacagccaagaaacaaaccaaaaaagagcacgaagaagacaaaagacttaaaaaaaagtttcaaaaggaagagatttgtgggtgtaacacatgccacgataaacgattctcctagtaatagtatctgtccaccgatgatctaaacgaccaatttggcatttcccagttactatcataattaatcatatttgtcacgtagattcagatgtaagattactaaaaaacatctcaattattttcacaatcttagacttaagtgtttatagcatgtggataagggatcatgatcataagtttatagttatgtttagtgttttgtttttggtagttttagtttcaggcggttttgaaacactttttccgatccgacctatactcattttattttttttgttttatttacaatttaatttacagattagacattaacacatattttcaatttctcaaaattatccaaaatattcatatcttaaagatgtgaaaatttatcagaattagtgaattcgaagtgtaatttagacgatttaaactatccgaatccgatcaaaactatacgattaaaactatccgaatccgagccaaaacggtatttagtaaatttaatattttattccgtatatttctagcaatatatttaaatactcctgcccattacctgtttatacgcaattacctctaatcatctacaaacctgtcccaattggacacttctggcttccccagtcacagcctaaacagagcttgactcaataaacagcaaatataattgcatcaaaacaatactttttttttacaaattttttattccggaagtaaccccaaatggtcaataaggttccaaatctctgaaaaggaatgaggtcacaaccccacgtgggataccaactagccacagtggcacacactcgtaatatatagaaacctccaaggtcattttcatagttctatccccttataagcaatagccacaactctctttgctaattacattttacactcatctcgttctctcttccgtcaat

SEQ ID NO: 5470 - DNA, 3000 bp, Unknown
  misc_feature (1)..( 3000): cDNA_ID_3077139_gDNA_ID_1620792_Annot_ID_168342 3000 nt of promoter + ATG
ttgggcttgagaacactaatatcttagcaattacaatgtctggaagaagaattgggtagaaatggttttgtagagaaaaatatggaaaataaatcaacggggaaaatgtgaacatctttgttttaaaggttttcaataatgtaataagtgtaagtaattagataattgtttattcagcaatggattaaagtctgattagagagggatagtaatgtttataatttcagggaacgtacaacagaaggaagtgtggaaaaaacggtatagagcaataatatttaaaaaaacattctggagtttcatgaaagatctcttctcatcatgaccatggttggctacatcggaagattgaacatctatgttgtgtagtaaccggggtcaatggtgtttattcttgttcagattcagatgagattattagatttctgcgcccttttaaatgtcgattgctagaatcttttggaacagctgtctgggcggatttcctaacaacagcaagagacataattaggcactattttctacccttatacaaacgacaacgtttacacattgtttgaaccataatcgaaatcacctgctaagtcggcgttttgttattgtctccccaggaatttcagaggcctcaccatcagtaatagtctgtggacggtagacatttttgcaaatatgaaatcaaaaattgattgaatttagtcagcgttgggattttcgtcagctccttcttcatttttttgtttgtttaagtttgtataagtttgtatcgtccgtagtttcaggtaatagaagtcgagtttttttcgccttaacctttctggtgccttgaactttagaaacatttttttcattatgtgtcctaggagaagagattatggaaattaatatcaataatgaacacttttagtgaaacaatgttgttagttttaaatgaacctggcagatgtttgtcctatggggaaatcatcttcatatttcttgaaaagtggagacgtatgaggaggggtttgaaagggttttgaaacatggttgacatttattttcttcagtttttataatgatagttctactttctatagacctaaatttaattggcatcagtttaacgtctccaacaccggatggctaacgtctccaagatgttccgggcaaggcagggaccacttgccgttgatggacgacaaagatttagatagagggacgtttccaaaacgtctcgagcaaaaactggcgtctctataaagtaatgacgttttaagaatcaagtgataatattggtagtacgttctaacatgtcaaatcaaagtggagaaaatttatgatgaagttatgtctttttattatatttttaacatctatttcatttattaatttggaatcatgtacaagaattgatactttaagagtacattgctactaagcaaatcaaaatacatatccacaaatacataaccaatcattcaaaagaatgatggagaagtgaatttccacgatgtatcgataccgaagccttgctcgcaaacaaattatgaaatctgtttctttccctatctatcgttcatgggagaaactccatagtcgactaatactcaatatcttttcttatattgattcgtctattatccgtgaacttgttatttctggatcccacattcgccgatcgatataccatatatatcctaggaatttttactcaatcccttccattgatcgggattgtggacattggacattcatgaaaattcaaaagacttttcacggagagaacaagatgaatcataaaaccaacaaactccaatgaacttgaatgaatagcctctccattcggaggaaatggctagaaacaaaatcgtctccgctttctaacagcaaggtcccaaatcgagactttatgaacaaagtgcttgaaaggatgcaaaataataccttctgatttcgaatttggtaatggcttgacatgaaaattgtgatcgaattttcaaagattttagccaagaatttcgtcttgtcaaaagcaatattgcggttttattgtgtctcttgcaagtcgtagacttaagatttctacacgatttgaacgagtgttgttggcatggtgaaattttattagtgccgtccatgaaagtttattttttagggtttttgaatgaaaaaaatcttcaacagactcggaaaagtgttgagtattgtctcggtgtttgataagtcattgttccaaaacgacgttaagaaaatgacgtatcttaccgttttgttgtagggtcacaataatatttttggggtacttaattgatctcaaaatatcttgatctatagtcagttaaatgtctaaagatttctatttcgaatttcatatatcaaaaactgacattatgaagacttttattacgacattaaattgaataatatgtcatttaatcattcaaataattgaaaagttggcaagacttaaaaccccataagtctttttgacttcttgttcttcttcactctcctcttacgtctcactccatttcttccgaaatctctcacgacctctcccttaatttgcaccaaagaaagcttcttccatcgtattttaaaagtaagttctcccattataattcttatacttctttcgttgatttctgaagaaatttttgtgttcctgatttttaaatttttggtattggtcaagttgattaatgctaaactctgagcctccttctgtttattaatattttcgttgatttctttgattacattctatatattgagtattgatgtttttttttaaagtatgaaatataaaaattatttcttctatatttatgtatatggatttctgaagttgtgtgtcgatcacgttaactcttatgtatcaattaataatatgatgttaaaaaatggtgtattaatgtatagacaatattttcactagaaggataaaaagtttatcaagtcgtttattgattgagtggtttactttggattaaggaaacaaagaagttatttacatccatg

SEQ ID NO: 5471 - DNA, 3000 bp, Unknown
  misc_feature (1)..( 3000): cDNA_ID_2150666_gDNA_ID_1620792_Annot_ID_168340 3000 nt of promoter + ATG
aagatctctacgagtactcgaattaacgaacggatcttgcttagaatgtcgaaacttgacgaagaagcagtaaaggataaggtcgagatgggttccaagggatcgatatcgacaaggttttgcaagtcctccttgcagagcttgaacacaaactcttagggttaagagtcctcctatctaggctttacgctaagctctcttaaaactctttattcaatgatcaaaaactaatcaattctacaacgctaagattctttaaataagaatagagaaaccaaaatcctaatctaaaaacatatatgtatatactagttaaaagcccatataaaactaaaatcccatataacataggtgacgctgcatcacatagtatatacactttaaatgttcaaagcaaattgacccccctaacaaagcattgcctctgccctgttctcaggcttatcgtcactcatttggggaacaaagtaatcaaagatgagatgctttcagattcaaaagagaagaaaaaagtattaatcctaaggataatactgtcaccacaagactcaaagcatccattcactctaaaaaggcgtcagtttgtggtgcgaatgtgctatgctatgacagtaaataaaagtcagggaaaaactttgaatagagtggcattgtatatgccaaatccagtgttctgccacaatcaactctacgttggtttgtcaattgtcacttcgccaaacagtttgagagtcctagacacatctaaacagaagcaagatatatatgtgacgaacatagtttacagagaaggttttaatggtctaccagcaaccgcaagtaagagaatcacagaaacaatagacaaaacaataacgagtttgatgttcaatatacttttcgaaacttgagacaaagaaactaactattctctatatactcttatgcaggtgaaagaagtgacatagaaaacaaactaacaaagtaacaaacactttgagaaactgattaaacaaccaatgagatatattgaagaaagtgagaaagtggaaagtggaaacaaattaacgaagtaacttctttttttggacatataaactatgaagtatggaaagtggaaactatcgcctatactcgcaacaatatcttgccatctccccatttatgaaaattaactttttcaatcaaaatttacaaaaataaattcaaatgtaaattctaaaatactcaaaaagctatcagattcaattttatactcacgtaaaactcatcaattgttttttctaccacctgaatcattatagaaataaaataggtaataactgatataagtacacattacgatatcgtgaaggattcaagtttctacaaccaaaaataaaagaaatggcccaagaagaggtatagctgtacatgtataagttcatcaaatcgttaataacacctctcatcctctattctttttcttattctgcctcttattctcatcccaaattgctgcttaaatcaccatcgtgaacatatgaatttctcagacaagcaaaagcaccaaagaaacccaatgaaaaatacataaatacactttggaaagctgatttataaacatacactaatgtaggtacacaaccatttaatttgttattcaaatcaacaatatggtttattcaacacaaataattgaacatgcaaactaataacggtttccaacattcaaatatcattagctaggtgaatagcaagatttccaacaaaagaagtgtaaaacgccagacaaagcagcaccaaagctaactatttttcaaatgctttaatattttctccactatgtatgatatattcgttacaagtttttcagcagctatttctgaatatatcatccatgaaaaatatgcaggtagtaacaacataatccacccatctcccttctattcctgagtttttatcaacaatttataaccaaaacaaaaaaaacatgaatcactaaattttgttatatacttacgactttcctgtagctgctactagatcaaattccacactcacagacatattaaacaaaacatgtcagaagctgcacttcatgataaagatagattgatctctctcttccccaaatatcatcaattgttaacaacatccaccaaataaaatgactttacttaaattatattttaataatggtattttatgtaatatttaatatattaaaattatttacttacataaattatatatttttattattttatatattttcaattaatagtgaagatatatatataatctatatagtgaaaaatcaaaatattaatatctataagagttaatatataatatttataaaatgaacaattaaatttgatatagatatatatatatatatataatattaatcaatattttcagaaaatagttaatttcatcttttagaatttgttttgtaatcttcaagatctatattaaaagattttatgaaaatataataaaataattactacttcaattgattattttgaaatacaattatatttattcctattttgatttcttttagttactagtaagggtattatgtataataaactacaagtaaaagatatttcctaaatatacttttctaatgataaaaagatgccttttttcatcaaagttctaccctttcccacctcatttaatgttcttgttcttcttgtaaattttgtttataataggaggctccataatttccttatataacgtttccataataagttcagtcaaacatttatatttactttatctaataccttacccataaaaaaaatatgctattcctattattgattttctcttcttgacatcataatatatatgtatataacaagttaagtcaaacatttatattactttatctaataccttacccaaaaaaaaatatgctattcctattattgattttctcttcttgacatcataatctatatgtatataaataacatagtgttttcagtcttgaggaaacaaaactaataaaatcataaa

SEQ ID NO: 5472 - DNA, 3000 bp, Unknown
  misc_feature (1)..( 3000): cDNA_ID_3077156_gDNA_ID_1620792_Annot_ID_168325 3000 nt of promoter + ATG
cacttctcagcttttgtataagctcagccctaacctccaacggtttatatgtccgaggatgaccatggtcgttgacgctccaatcaacgtgcgtgaccgtagcggatacacacccttgtgggtctcgcatgttaaggagagtagggaagtaatgttcttcggggtaacatatgtcttctcttacgcatgacttgttaaacttggaccatatctccacgtcactcaccaccatcagcgcatgggctcgtgtcaacgtccagaactgtgatcctattcggaactcctcgggtggtacctcggggaacatcgcgtagggtccacgcgctgcccacctttcgtaccaccctggttcgtctttgagaatttcgatgaagctctttgtggaggagactagtgtcttgtaagtgaagttaaaggagtgcaaaggaatgcaagaaggggagagaaggataaacatgtaattagacgggtcctcgagaagcgcatgggctagtaaacgacgtgcggctgagatgagggttggggtgtgcctgtaagccggttttgaggatggtatgatccggttttgaaatgtgccgtgagaacccggtttgtgtttttgagtcgggtctacatggacgtagacattgtaaagagacttgtgatgagagctttggttgaaaaaaagctcccaaagtggtgcaagtggaagagagttcgttgttaagaacatgaaagctagttttttgggaaatttaggtgaagggtttgggttggctttagaagcttgacgaaggagtaactcatcgtgatccagtggctgagatgtaattacttgaggagatgtgaggttattattgggattttgtattattaagaccgccggctgagtgacggccacagtgatggctagtcgaggactcgtcacggtcatgatgacacctaagggcacgcagacgagtagaatgaaatataaggccaacatttttacgttaaatgacttttttttaccatctcacaatgtatcatctagtttagctatgaatattaagagttaggatttataagctattttattttgataacattttcggtttctgacaagaaaaagggaaacgtagatggtatgggtttcacattgtttgtatgataagaagcattatttgttttgtggtctttttatggcccatttggttaccaaaacgtgatccttggttcttgttacatacttgatactccttacgatgctttattcacattttatcttctccatccttttataaatttgattgttttttcttcgaatatgaatcattcgaacctacaatcacaaacgtgtataaccatcaaagatcgaaaaagataaggtattacaaaagagagaatctaaagttaagtatatgatttgttgtgtgtcttcaaattcaagtttgtcagatttaaacagtctataagaaaattgtaatattgtaagttgaaaccataaatatagttcgatttttgttaatatgcatgcaactctgaaaccctactgtagttcgagatctatttgtggtgaaagttttaactttgtttgatttttttttttttttgcttggaagaatctgcatcggtagacaacgtacctacactacgactaagctagaccactaaagcctctttggattcgtataagatcaaagtatactcgattttgatgggatcattggaccaccaatgggccgaccatgtgaggtttaaattgtttctaagcccaagaaacatcgaatgatcaacaagaaattgatttgtggattttcataacacttcattaccggaacaagtgcgacctcaatgacacataaaccctaactctcactatttaagcactaattttcactatttatcattgaaagagaaagagaaataaaaaaaaaagctaaactaagaagaatgacgagcatgaccaatctttcagcatgaaatctagaaactgattccttgcttgaagtttaagtttcttagattgacatcattgagcgcatcagtgcgatccacttgcaaaatttggaacgatttatccaaaactaaaactttttgtaaagcaaggaagcagtttttagatttcatgctgatggattctagggttttatcaatgaaaatacatctctatgaaatccgtaatgacgaggaaacttcgtttatccatacataattaaagcaagtaagtatgctcaaccaccgcgacattttggagattaatattgttcaaatacggattacacgttttctcaccatagtaaaatggtaatgaaattttgtggtatttagtattttacgagatctcatgggtcaaattatcattttttggtgaagtttggtgaccgtttcaaagatatcacacgttttttctgtatgtggtttctaaattattcacatggagttaatgatcttaatcctactaaactttacaaacagagatttcacaactttaatttctccaacaacttaggaaaacatgtggaggttaacaaaataagaagaaaaaaacaagcaagaaaacaagggacaccttattttcactaagtctctttaccatttcttagtatttgactttgacaagttcttgaccaatactaccactctacactatatttgaatcctctctagaatggatttttcattactctaaaatatatctataatagaatttcgattagattttttcttttatataacttttatcttctctaaaactaacttcttccacacgttatgacacacttattccccaagctaaacttagtaaatgcctaccttgttaaatcctctgtattataggtggaaatctcttcttcattcgtcgccctcctctgtctaaaacaccaatctaatctttctcttcccttcacactttttgccaaaacgttttcttatatacacacaaaaaaaaaactcaaatttgtggagaatcgtttactcttttcttcttgtatatctcttgccctaattctaattacagatttttccgtagagacgatg

SEQ ID NO: 5473 - DNA, 3000 bp, Unknown
  misc_feature (1)..( 3000): cDNA_ID_2150625_gDNA_ID_1620792_Annot_ID_168329 3000 nt of promoter + ATG
cctattcgaacttgctgagtttaaaattttgtttactgcagctggaatgcaacatatgagagcttgttgggtatgaacaagcggttttctcgtccaataccactccctgtaagcatttttttctcagcaagtttacacattctataaacatgattaaggatttgatgatttaataataaactgtggcaggaaatggtggattttttggtggatgtgtgggagcaagaaggcttgtatgattgatttgcaactctttaaacttaatttagtttcatcttttcttttatgtgtgtaatcaaaagaagaacttggatttttagacttggcttcctgaaagtaaaaaaacgatttagacctttttttttggtctttgtgtaataatcatttttttacacacggaattgtattattatgacaaagtggttcagctattttctaagtgatttctcaagaaaaaattccaaatcaattgtttcatcttttcgtttatgtgtgtaatcaaaagaagaaaaaaaaatcggaacttagaatgttagactttggtttcttgaaagtaaaacacaaggaacaaaaaaaaaaaaatcgttttttttttgttttttgtgtaataatcactttgttacgtcgatttttgttacactcagaattgtattatagggaccaagtggttcggctattttctaagttggtcggtgatatgtatttagttagaatttggattatataaaccgatggtatgataaagttaagatctgattatgactttttggatgttatgtacggtacattgtacctataagatggttaatggtgtgctacaaaattcgaccaaattcaattatccgcgagaaagtgaattctttttcgaattgaagacttctgactatattatcaagatgacttttattttcatgtctacaacgtcattttcagcttcatcctttgttgtcgtcgctggattgaagaataacttaaacataaatacgtaagctttattgatattattgattgattggcaacaacaaatcaaacacgatgaatgagaaatatatgtacaattgcatgtaatgtatttttttcgtaatgtaacttattaagcgcaatgtgtgttttcgaaaacgtaagctataaaaactgcaacgaaataatcaataggatcaaagatattctcctttggaaaaattcaaaatttcgaaaaagtgtgcgatatttcgacttatgtgctataagttgtaacgaatctccgtttattgtagatatataccatttttcgacattatatgttatagattatgttgttatatcattgctctactagctagtactatgatttttcttccttacacctcttaaacaaatcaatttggtgtgttaacacttggtgatttgctagaatctgttagaatagacatgaataatacataacagccatcatatcgaatgggcgtgttatgattcattacaactagaataatacacgttaaagattggttaattcactcaaatggcggttttgagttagaagtccaaaacttattatgatttataatcaattaatcaaactaatttagtaaaacaatgagacgttcatttttagagtgctacttcttattttcaataaaaccctcgacattcgttttagtatctcaaacaaacaaataatttatgtctgtcgcaatcatgttatacgaataattcttctttcaatcttaaaataaataaaaattcaacgaacttaacctcccacggtttcgtcaacaatttttatcaaacaaaaaaaagaatggtgtgtcaacaatgcatgtactcgaacctttttgcttccttcaatgtattcagccacttttgtcaacttttaactctcactttcattgcattcagacaattatatatattctttgctttccttttgaaacctcaccactgtcaccagcatttgcatttatttttctgacaacttgtaaaattatgacgcaacaagtgatcatcataatatacatatgtatcaaaatatcaagtaaccaagaccataacatagaatttcaagtgcatgacacaaaactattgcttagaggtttttgtttggaaaactaaatattccgttagttttgtgttggacgttttgggtgtgattggtaacatgagttaccatgtgttacgacgtgtacatatatcaccgttattgacacattaatattaaaatgaacttgaaaataagataaatcttatgaattttatctagaaagagtctcatactctcatggaaagttgaattctttaattatcaatattaataataatttaaatataaatgatgtttttatatataataaaccatattcaaaagtatatatataaaatcacatgtacatataactctgaatatatcttacaatatacactatttcaaatttttagtagatataaaacaaaagtttttacttttttttttcatttcttaaattacgttagaaaatttagttttctatcactttatggaaacgtaattagaagcttggagtgaaaaaaaaaaacataatgaatgttgagaaaaaaacacaaatatttaatggtgttttttcataattaatattaaatagtgttttaagaagaaaatccaaaaaattatcatatccaccacactattaaatatgtcaaacgaaacacaaatcaaaagctaagatcttttgaaaagacatctaaaatatacaattaacattggatttggactatgttatccatcatcccctacatcattaaaaatacatgttactatatacgcaacacttgctcttaatcctcaaataaactattgcccatgttgctactagtggatcatcctttttaaaaatcgacatctctcaaatgtttttgtcaacaatgcatgtattctcttccttcaatgtattcagtctttttcgtcaaaccacatttcaaaactttacgaatttatttttataataatgtttttgatatgtttcattataaattaaaaatatg

SEQ ID NO: 5474 - DNA, 3000 bp, Unknown
  misc_feature (1)..( 3000): cDNA_ID_2150660_gDNA_ID_1620792_Annot_ID_168338 3000 nt of promoter + ATG
tccatctcttgatctcttcacgtcattcaccggccagctcgagctccggtgaaatcatgatgatttgtttttgctgctagcttcctcttcacgtaccaaaagagcatgaagaggaagcaaccaaccacaagtagggcaaagatgcctagcaagatcaggtagaactgtcctggtgagatatgatccgtaacatttggtccgtccatctacaaagacatatacaaaaaaattaatattaggctaatggattacccctttgatatttaggtgggggtattggacgcatgaatttgatatactttaatagaatcttaaattctagtgttattcaattagacatttcacaaattcttttaaattcttgtgttatttaacttgctcatttcttaattctattaattgcaattgttattaactttttcggtagttttgtgtgacaacgttacttcacaagaatttaatagaaaaatttgtctcaaatggtttatgcatgggttcacacacaagaggtatagcgatggtaggtgtttttgtttcaagttcatttcggtaatcttttaattttgcctttttttttaatttacttatgttttgctcatatttgtcataatgttttttttactttaatttccttaattataaaaaactaacaaaaaataatcaaaaattacatatcttaattttacatgagttattggtcaattagattttgacatgtatgaaaatatttattttaaaatattttttagcatggatattaaccaattacaattaatattgaaattcaaaatagcaatataaatgacttaccattgattgaattagataaaaattgtatttatcgtaataataaaatatttctattcgtaaaatcaaaatacaaaaacctacctaataaatgtaaaattttaattatatttgaatcactaataaccctagtggaagatattttaaattaagagaaaatcctaaaaatagcattaaagcaagttttactgacaataatagcacatattccataaacttccaaaaatagcactacttgacttactataaagtttttgttctaaaattataatcactaattttgtttttcaataatatcacaaatttttatataaaatctgtttaaccaaaataattagaaataaatttaaaatattatatttgggttctttatttccaattgtgggtatatatttgaaccatttaaaaaaacaattttattcattttaatattagtttatggtattatatttgggttccctatttccaatttagggtatatttttgattcaatttaatattacattagtggttgctctcatttttatttttttatcttatattttagttaagtttaattgaactttatagtactatttgtgaaatttaaaaatattgtgctaattttggaagaaaaactttttttggtgctatttttgtcaattgccctttaattaatggcatgttgacatcgagttttgcttatgaagttttacctaggtcttttggtttcgcctcgtattcattattgtgcattatcagacaccaaagatggagctagtcatttattaattactttgaaagtatctaaataaaaataaatacgagaaatacacatatttttcccgcatttttttttgacgagaaatagatttacaagggatttttaaagggttttataagatttacaagagattttaaaagggttttaaaatatttacgagagattttaaaaaggttttaaaagatttacaagggattttaaaatggttttaaaagatttacaaggaattttaaaggactttaaaagatttacaaaggttttttaaagatttttaaagtgtttaaaattgttttaaaagggtattaaaatatttataaggaattttaaaggactttaaaagatttacaaagttttttaaaaagatttttaaagtgttttaaaagatttacaagtgattttataaggttttaaaggatttacaagagatttttaaagggtttaaaaatgttttaaaagatatacaagggtttttagaagatttttaaagaatttacaagaagaccctttaaaaactcttttaaaatcccttgtaaatcttttaaaacccctttaaaatctcttataaatattttaaaagcattttaaaatcccttgtaaatcttttaaaatacttttaaaccctttaaaaatctttaaaaaacctttgtaaatcttttaaaaccctttaaaatctcttgtaaatattttaaaacctttttaaatcccttgtaaatcttttaaaacccttttaaaatccaatgtaaatcttttaaaatcccttgtaaatctatttcccgccaaaataaatttacaaggatttttaaaagcatttttttgactgagaaaatttttgtgacaaaaaaaagatttggtgaattttttttttttggttggaattttgttttttggcaggaaaaataaatttggcggaaaaatttcagtttccaattacatgttcctattaaatgagggtaatttggtcattctgtttaagggaaagagtatttttaaaaatggacaacacaaaagggtattgttgcaaaaaggtagtaaaaaagggtagttttgcaaatctccaatgacactatagttttaaaccacaatagactaattgctttattcaatataatttagacatgagttctaactaaaattcaatttaataagatacatatagtttccatataagttatcttctatacttttatgatcgtctttactattatgaaaataaatttccatataatatttttctgagtaaataaataaaaatatttgtttgacacaggtcaaaatctgagatcgataaatttgacatgtgtcacgatactaattttgaaaaccgtactttataataaaagtgtaacatagtaattgagcggaaccttaattacagacgagaatacaagatctctacgagtactcgaattaacgaacggatcttgcttaga

SEQ ID NO: 5475 - DNA, 3000 bp, Unknown
  misc_feature (1)..( 3000): cDNA_ID_2150649_gDNA_ID_1620792_Annot_ID_168335 3000 nt of promoter + ATG
aggtgatcatcaatcctagtttcagacatcagttttggtctctacagttatggaatagttttccttgtaagttgtctgtctatcttttacctgtaactgttgttagtgtcaggtgcttccaaagaagtgccatctcatggaaaattgtatcaaccaaaacacaattttgactcattgagatttgtccttcacagtaaaaaaatgttatagatttttgtagactcattaataaaagcaagtgttcatgcgccattgtatatttatttagttttggttaccaagtgatgttccagtggtaattacattccattgggcccaaataaacttcacaataaacaaatatgaaaaaccttttgtttcttgttcaagaaactcgacctaagcaataccagattctctaaaacaatacaaactgggttttctctcttatgccaaccttttcctgtcttgagtgaaaagcctagttgatacccatttaaacaaagatctataaagacaaaatttgttgaaaacttggctttccattaacaagtaattatttctttcacaatatcatactaaagatgaattatacgtatatttgtcgtaaataaacggagcgatatatcatagagaaatatcctaaaatagcactcaaacaagtttaatggacaattaaaataacattgtccacaaatttgtaaaattagctttagtgaatttactcagtaactattttataattatataaattaacaaaattaattacaatttgaaatcacgattaatttacaaacaatcgtgtgaaacgtcaatcgaatgttaataactttatattagttttttactatgaatttgtgtttttttagagttttagagattgtgtgttaaatttagtaacaaacttactttcatgctatttatgagaattgcatatttctagaccaattttttattattataattcatataattattcttgaattatttatgtgctatttgtgagaattaccaatttctagaccaatattttattattattcatataattaaacgtttattgaattattttagctctaaaaaatataatgaaatttagaattgttatagaaactttaaatgactcaaaactgatctttgtttttttgtcaaccacacattaattaaaaactgatctttgttaaacatctaaatattgaaaaacaaaaggattaccaccgcacctatcctgcatcgtcttgtaccatttgcattcatcagagccattatatattcatgtggctgtcacatccttatatacatttcaacttataaatttaattttgtacgtttagcagatgttggtgaattcatttattcaagcttaaggtttaactcgttcttgtctcctttaggttcataacatttaatggacaacaactactccaaatatccgtggactttaccacgcgacgcaccgacaattctctagccttttcattaattgatcagtaaaaacacttctataattttaattattctcagaaattttaaccggtagtaacataaacgtagatgatcgaaaaagatgaaatcgaggtctctgttttgtgtcgaattaatagatctataagaaatcaaacaatgaaaattaaatagatgaatgaaatatgttttgacgacgttttcacgtcactgtttaagttatctgttagtaaaatttgatagcatttaatttgaattgctatgtaactcggaataaattcgacggcaagaggtgtgggatgtgatcagtcttctaattaagtgtaatctttacaaaaaatcagtatgagttaatacaggtttataaatagaaagacatctacagtaaaacctctataaattaataatgttgggactgcaaaattttattaatttagaaagattttaatttatcgataaattaatatttattaatttatagagagattttcgtaatttagtaacttttcaaaaatttctataaaatttttttcattatagaaaatatctttcaaaaatcaattacaagtaaataataatatcatgtttagaaaacaacaccaaaagtttttgataaagtaaaatactataactaaatttaaataagaataaatacaaattttaagcaaaaaaatattagaattatatttcaaaataatttcttacatataatgtatatatagttgatatatttataaaattattaatttatgatattgatgggaccatatatttacataagattttttaaaaagttattatcttattaatttatcgatttgtgtcactttttacactgatcccaactcgggactggaagaatttattaatttatagaggttattaatttatcgagtattaatttatagaggtttaactgtatatgaataattgaatacacatgggacatcattatagttaccttagtacgattttatgcatttggttaccaaaatccactaggcttcgtaattggttgtgggtcagtgtccattcgatagtttgcattagcgataaacacttaaaacagtaaaacgtgatctatttttaaacaataacatttcttcttatcaaatattcacataattaatgaagaaaagagacgaattgataggcaataagaaatatgatcacttggtaccattgtatgcatggtatgaactgacatcaagtatttgtacgttgtagggtaattattaacattgtagaatgacaagtatgatcaaatggaaaaggattagttatatgtagcaaaactagtatttgtacttggactatcttgtcatgtagttttcctaacgctatatataatccaataaccccatgacacggaagagataggggacatacaataaatatcagtagagaggacgtgggaaaagcagagagttaagtgagtagttggagatagaaagatcagagacgaggaatctctctcccactctcactttctctcctattcttagttcgtgtcagaaacacacagagaaattaagaaccctaatttaaaacagaaga

SEQ ID NO: 5476 - DNA, 3000 bp, Unknown
  misc_feature (1)..( 3000): cDNA_ID_3076908_gDNA_ID_1620793_Annot_ID_50482 3000 nt of promoter + ATG
gaattggtctgcttttcagtgaatttcaaagatattctaatgattgttaacaaaaggcttttcgattgagtgtggttttataaactgctaaggagaattttggtatcaaagttagatacccctacacggctagtgatgaagaagacaacactaagaaaaccctgtgaattgtgaaaaagatttgttacctgcattattgttccatcactatctcacaacataaaatgtgtaagaataataacaaaacgtcttgcgtctccaatctccaaagctaaccaaaaaaaacaatcagaagaagaggaggaaagaggagtagagacgccaatagatctcacggactctcacctattgttaaaataacgccaataatttgttagtacgagatctagtaatagtagttttatttaaatacaaaaccctgtgaaagagatttgttaacttcaaaattgtacttttatttaaatactaaactgcagtaatagtggaaagactgaacaagagatcaaagtaagaatcagagcttaaacgagattatgagaaatatgagaacatgagacctgcacgattgaatgatgatgagacatgaaagggtttcggttcctttttttttacataccttaaatgttgtctactttttttttttttttcaccaaattcttatattaaaattaaaaagatacatgaagattagttttcatcggacaaacccgaataacaaacccgaataacaagtttgaaaattgaaaagttgaccaaacataactcaaacatagagacactagctgaagtaagtttgataggagaccatgagacgtttcgaaactaactaacacaagcatgcccatgagagaaatcgtaaacaacacaaaaacctcgactggtaagaaaatagtcaccgtaactagtgacattaaaacgaaattcaaaccatcaaacgtggttctaggttggaaacaacgtggatttgccttagacgcagacatagagacgtcggagaagtattcggtaaacaagcttcgctgacgatgggtgagatccaaatcaaaaaatgtggtactgaatcgggagtgaaatgggcctacaggagaagtatccggcgtaagcagagggaacccggaaaagtattcggtgaactgttgagagatgaaacgggaaaaggcaaaaggttggcaaagggagagacaaatgtatcccaagacgatgaaggcagatgatgagcgttgcacaatattaaggcagaccaaaataatatgcgtacaacccaataatcttaacgagcctttacgaaatctagaagttcccaagatgggacaagcccaatttaaagtcttcttccaaaaatgtgaagtgaggatttgacctaatccaagcgaggccaagaacaagaggcggcgacagttgacggaggtgacaaggtcatcgaccacaaagattaagagagggcaaagatcactagaaagaggagacgaggagacaacaaccatcagcttcacacataagagtcgattctcgtggctggggaaggagaggagaacagattcaacaacgaagtagccgctggttcttccaataggaggtggagcatgtcgggccggtgggccaaagatcttcagaaaagagatgccaccagatctgcactcgacgagatgcaacaacgagatggaaaatgatgagaggcggaaagacgggatacaaacttgaaaatttcgggacaaaacgcgtttggattcttcgggagatgagcagagaatcaaaaagaagacaacgtccgacgccgacgagccatagctacaccagcgtcgaaagacagaagtttttgaagtgtttcgagaatagcgtctgggagagtttcaacttttatggttaatggtctttttttttattatacctcttttataaggttttttaaagatttcttttttaataagtttttttttggttttaaaaggttttaaaagttaccataaagatgactaggggtccaaacctccataagcccgcatatacatcaaggagcatttttgaaaaagatatttttataaatattttatggtaaaagacgtttttgaaaaaagtaccgtgaaaaggcatttctcaaaatattacaaacttataatcattaaataatttcttttagtattttagtaaattttattcattgacttttaataaatccatgccaccacatcaatgtgtttgctttttttgatcgattgataaagaagactcggaaaaaactctttttttttggattttccatttgcataatttttagattatccaattaatatacaaattatctgccatttggaattatacttatattaataactatcgtccaattttaaatttcatttgctctacaaacttgaaaaaaaaaacttgaatatataaccctaaaagtagagttcaaatgtgagcatccacattagttatttttttcagtgtctattgatgattatttttaaatatcaaagaataaaaaagcaaaagaaagaaatatagatgtctttaaaatgaaaattatgtttttctagaactatttgagacatctatttttgaaatgtctttacttttaatattattttatgtgaaaacatctgaaaagttgttagaatgagaatggtctaatattttcaactgcacgcttatgtaattgaaacgtcaccacagcgccaaatgctctataaataattaaatatgaaatcgtcacaacacaaagccacaacacaaagccacaaaacaatctctatcttatccatctaattttctttggtcatcactatcttatccatctctccctctctaattcatcaggacagagcataagaattgaaggtaatcctacggatctcggcttctatgatgttgcaatattgtagaagaaactctttaaattctcgaatactttaattttaactatatgtgttcttaaactaagaatcaaagtaagtgatcaaattcaaaattgtactcttttttttctgtgtaggtagcaaa

SEQ ID NO: 5477 - DNA, 3000 bp, Unknown
  misc_feature (1)..( 3000): cDNA_ID_1840419_gDNA_ID_1620793_Annot_ID_50484 3000 nt of promoter + ATG
tggagaatatttcaataataaaaccatttctgactagaattaatataaatcaatagaaggacgtaaacatcactcaaaaaatgatgatcgatattagaagaaactgtagtgggtaccaagaaaattaaacatacttgtcgtcggcacaaaatattttggattgtgaaactataatgccttgttttagaaagatgtgagagaatataaaaaaacttatgtgttattcaattatagagagatgaaattcaccatataaaacttacatgtgttatcatcagtaattacaattatacacatcaagaaaatttctatatttttctaactaggaaaattgtacttcaactgttgatttcatcattgatctagaatatctaattacttttactatcgtacatattaaaatcggagatatgatgaatcgaaaagattaaaactatataaatttttatttttgtaaactttcctacatggacatacattatactaaaattatataatatgtaatgtatgatcgtgcatgtttaaaattcagcgtttcacacgtgtagtttgggacaacttcggcgtttttttggttgagtaagatgacatgtggctcgacattcataactattgtgaataaaataaattgatttatgtaatgattggacacatttgatgaagtggtttcttgaaaataagactttggatggatgcagtgtggacaaaccggtataatttgtttgcggtttagtttatctggcagacaaaaaaccgttgcagaccaagtttatttgtatgtaaaaatggtctgcagatggtccgttgcggttttcttctattttttttagatcactacgaactataattaataaataataaataaaaaacggtatgatccgttgacggttttatccgccccaaccgccataaccattcaaatcctaaataaaaacggttttgataatataagaaccagcccaaagatgaagttatatatgtgactatgttaacacacatttatagtatgagttaacctagacctatttgcgtctcacttcttattaaatgctaaaaatttaccaaaaggacgctattcatcacaattaagtttaaatctctaaattaattgatcgtttaagtttttaaccaaactcaaataaataaaaaaatatacgataacttttattgtgacgatcgaatatactaccatcaaattttataccaaatttctgtttcgtagcatgtacgaaaattttcactccaaaaaaaatctaaaaattatatttaccaaaaactgtgatttcagaaaattatgtgattttaaagaaccagtgatttctcaaattatattatatgaaatgattattattattttaaaaaggtgaaagggtgaagcaaaaaaatagtgtgcataaacaaataagctaatttgttttctggtacttaggtcttttaaatccatataaataaattcttaaaagattgttttatttcaaatctttaacctaaaattgtaactttaaattcatgattaaattttttgttttcaataatttctcgtaacttcattacataaaacgagaaggatttataataggtaaaggcgtgaagcaaaaaataattgtataaataaataagttaaatttgtttcatagtgccataaaattacactaacatctgaacgtgaaacgcacgcgcttcttcatatcatagatacgttgcgtcttaaaacacaacacgtagcaactctttttaaaaaggaaaaatacatttattattcccaacaataaaaaaaatcaaacacagtcgaagaaggcaacgacctttcgcagccgtcagatcttaataaatacagtcgccactaaaatttaacgacatagatcgaaccatgacgacctactttctttaattaattttctgtcgtgacctaatcttctatttgttgtttcattagtcacttacttttatatttattctttcttaggtctatgtggaccaaagtgattggaaaagaaaaaaaaatacatttttgtcaaccataactaaattatcttattttctcaaatgcactgtttattatgtagcgtactgatttattaaatacttttgctttctatggttaatttatgatgtcggatttttatctttcccccaataataatatcactatagaagaaagtttacaaattcttagttaaatcaaaaaagattttatcagttgatttgattatacgaggtgacatcaatttttgtcttctttaacaaaaaaaatcaatttttgttttctttaacaaaaaaaatcaatttttgtcttactttttaattagcatttagaaaaatatttaacaaataaaagttctcataagcgatttttaaaaaaatgttttgtttttactatctttcagtttttttttttaaattaattttctaaaaaaacacatatattaaaaaacatattaaaactaattataaacatattatcttttgtgatttatatttttttataattctaaaccaatgatattcaattatttatcttaaaattaaaaatttatcaataataactaataaataatgtatagaaaatttaaaaattattttttttaaaacaatttttttcctctaaaaaattaaataataaggaatagagaaggaatatttttttatctaataaattccatataataattcaattatattgataaataggttgcaaaaaataagaaagaataaatatgagaataaatggtcatctctcgatctctcagctctgtgcaactctgaacacacccacacatatatactcagatacatacatacacaccacaaaaaccaattattttccaattttaagaaaagtttctgtgtctttttttttttttttggtgataattgaaacatatgaaacaatcgtcgtcatagaagcagcagagattcaccttctttctttatctttccctctcagaaacaggaaacaaaattcaaaaagaacaaaaaaaaaaaggtcaaaccaaaacg

SEQ ID NO: 5478 - DNA, 3000 bp, Unknown
  misc_feature (1)..( 3000): cDNA_ID_3077180_gDNA_ID_1620793_Annot_ID_168391 3000 nt of promoter + ATG
ttagccattttgacacccctacatattgtatacaagtctaacttacaataataattgtagagtctattttctacagcgagtttgctaacacaatactattatcaaataccttcgattatgaaaaaaaaacattacttataataatattaaaacgtaaagttttaaaattaaactattcttgatatttttgcaatatagtttttcttctttggatttattatatgttacgtaatcgttgaagctttttttttttgaatggtgacaaaaatatcaattttcaatcaaccaaaaatgaaaatatcaatttccattataactttcaaaaagttttgagttccacagtacctatttatatacattcttcgtaaatgtcaaaacaaatcattgtagtcacacttcaacgtctttcactgaattataatcgatttgtggctatgtaaaacaatattaaaacagctgactaaaccgaaaataaaaccttacctattttgtgtatacttttttaaacaaaaaaaataatttgaaaactatgactaagggtccgaatagtgactgcgttttgtggtgtgggagaagtgtggtgcggttcaaatagtaacgaaaatacatatatatatatatatatatatatatatagaaattttgatactgttacaatactgttgcagtgcggttttgtgtacggtctatatcaccatttatagcctaatttaagtgataaaaaaccagaaaagatggcggctaaaaagctagaaaaagagtgactgtaaaaaaatttattttcacatatagattttagcaagaagactgcgacccaaatctaaacaggctgacacataattgtgttgaagtcacgctccctcacagctgggaacattatcattcatcaccaccatgtgcatttatgtgctcatcatcaatttttacattttatatcgtcaagtaaacattattaataagaaaataatgaattatctagttaattatacaaaaatacagtaagttgttttgttcaaagtcagcaaagtcgaacccatatttggctgcggaaacttcatgcgtttttgtcgcaattgccacataacgttggaagattatttcatagtcaatggacgaagttggaagttaatttgtaaaattttaccaagagcaacgaaaactataatatgtcggtaaaggcaatgatttgtaatgacaacttccacatatattgcatagtcatatattaggttacatcaaattttgtaatgactatggaactatggcgtgactaatccgttgttggacacgtacaaatgaacaaaatttggaggatagtcatatatgatataaaaaaaaaagattgttgccaatatgatacatttcactggatttatagattgtgacatccttttaccgacttatgaactacatatttttgtattttgttgtatcagtatgttaggggtcctacgttgacaacaaaatattttcatacgtctaacaaagcaaaaaatgtatttataatatgtaaacacgtcgatggttcgccgacctttcaaaccgaaagaagttgatagcactattatgaagaccgattaattaagtttgaatcggaatttgaattctaaaaagccggtttatttaaatgattaaaatgcaacctacgtcgtacttagttgattatagtttaatatgtttatggtagtcacaaaaattgtctaattagtcgcatttttatgaattcttttttctttccttgttggacaagggatgcttaactattattattcgtagggttttatgttcagagacaatgtttccaaacgattcatctacatttgacagtagaaaatcaaaatatcacaacaaaacgtgtgctttttgctttgtagctagactgtgaattagcattttcttaagttttattaattttaaaactgtgaaaggaagctaaaagtctaaaaccatatgccaccaaaatgatcctattataacttactgaatttaaacatgcattataaaccataattttgtaattgatctaaaaataaaataataattattcctctttgaagttgttacgttttggttttggtttctttatgttaaatttgatttgcttctcgaagtttgaagacaacttttacctctaaaatgactcttaaattctatgttttttgttgaaaaatatagtttgattccaattaaagtttagatatattgcgatgtattttaaatctagttatgattgatattaattttttgaatctagttatggttgatattattttactaagtacattattatcatttctttttacaaactgtattccgacacttaattttcacggtatgttttataagagaaaatatccgcaaaacatattacagagtagaataaatcctttctcctttatatttatattatttaatacttaactctatcaaaatatcctcaacatttataaatatgaaaaacaaaatcagtagtcagtgaacataaaaaaaattatcgaaaattttacgatgagtaaagatcctctctttatttctcaagtaaagcaataatcagaaaaagctaaattgagttatcaaaagcagtttatctaacaaatgttaattaactttttctggtttaatattattgttcactaaccatgcataatcgtataacaacaaaaataatctcattggtaccattacatcaaataataaatagcgggaagataaacatagaaaaagtgataaaacaatctgcttcaagaaaaagataccccagtggacgactagggtcaatgaaaatgaaaacagagacaaatggcaattcgtaattattcacatttatttcagggtactttcgtaaatccccaacctgaccgtttctcgaatctgattacgtggcagtcatcacaaatgcccacaaaagcacttcgctgaaactcaatctcagtcgttagatcagaatccaattcttttcaatacggcaagttgagatccccaaacccatcatgtgtaacc

SEQ ID NO: 5479 - DNA, 3000 bp, Unknown; identical to SEQ ID NO: 5467
  misc_feature (1)..( 3000): cDNA_ID_3077184_gDNA_ID_1620793_Annot_ID_168388 3000 nt of promoter + ATG

SEQ ID NO: 5480 - DNA, 3000 bp, Unknown
  misc_feature (1)..( 3000): cDNA_ID_3077188_gDNA_ID_1620793_Annot_ID_168387 3000 nt of promoter + ATG
cgtatctctcttttgcagaatctttcgaggcagctcgtggatcatgtaaatgtgaccgatccgccaacccgaaggttgtgccagtcaaacatgcttcaatcaggatccctcttggagagtttaggcatttcactcctggagcttggccgtgccaccatgatgcttcgtttgggacaaacacctgtgcgtattcttttgctacatattgtggatctaaatcttgcaatttttattattgatgcattagtttgcatatgattttgttcacagaatatgatacacccatacatctatatgacacttgttatgttacatgtcaggatgatgctgttgttgatgctggacctgcagtgttcatatcccctacagggcgaaatcccttgccggtctatctatttgttactttctttcaccattaccagtgtgtccacttgtcctgctcaccttacctttgtgttacctttaacttttgtagtcacactcctctcggctgggcacgagtattggaagcttacaagcaggaaccgcacattctaacccctttgcgggacaatcacttgcctctgccccaagaaatattgagataagaatacgtacaggtaagaatacgtacaggtgctattcatatccgtaatttcgaagtattaactgttctttcctgctatatattgaaaaacttcatattaagttcctttttttaatcttatatctggattcatcttggtgatgtgttatattaggatcttgggtgcccgccagtgggaccaaccagagagaggaaagtactacacaacaaacccctgggcagacaatcccttctacacccagcagcactactgatcctgccccctcaacgagaggtccatctgaacctcttcgaaatcctgtggccttagttatacctgttgttgctcgatatcagcagatatctcttggtggacgtagctctactggattggatggtgtacatcagcctgttactgaatcttctaggcagccacagagcgtcggtactccaggaagagaaggttagttctaatataacttccctacactattgtactgatttatttgttgaattgtcgataagagaaaacttcacgtctgttaccttttattactgggttgtctcatattatgtttgatttgatgtttcccttggttgttttggcttcaatcttcttagacctggtagatgatgtgttacctaaacgcaggatatgtcataaatctttgcttctatgaaatatgtaggtgatagcagtgcttctcctggcggtcggggtttgtctgaattgagaaacagaatccatcagtttttgaggcccttatctcgtcgagaaaaccaagccgggagcacggagtctcagggtgcagcaaatccctctgccacagcgtccacagaaacaaacgaagcagttgcaaatgcacaagtagagccagcaactacgacagatgaagggaatttcatatcgagtgttcttcagcagatcatgccgtttatatctcaaaacgtagcctcctcaagctcaggtgaagctgctacaggcagaggcagcaatagtagacaagcctcttcgagagaggcagaggtaccattgttttcaccttttaacatgttacttatttagttatttccttagaagccttatgcaacatgctaacttgtcatttacttgtggtgaattcgtgttggagtaattagatagtgaaagagattttattatcgtagagctttggttgtgtatagaataatacagatgggtaggagtaaaagtggtaaaccttatcaaatccggtgcttaggggttagtaaaatctgataaatggtaactggtgagaatatacaaatgtgttaatgagtgtcggttgcggataaattcgaggtgcaggaggaggaaggtacagagcgagggaattcaactcggagacctgaaccaccatcacctccagagtcaaaacgtcagagggtaaatatgaagatccatttggtttatgattcatttggtttgtgtttcatttggtttgtgtttacttaaacatgtgatgatgtttatgcagagagagtgagagattgttggagcaaaagcgaagagtggagaagcacactttttgaagaacgatagtctttttttttttttcttttcacttgtggtaatttattctgagcttttgattgttcgttcaaatggtattggtggtgttagccaaaagatctccatttttttctttttttatctccactgccaacattttcagagtttgtactcgaataataaacataagtgcatatacatagattagtactgaattatataggggaggctaaagcatgagagtcaaaagtgaagtttggtagccaaataatagactttgtgtttaaggaccacaaggacaagtttctccaatggaacacttaagcttaatgtttacaataaatgtggtcgaggttaactcttcggtggacaaaaaaattggttttgagcatttttaacttgcaggttaatttgtcattctaacagagctccgagcaacattcctacgaaagcaaaaaccacaactttgcgacaaataccctgaaacggaaacaaggatattattacctttggtaaatagtaagatctcagttgttttgatgactttttgtttgtgtattttcaagatcttgtaattccctcaacgtattgcaattttagagcatgaaccttgtattatataccaaaccaaaataatattggttggcactcttatagaaccgaactaaaccgaaaaacttaagaaacccgaaatgttttaacttttagtaaaaatagtaaaatttcatcaaacagggaacaaaattaaagagagtaaaagcaatttagaacttataaaaaggaaagccatttcttcggcatcctcttcaccaactggcataagcagaagaagaagaagaagacaacgacgacgactttgaagaagaacaaactcttccttcaatctcaatctctctctcagatg

SEQ ID NO: 5481 - DNA, 3000 bp, Unknown
  misc_feature (1)..( 3000): cDNA_ID_2150531_gDNA_ID_1620793_Annot_ID_168386 3000 nt of promoter + ATG
aaaagtccaaattaaatcaaaagatgttcaaagttgcaagagcgtcacagtatttggcgatcaccggtgctggtatcgaagacatcaagctttccaagaagtcatgggtgtttccatggcaatcttgcaccgtcttcgacgtttctccggtgaactatactttcaaagtccaagccatgagcgcagagaagcttccttttgttcttcccgctgtttttacgattggtcctcgcgttgatgacgatgacgcgctgattttgtatgctaggttgatttctcctcatgataaagattcaaatcatgtccatgagcttgttgaaggtgttattgaaggagagactcgtgttcttgctgcttccatgactatggaagagatctttaaaggtaaaccccaaatttagggttttagatgttaagtttattggtgaatatgaggatgttaaggtagatttaatttatgtagatatttttcggatttgattggtgacataaagttgtagtaagactagggttttgtataatgatttggctaagtctctttaaataaatgtcagtttgattggttataactaagacatattttgtgaaagttttggttaaaagagtttttgattttatgtatttgaagggacaaaggagtttaagaaggaggtgtttgataaggttcaactagaattaaaccagtttggtcttgtgatatacaatgccaatgtgaagcagctcgttgatgtgcctggacatgaatacttctcttacttgggtcagaagactcaaatggaagcagcaaatcaggctaggatcgatgtctctgaggccaagatgaagggagagatcggtgccaaggaacggactggtcttactctccagaacgcagccaaaattgacgctgagtcaaagatcatatcgatgcagaggcaaggagaaggaacaaaagaagaaatcaaagtgaggactgaggttaaagtgtttgagaatcagaaggaggctgatgtagctaaggccaatgccgagcttgcgatgaaaaaagctgcttggactaaggatgctcaggtggctgaggttgaagcaaccaaggccgtggctttgagagaagctgagcttcagactcaggtcgagaaaatgaacgctttgactcgaacagagaagctcaaggctgagttccttagcaaagctagtgttgagtatgaaaccaaggttcaagaagcaaattgggaactatacaacaagcagaaacaagcagaggcggttctatacgagaaacaaaagcaagccgaggcacagaaagcgcaagcggatgcggctttctactcaaagcagaaagaagcagagggacttgttgccttagctagtgcgcaagggacttatctaagaaccctcttagacgctgttcagaatgactattcttgtcttagagacttcttgatgattaacaatggtatttatcaagagatcgctaagactaatgcgatggcggttagagacttgcagcccaagattagtgtttggaaccatggtggagaacagggtggtggtagtgggaatgctatgaaggatatagctggactttacaagatgttgcctccggttcttgatacggtttatgagcagactgggatgcagccacctgcttggatcggtactctacgtggtgcggaaccgaagcaagtgactcgcagctaagagaatagtggcatggtttggtcgtttacttgtggttgaagatacatccatgcgaatgtaattttttattattttaatcctgttggaggacttggcttattcttgtgtgtgttttgaagtgtgttattgatattcttaattgaatcgtattcgtatatgttgaaaataaattaaaatgaggaataaccaaaaccagagaattatttcatttttatatattggagtcttgaactatttcaaattcaaagaacgatagctcgtcctttcgggaacaaccaaaatcaacgccctccgatatgtgggctaaataggagaaaactggttcggatggtggctagaaaataaaattttgcggttttggcggaaaaacacatcatgagaatggaaggtgttatgcgcatagtctgatgggaggtgatctagccactgactgactgactaagaattgtgttatgcgtgtagtctagcggaaggtgaaaggtaggaatagtcatttggagaattaggacgcgcttgggtcatcgaccaggacaggagcagctagctactagctgactatctgaagtcttcttcatgtgtagtttcttggaagtgggttgaagttttatcttattaggaatttgcaaaaagtctccgatcctattttattctaaaatatcatatgtcatagtcaaacaagtttgaagagattttggcaaactcaacgtcttattatcaaaatgaaaattgtaatgtatataagcttggtcatggtcaacatttaatataagatgtaactatatgctatacgtaaacatccgagattaggatctacatctattggtttaatgaattatgatttattttgtttggtttatatatggtgtacttatatactatagtttaccctaccaaaaagaaaaatatactatagtttaaaagattttgaattttatgtatttgctgtatcgtgtacatacatttttatttttttttgctaaaccgtgttcatacatataaatcttgaattttatcaaagacaatttcatcaaattttaacaaatatgattttttttgcaatacaattcagcttgacaaaatctaaatagaaagtcaagaatgaaacattcttcacaatcatcctttttttttgtgatatatacaagtttgtgaaatttctttaacatttctctaacagtgacagacaaagtcttgtaacatgtcaacgactatatgtaatatataaacacttctcacgaaacaaaaaaacaagtacagctactcattcttcgtctccaaaatcattttggcgaaaagcaatcaaatccttagatcctagac

SEQ ID NO: 5482 - DNA, 3000 bp, Unknown
  misc_feature (1)..( 3000): cDNA_ID_2150527_gDNA_ID_1620793_Annot_ID_168385 3000 nt of promoter + ATG
aaaaattaaactttgatgacaaccggagctacaaacctctccggtgaagaatctttgccgtcgccgccgtcatcgaaattaagactatagtttttcagatcataagtgaaatcaacatctctcctcatcttcttcctgccactactaaaacttcttataaagtttttccactttggtcccgcgattttctcagaaatctcttttagccccttaagtttctcacttccccaattccctcttctttcttcctgcaaacaaccactccagccaccgcgactgcgagactcgtcgtctcctctccgccaccgggtgaaactgaaactacgaaagtacccacatccacaaaacgcagccgtttcttcataatcatcggagagcagattctctctatcagtggccatgataataaaaaacaaaacagcgagtttttgattaaaggaagagactcgatactatatataggtgaatgagtttaggacacgtggcgtgtcgaccgttgggtgatagtagtgatggggtatgttgttggactgttatgagaagagtgtgacagtgatgtgagaggagcgggattaggattcgctggctaatgatgaaagacagctgtgaaggcgggagcgaaacggttgctttcttttctcttttgtctttaaggataattatgaaacgatttattgatatgactaaatattaaaactttaaacaaattagaggatatctgaaaaagtgaaaagtgattacaattattattttaagaactggttgttgatgatgatgatgataataactgatagatatttttattttgatactatatatatatatatatatatattggtttcattttcatatatataagagagaaattttgaccaaaaaaatatgattctaaaaacgttgaattaccaaatatttgtactagtttggaatgaaattccatatttttagaattttgatatcaatttgcatcttcttgtttaggtgaattcttgtagtattgatttacatataaaatcccatataaaattccctacataacatttgaatctcgttaggtaatttttagattttcatcaatattgactactattaaataacacattattttcttgacaaaaaaaaaatgaaattactaagacaataacaccctgcatttggccatttactatcaaatatcgaatatttctagattataagttgattgaaattctatagaaatttatcatctaataactaactacatcatattggtttataaggttttattagctgaaaattatagttaaaaacaacgaataaagtagtactttcaatgatgaaaaaaaaaaagtagtactttcaatattgcaataagtaagattaaaaagtgtttaagtaagacaaaaaaagaaaaaggtaaccactaaccagcctggaaactgatgattagccgtggattaaaaagcaaaactggtgtttagagatttgctaaaccaaaccaaaccaactcacaatattataaaaaggctgtcccatgttgcctaaactaatctcattattataacgatgactcactgatcacccaataatcattatgtttttgtcctaatcatcataacaaagattgcattatgaaaagtttttgtttaattaattactcgatccaatctagagtacgcagttctatctctgatgtagcatgagatagattcaaacaagacttgactaagctgatcattagtccaaccatttcaagtgatatcttcagtttttgaggcttttagatgggcctaactagtccaacaatttcagtgatacctgcaatttgggttttgatatctttcacttatagatgtttcataaaaaatccaaatcttttttactaattacaattattatatattcaataaaatcatgcagttctatttcatgaatatttaagcatagagactcatgtatttttcttagaaaatattggcaaaatgagaaaagttaggatttaaatggtatgagaagatttgtaactaaatataaaataaaatattttagtacgtatgacctctagaaagaaaaaaagtcaacaaaattaaattcataaaccgcgtggagagaaaataaaggaagatcataacaaaacaaatcaaaaaatttgctaaatataatatccgacacatctatatatacatttttgcagccactttgtaaaataaatcatggagttgagatttatttacagcggctgccactagcatttaataattgtttttgataattagaaagaaaatcttctaattaaatatttgacatttaacaatcttcccaaaatctctctaccttacctacacgattaattactaaaataaaacttccaaaatatttaatattatttaattacttcaaaattatcatttttgatattgcttttctacatgattataatcatcaatccgtatagatatttgatagcatttaattactacaaaattacaaaatatttagacaataattcataaacatatcataaataagatcaacattaataaaataaatgagttttttttagaggacaggttggcagggtttggcaggacgttacttaataacaattgtaaactataaaataaaaacattttataatatacacaatttacaaacttttatatatattattttaaaaaataaattgttctcgcggtgtaccgcgggttaaaatttagtatgattgtaaattacaaaacttaccaatttaaccacttaaaccaaaaaccaaaaagagaaaaaaaaaatcattaaaaaagagtaatttaaggattccatatttaacttcaaaataaacctaaagtacctcgccgccaataggcgatggcttcaaatatgtagtttcttggaaatgcgttgattttttctgtaagactaagtcttcgtacataacgcacgactatatatatataataagtccttaagaactcaaaacaaagtcttctaaatcatttgggcgaaaagtccaaattaaatcaaaag

SEQ ID NO: 5483 - DNA, 3000 bp, Unknown
  misc_feature (1)..( 3000): cDNA_ID_2150519_gDNA_ID_1620793_Annot_ID_168383 3000 nt of promoter + ATG
ctttacgagcagcttttgtcggcgcacgttgcttgtttgagaatcgcgactccggttgatcagcttccgagaatcgatgctcagcttgctcagtctcaacacgtcgtcgctaaatactcagctttaggcgccgccgctcaaggtctcgtcggcgacgataaagaacttgaccagttcatggtatataaatttcagatttttttgttctataattttataattaacgatttcataattatacttagcacaaattttaataatacacaccgacttaggtttcttgatttttgaaatcttaaaatattaaaatcaagatttgtgtttttagggataaacaagactaaaatcccaaaaaaagagcttatgatataataatggtcatgatgatgaagaaaatacaaattttgttctttgtgtttattgtgtgtttgattaatgttttttttatggtgtagacacattatgtgttgctactgtgttcatttaaagagcaattgcaacaacatgtgcgtgttcatgcaatggaagctgtgatggcttgttgggagattgagcagtctcttcaaagcttaacaggtgagaaaatgaatcctgtgattagctcatgaatccaatagttagttttatgacattgacaagttttgtgttttattggtgagattaggagtgtctcctggagaagggatgggagcaacaatgtctgacgatgaagatgaacaagtagagagtgatgctaatatgttcgatgggggattagatgtgttgggttttggtcctttgattcctactgagagtgagaggtcgttgatggaaagagttagacaagaacttaaacatgaactcaaacaggtaataatcaacaaacttgttctttgaactagttcatgaactaacaatgtagagggctttgtcttgttgatgaaaagggttacaaggagaagatagtagacataagagaggagatattaaggaagagaagagctgggaagttaccaggagataccacctctgttctcaaagcttggtggcaatctcattccaaatggccttaccctactgtgagttcactcatctaacatctctttataacttcttcaagttcattcattgagccataaccaaatattggtttgtaggaggaagataaggcgaggttggtgcaagagacaggtttgcagctaaaacagataaacaattggttcatcaatcagagaaagaggaactggcatagcaatccatcttcttccactgtattgaagaacaaacgcaaaaggtattattatactttaatatagtcttgtaacataaccgaaaaacttatggatcggactcaaagaagactgaaacttttgtttgtctgatgaaagcaatgcaggtgacaatagcggaagagagcggttcgcgtagaaacaacaaacatatgatgtgaattggggaggtggaagatgggatttgaaagcagggttttagggatttaaagttgagaattttatggaggagtttggattatacagagagaggggacagtattagaaagtaactttttgtgcaattacatagtaacgtagtttggttatgtgattatgcccatatattttattaagtagcacacaaaccaaaaagaaaatatgaaaactgaagatgcaggcttttgtttaatgttttttgtttgtttgtctgcatgagttttttttttatgaaccatcagataatcatcatcatcatccataatatatcttgtgaataaagatagtgagagaggagaacattgggatgcacaagttttcttaatctactagtatatgttacgcattgaccaggtgcatatgttaatttgtatcgcaccacttggttagcttaatctatgtgactattatacagtatatgtttcgcattaaccgtacttaacccatcttatgattcttatccgcttagttcgtagtatttattgcgatgtcacattccaactcgtgatattggcttgataagtaaaagacattatacatggtagatgacgacaaaaaataaaacataccccatcttacataacgtagcttgctgcgtacttttgtaattgtaataatttgaaacgtgttcttttttctagtcaaaattgtttgtttatcctcatcttgttgtttcgtttgtcacgtttgtgatagccacaagttactgtaagttttcggcgagatttttctatcgatcacggagagattctgcacacattaacaaagataattagagtgtccttaagtattttggtcgcctctctattagaggaccatacaaagttcaaagactagtctcatgagaagcccattagtacattagattaaatctaggaaagtagattcatataagtagttttgtaatgaacatcaaagttgttaacttagagaattgtcatttggattgtataaatggtttgataaacgaagtctaacattagtatgtgttagtcttctaaattcaaataataatcggagttttggtctcttggacgatgcttcacagtgatattcaaaagtttaccgttatcacccaccaactagagaagccaaattaggtcttttaccaactgtagggtaaagaactgtcttcatgtaatcattataaccaccaccatcttgttatgctttgtttcttcttcaaattgcagctttcaatatacaacccggtttacgttctggtttacactttagacgtttcaatttacaaaattgggccgattgacagatattggacctggcccatcaatctaaaaatgcgctattttgaatcaaagacctatttaaatcttccgacgacgactccgttcacatagcagaaacagtggcgacaaaccctatcacggagccaacccgcattttcctctagctttcgcaccgcctctcgctctctcgccccaccggttcgtctctgacattttgtgcttgatttggccgttacaaaattctgattgctagttcatgagattcctttttgacaggtgacataaag

SEQ ID NO: 5484 - DNA, 3000 bp, Unknown; identical to SEQ ID NO: 5477
  misc_feature (1)..( 3000): cDNA_ID_1840419_gDNA_ID_1620793_Annot_ID_168382 3000 nt of promoter + ATG

SEQ ID NO: 5485 - DNA, 3000 bp, Unknown
  misc_feature (1)..( 3000): cDNA_ID_3077200_gDNA_ID_1620793_Annot_ID_168380 3000 nt of promoter + ATG
catcaggacctggtgaactttcagcattaatggaaaagacagcattatagatttcttgttctgtaattttctgagtgagatcatgattcatatcttgtgtaactttcgtttgaaaaccttccaagactgaatccatatttgcaggataagaagaggtgaacagatcctcaaaaaactgttctgctatttttcctttttccttattgagagtgtgctcaataccattttcatccaccagaaaactcaagcagtttttaattctattagcttttacagaggcctgaaaaaacttagaattcttatccccaccagccatccatttatccctacttttcaatctccagaaagattcctcctctctaaaggcaatacccaactgattttgaataacagaaatcttgttccaacacggaaattggtaactcttttcttcatccaattcaaaccttaatctcttaattcgattctcagcattataatccttcccttttttccaatgactaatagatttcctacagtcaaccagtcgatgcatagaagaagaattatgagaagaaatattacctatccatgctttgtgaataacgtcttggtattgagggtcttcagcaaatcttttatcaaatctaaaagttcctcggaaaagctcctgatcattgacaaatttcaccaaaaccggtctgtgatctgatccaagcttctccaaaaaccattgatgtgaattaggaaacaaagaaaaccactgtgaatttccaaaacagcgatctaatttacattgaatccattctccatttcttttccctccccaagtgaaactattcccagttctgcccagttcatgcatatcacaggttgataacatattcttgaagtcctgaaaggaggattctactctagatgggccacctatcttctccttattagacaagatatcattaaaatcccctatcagactccaagctgccattcgattcacaccaatgttactgattttatccagaagcaagtgtctgagattctgccttggattaccataaacacaagagataaaccatctcttacatccttgagatatttccaaatccagcaaatttttgtcttcataaagaaactctatatgaagatgttgtttccaaaatattgataatccaccactctttccttccggttcaatagtatgaaagtaatcataacccaaccacctaaaaactttcaaaataaacaggtcagaattcatggtctccatgaggaacaagatgtcagggaaatattcctttttcatttctctcaagtgccgaattgtccaagggttcctcagtccttggcaattccaactaaggatgccttattgatactgcggtggttcttgaggaaccaccgtaatgagagactttactgtactatcagatctttccgagtctgcaattttcttattccttttgatagcagaagcaaactcaatattaagactaacctctttctcttttataccagcgaaagaatcttgcctcttgtgaactaaaggagcttttctttttcttggattcttctgcttaatacttaatccagatgaaccagactcattaaacccaaagaggaatcctttagatgtaggatagtccagattaccagaaggatgactagatctttttggatcaccagtctcatggtttggaatatcatttacctccggcaatattgaatattcttggtgagtggagatagacgataactttgtaggaacaatcatctctcctggtttcagtaagcatttctttccaaaaagaaaacctgagtctacactcctatgatcttcctctgaatctctagtgtttcctacagtagcaaaggggcaaacacttttctcatgagtgagacgttgacaaaggaaacatcttttccgaatcctttcaaaatcaaaagacactgatatcatttcacccgatgggagcagaacttccttaaagttacgcaaaggatttcgaacatcaaggagcacctgaaccctaatatagtcttgtgcttgagatttttccaaatctagttccacagtcatcactttcccaacacaacctacgatttctttgatagtatcttctgtgtagtagtttatcgggatatttctgagtcgaatccaaactggaagaaacaagagtgaatcaacagaaggtttttccacccaacgctccatcaagacacatcactcatcctgagtccatactccagtttttaagatttcaattaaatcatcttctgatttgaaaaagaattgaaatctctcttgggataaagcaacacctcttacccttgaatacaatctccaaattctaggcatgtctaatatccaattagacatcctttggtgagacggattcaaaaacctgcccactatactgcagttatttctttcaatggagcaaaactgtgcttgattagacaatatcagagggctatcatcgttaattgacatttcttttatcgcttgatctaaatccatggtcatctccactactagaagaagaaagtactttcctgatacaaaaacttgatgaaacagctatgccgacagaaaacggggatatcttcggttcttggctcctctcaattatcaaaggaatgatgttgagggagaagttcttatgcccaaagcaaacgggacggcttaattaacggcaagggagaagttcttcaatagagctactatgaaagagaagagagaaaacctcttgttttttaccgagggaaatctaaacaagtcaaaatttgaataagactaaagtattaattgcttctgtcccacttaattctcccacatcttcacacgtactaatatattatacatatatatcaactaaataaaaatatcacaaataaagaactaaaacaaataaaaacgaactttaataaaatcccatatcttgtttctctctctctctcaaagttagtatctcagtacctttacgctttgtttgtctctatcttcttcctgatattcagaga

SEQ ID NO: 5486 - DNA, 3000 bp, Unknown
  misc_feature (1)..( 3000): cDNA_ID_3077207_gDNA_ID_1620793_Annot_ID_168376 3000 nt of promoter + ATG
ttcaaactaactgatctgaaatgtgtatgctaacatataagtaactagaatgcaacgcacaaaactatatgttcgcggttaaaaaaaacaaaactatatgttagaaccgagaaagtatatattatatgagtgtgattatttaaaataatttttaaaatagattgattttggtatatatagttaatttacagctgaatgaaagaaaaggacatgaatcacaatcaaaaccatttcatcacccatgtttatctatgtcgttttgggtcccatgtcacgcgtttacgacctaggccctactcatatttattcataattcttgtctgattttcccataactttgtatgtagtcccaaaacactaattgttaaatgttttccttttttatggttaaagataattgtatatattcgagtttctcattatctccaagtcgacaaaaaaaaaaaaacaattaagataagttatataatatgagtcaccaaacatatgatgagcctctatgctataaagacaaacaatctagacataattaacgaatgatctagttgttaaattcatattataagagttgcaaaaccgtagcacattttgtgtgtgtaaatctgacaaatttgcttcaattacaatttataaggatgataccttgtttaatctattttttaatgaacattgtgtatttattttgttgttgttcattgccatgcatttgggagatagatattgaatactttttctctttcagaggtatggtactagttgaaacttggaagattagtcatcactactcacacgtgccaaaatagtagcaaagagacaaaatcctcaatgcaacttaaaataaaaacagtctttgttatagctagctagcttctcaccctcacatgctttgctatattgtttgatcgaccaatacaattaaaccacgtatgaaacaaagaatagttacctaagtaaaagcgaatatgttagacatatcaaaattatttttgtttaattaaaattacagttgtagtaatgttgttatttcaaaggtacatatatatttccattatgtaacttgctgatattagcattcagtaccatccttcttttactacaccaccgagagagataagttactttcttttttttcgttttcttatggacatggatgcaaatatacagacaaaaaaaagcatatgttgaataattattagggttaagaatgattattagtagggtgaaaatgatcaattatttgataaaaagttaatgaccttctctagttgtttttcttgtcgtcataattgcggtctaggattctttcatcaatttgatactggattgaactaataatatttggcacttgttattttgatgtatccattctacctacacactcttttgcccaacatattcttctattacctcttattccaattataattgactctaaaaggatatagtctcaattggagattattttttttttaaatatgcgtgcgactgaatatgatcgacataacctttacttttatttgatgaaactttgtcgaacaaaagataaattggcaaacaaaaacatccatatataaacccaaataagaagtggttactatgtgacattccctatacaattaacatatactactatctaaaaattgtagataagtttatgcaatattatactaattccctctccaagtttcagtaatgggcataatcacatatttattaattattaaacctatgtttttaattgaaaaataatgtattagagttttttttttaataggtcgcagactcgtaggtaaactgtacactcagaaatcatgggtatgatgacaatacattaaggtttgtttcaataataacaatacaaaataatattaaagaagggaaaagagaagatgataatcgaagatggttttgggtgtttgattgagtcattatcaaaggctcacatgggtgaagaatggtgatgaaagagtctcgctagttatcaaactatatattttccaattatttatcgttattattaattagttggggaaaaatttggcagtatctatgatatagagacatgttgtgatgatcaaacccatgtgaaaataggtacagtgggtttgaagtttcaccgcagccaaatctctttggatccaacttgttcacaatgggaaaattaaaataattgataaatatatatgctatatacgtagggttgttattatatttagagctatttattagttttatcttaaaaataccccataacttaggatattataactataattgtctaagtataatatgtgtaacttgggacaaaaggaaaagaaaaaggtttggattaaattatcttaggtttgatttctaaaccgttttaattaatttatatttgttgataaaaaattagcttttgttacagaaataaattcatatgaaactattgaacatttgtaattttgtattctaacaaaaactgtgataagtttgttaattcataatttaaattctattttaacttttagataaattacgataatactttccaaaaaatatctctaaataaaaaaaacacttttccgacagtttagcatgtagtttcgaagctttcaattttcactataatatgtgacagaattagataatccatttgcccatgtcgcagcaacttcgaatacaacaaatgaagtaaatttaagaatactttaagttaaataaattaatataactctctctctcacatcaaacaaaatccatgagattttctgagtcgtattggtaatggtgtgggtccaatttaggaccaaattgattgccagtttattgccaaagaaaattttaacacaaaaacatttctctctctcatgaagctaaagccaacactacttatatagctacccttcactcttccaaaaacgctccttcactctcatcattctttcttctttcaaaacatttccacaaacacaccaaactcacctgaaaccctatttccatttaccattcacactaatg

SEQ ID NO: 5487 - DNA, 3000 bp, Unknown
  misc_feature (1)..( 3000): cDNA_ID_3077216_gDNA_ID_1620793_Annot_ID_168373 3000 nt of promoter + ATG
tgatgtatttttatatgtttatggtattcatttctagctcatgctatgcttgtcaagttgcctttgatcaagtgtgtattctaaatagttttttttttcacatcaaagaaaatcttacacttaacaatgtcttaatgatttaaattagtttacttaaggatttactaatcgtgcttgtgcgtgatgggggagatatgaaaactttttttcacattctttgccaaagaatcattggtttatctatttctaaaactatttttttttttcagttataaccgtcactcttaaaaaagatgattcttcaccacagtccatagatatgtaaaataaaaaaaaaatctcgcggaaatatatgtttattgtactgaaaaacatatacatctttatcaaatatatttgtaacgatacatttttctgaaaaaatttagtgaaatgttttatatatttttttctttataatcttggtacatatatgttcagactctgccactatataatagtatatatcctcatatacgtgaattgtttcctctctcataattcgaatatatattcattcaaatacactgcatgtttgcgttaaatacctcaagtgcattacttatctatctatttcgataaaaacaaatatgcaatggggccaattttacgttcaaatattaaatgggaatatgagaagtttttctgtcgtctaccataaatccgtaaactcgaatgtttgtcttgatgcattattgtaagatatataccatgatacataaatgtaagagtgggcaccaatctgaattagactcatttggcgatctaaggttccttttttgtcgccaagttttaaagtttttaatttctaaggttctaaaataagttacaagataatgtaatttaaatgacgaagcaattactattgcagatagttccagtgttattattaaccaggttctatttcatgctatgcaagtgcgattttttttttgtttatttaacattgtaaattttgattaagaaaaatgttagctagaaacacgcgctgtggagagcagaaaaatgtttgcataatttttggttcgctcgctagtttacataataatgattaaggatagactaatagttggcaagtgttttagtatttacaagtttcgtcattatgtggattattaattagagcctaagtttttcaggccaagtttcgagactttggtgtgtttggccatttatccaacgttttacctaaatttgatgatacgtttaaaaataaaattttaaagctgcatccactaatacaattgccccaactatacatacatactttcagtttttggactaaagcccaatagctaataggccgaaatcaaaaccaaacacatgctaaaaatattttgtacgtaacgcattatgtctaattgtatgtcaactaaaatttaatctaaaattattcgagtaatcaaatgtgtaccggtttagtattggttaatattggtttagtcattgtatataagacaagagcctctcatgcaataagattggattaagaagaataacacatatatatccaccgcttcttcttcgtttatcacttccaacaacgagactgtatctgtaaaacgcatatatgagccgttgtagataatggtattgattacgtaataactcttgttcttttttctttttttctgctgaagcaaaatccacaccaagttaaattccttttcttcggaaaaaaatctttttcaagggagttgaatccatcacttccacttaggagatttatcataggaacaacaccacattttttcttgtgtttctctttattagttcttcttaggcatgtacacagttttggtaaatatttggacatgattaatcgtaaagctgtgtgggttcaatgtatctggtctgaaactatgatatttcaactatttcgtagcattgcattaaccttaaaaaaagtcgtacaagatttgtttggacatatgtttcaatagatatatttgacttcattacaaatgaacttatcttcaaagcattccacgcagctacatacttggacgcagtccacgcagccacatctcctacgtctcttcttaaattctcacttcccaaaaaaagttataattcacttctacaaaatataaagtctctcccacagtgtaaactcttcctccacaaattttaaaggtaattttgtggatctctcgctctctagatatttctgatcatattctcttataaatatatttaattattagtaaatgttttctccagtcattcaattcaggaatgtattcttgtcttggcttacagagtgatggctcttctttgttttagatttgtcattttcttaattaattgattgaatgaatactctaaaatcttagtattatgtggaatgaatacactaatctttcaataatggaaggttcattgtttgttttagtgaaacttttacctctgagattattagatatttttttgaatattttttgttttgttttcaagacatgtttaaatagtaaacaatatttggattaaataagtagatacaaaatgtgataattaggaaaattcaaaaatttagaaatatagagtaagttgattttctcaattaagtttaccatcataaattgtcaacgaaaaacaataattaccgttcctaaaaaattgatcatcgtgaaatctaaatcctccatcaataaacatattgttttattaaaacactaaaagtctactaattttggtaaataaatcaaccaaattaacatataagagcatttccctcaaggttttttaggtgcgtttgtacaatataagtagacaattcaaaaatagtgaacaccataaacaagccaacaaacaaagtataaatttcggaagactatataagcagatagttcaaataagtctgaatgcttttaaaactatccccattactttgagccagtcaaagcctaattaactttatatactctcttctttttatttttaccataggaagacaaaatg

SEQ ID NO: 5488 - DNA, 3000 bp, Unknown; identical to SEQ ID NO: 5416
  misc_feature (1)..( 3000): cDNA_ID_2147947_gDNA_ID_1620793_Annot_ID_168366 3000 nt of promoter + ATG

SEQ ID NO: 5489 - DNA, 2835 bp, Unknown
  misc_feature (1)..( 2835): cDNA_ID_3076908_gDNA_ID_1620793_Annot_ID_168365 3000 nt of promoter + ATG
gaattcttttcgtaagtaatatgaacctctcactttgtaatatactttcattcttcacatgttgcataaattttaaaaatatgtactctttgattattacagaatattcttaacgctggaatagacacttctgcacaagttatgacatgggtgatgacatatttgatttcaaacccaagagttatgaagaaagcgcaagccgaggtgagagaagttataaaaaacaaagacgatatcattgaggaagatatagaacgactcgaatatctgaaaatggtagttaaagaaacgtttagggtattaccgctcgttccacttctaattccaagagaggcttcaaaagatgtaaagattggaggttatgacattccaaagaaaacatggatccatgtcaacatatgggctattcataggaatccaaacgtttggaaagatccagaagctttcatccccgagaggtttatggataaccagattgattataagggtttgaactttgagtttttgccgtttggtagcggaaggagaatgtgccctggtatagggatgggtatggctttggtacacttgactcttatcaatcttctttaccgatttgattggaagcttccggaaggaatggaggtagaagatgttgatcttgaagaatcatatggacttgtctgtcctaagaaagttccacttcagcttatcccggtccttacccaatggagttgattttatattttcatagttctaaatgtaacccttaagaagtatcctaaagttcttatccttatcactagatgagtatccacgctatgttgcgtttgtttttaatattcgtttttctaaatttcatatttatggaattatgtgtagacattagattattaaagacttatgttgagaaagttaactacaatgctaccatatgaaatgaacattaaaaaatagctgaaagaagtaatgtaaaacggttttttgaagtgttatgtgtctttacatttagcatgatgtacgtatcttatgttttttttggattgaggagaggcattatcatagttcgattatgcaatgtagcattgggagattttcaaaactgccgatatagaagccactacttcattttactgtttcgtgcaaaaacaagtacattcccagatgtcgtttacactctagctactgtatgatatcttgataatcatcaattgtcgatttacaaatgagcaatataatatgcacgagacacaacaatggttgatgactaaacttcagagaactttgaatccacttgtagttgtagagtatatttgcatattcaggaacttatatatatatatatatatatatatatatatatatatatatatatgtataaactaaggaaatactacataaatatattttctttttgagtttaactacatgaataagtaaaatatttacaaaacatacctggagttattctacaatggccagtaaaaaacattaaaaaaaaacttacacaaatccaatatatttatagaaatatcttattcataaaatatcataaaaagaatagcttaaaagatactaatagaaaaacatttcaaactttaagtttatgaagttttttatttataattagttagtgtttctaaataaaaaaaatgttgaaaaaacataaactttcatatttggaacgaaacaaacataaaatttaaaatgccatgtcaaaagcaattgtttttattgttttaaatttgaaaattcatgttgttttggatattattttttcatttctaaatcattcaaggagtgtatttgattattttggtggattttagaattggtctgcttttcagtgaatttcaaagatattctaatgattgttaacaaaaggcttttcgattgagtgtggttttataaactgctaaggagaattttggtatcaaagttagatacccctacacggctagtgatgaagaagacaacactaagaaaaccctgtgaattgtgaaaaagatttgttacctgcattattgttccatcactatctcacaacataaaatgtgtaagaataataacaaaacgtcttgcgtctccaatctccaaagctaaccaaaaaaaacaatcagaagaagaggaggaaagaggagtagagacgccaatagatctcacggactctcacctattgttaaaataacgccaataatttgttagtacgagatctagtaatagtagttttatttaaatacaaaaccctgtgaaagagatttgttaacttcaaaattgtacttttatttaaatactaaactgcagtaatagtggaaagactgaacaagagatcaaagtaagaatcagagcttaaacgagattatgagaaatatgagaacatgagacctgcacgattgaatgatgatgagacatgaaagggtttcggttcctttttttttacataccttaaatgttgtctactttttttttttttttcaccaaattcttatattaaaattaaaaagatacatgaagattagttttcatcggacaaacccgaataacaaacccgaataacaagtttgaaaattgaaaagttgaccaaacataactcaaacatagagacactagctgaagtaagtttgataggagaccatgagacgtttcgaaactaactaacacaagcatgcccatgagagaaatcgtaaacaacacaaaaacctcgactggtaagaaaatagtcaccgtaactagtgacattaaaacgaaattcaaaccatcaaacgtggttctaggttggaaacaacgtggatttgccttagacgcagacatagagacgtcggagaagtattcggtaaacaagcttcgctgacgatg

SEQ ID NO: 5490 - DNA, 3000 bp, Unknown
  misc_feature (1)..( 3000): cDNA_ID_1393884_gDNA_ID_1620794_Annot_ID_50487 3000 nt of promoter + ATG
aacattcaatgcatatgtcatattcatcagctgaattataaacatctaaatttatttaatgtttgatttagcatatccatattcctttctccataaactaatgcaatttgaataatctatgcagaggaatcttgaatccaaaagacggccatacaatacaagtctaaacgtggcctaccacaaactatcaccgacaaaagttattttataaaatcaaagcaaccattaaacttaaaactgacacgagatgttaatgaaaattttatattgatcatgcactgcgtcgtgtttacttttgtatgaactctcaaactttaaatctgtcaggaatgagaaactatagtctcgatacgaaattgtcaataaagcttcatattattttattcgaagtctcggtaaagatagtaattttataaatataatcagaaacggtaattttaagttataattttagaaacgggtagttcgaaataacgatttaccttattaaacatattaaaaatattaaattattgaattgtgaaagattttatgttaacatgatgttaatgtattgagtatctttgtgaaagaaaagtataagttagtccaatactgatctcataataaccgtgcagattttatagtctcatatataatcatataagcgactgtttttacattaatgtatttgtacttttatgagtgtcaacatggtctaacttcaattaatgtgtcttgcatcggactaggattagcatgacttggcagttcaagccgcaaagacgcaaaggacaccctaaacattaaatcctaacccattccaccatatgaatgagggtattgtagactaacacatatgttcttaaagtataagatatatacacattaagttaagttttctattttgaatatttttagtattatgtataaattaacaaaattattaaaaaaaactatactattgttatataaatgatgtgatgattttctttttacaaataaaagaaagatgactggaaatataattatcaaataaaaatttatgtaaatactaaaatattatatcataaattaatatgaagaaattatagatatttagaaattgaatatacagtaaattaaatattcaaaatattttatatttgtgatattatctaagactatgtatagtttagttgatgtttataatattaactcgctgatttcataaaaaataattatattatctgatcaagtaaaataatatgaaaatgttttgatcaatttgaactacttatagtattttcaatgttttcttttatataaactatttatactattttattaagttaataataatatttgttttttccgatctaattgtacattcaaaaagatcgatttagatgaaaccaaattaatattatcaaaaaaaatcatgtgtgctactctttcgtcgttttattagtttggacctcatataatatgtttttgaaacaccatttattttcattgccgatgtaaaataataatctggttgggtaatatatcttcattcaaaaaacaaaacaaaaaactaaatttggttaattatatgaatgatgtgataattcattttattattatataaggatcaataaataagaaagaagaaatataatgatcaaaactaaaaaaatatgatataattggatatcaattctttcttattcaattttgattgtcttctaattactttctgaattaattattagtgaaacataccaagggaatttaaattcttgaaatttaatacttatctaaaatatttttataccaatttcttatatttaattatatctatttggtgattacaattgtttctttaatgtatacatgagaaaactaaatataaattacatttcatgtcattttaaaattttcttagatactcttttcaaagttttcctcaattaaaagtattagattctagcagattttatatttatttttaagaactttatattcataatcatttcatttagtttttcctacattcatatatttttttggttgtcaccaatcaaaacctctgttagagtggaatcaagaaactatattccattcaatgattgtaaaatcctagacaacatcatattgttagaagaaattggcagataaattatattgatttatagataaagacaatactaagagaatagtatcatgaatgtttaactaaataaaaatgtcagtaaaaaaaaaaaaaaccaaaaaacgccaaattaggatgcaaatgtctaaatgaacggtgtggccaaagacttggtcttatctttctctctcacccactcattacaattttaaccacagtaaaaaaaaaaaaaaacagaaaatccatatctcaactcaaatccacatttctatttttactttcttcttaccttacgtttgtcttttgcggatattctccaaaaaataatccttttagattactttcctctttttttttttttttttctttcgcgtgtgattattaactcgaggtaatttctctaatcccagttaatatcacacgcggaatatcaaagatctgattttttgtaaacattgtaccaaaatcatcagaagattataagtggagtctttcgaagaagaacaaatttggtaaacatatcttttgatcctatttccttattctgggaatctacaaattccttcaacgtaacaatttgaccattgggtgttgttttgtttctctcaattttttttttttttgtatattcttcaaaatctgctaatataataaaaaaaacgtgttgagctgttaccactttgttctctctctctttgtcttttaaatttcttcaattttcatactctctaattatctcgggaacagagtttttttctcagttctcttcattacatgattacatcttctcttctctttttgttattacagtaacacgcgtctccatcaatcttctagctggcaatgagatccattctttagcttctttcttctctgttttttcttttttgaagaaaaaaaaaatg

SEQ ID NO: 5491 - DNA, 3000 bp, Unknown; identical to SEQ ID NO: 5490
  misc_feature (1)..( 3000): cDNA_ID_1393884_gDNA_ID_1620794_Annot_ID_168404 3000 nt of promoter + ATG

SEQ ID NO: 5492 - DNA, 3000 bp, Unknown
  misc_feature (1)..( 3000): cDNA_ID_3077243_gDNA_ID_1620794_Annot_ID_168421 3000 nt of promoter + ATG
aagaactctgaaaaagactgaaaacaacccaatactaaagattcaacaactgaagtcacaaccaacctaaacagccacaaaatccggtcacaaattacaacaattattcaaattggcattgaagcaaaaagggtctaagaaactcaccaaaaatctcaaattgattatggattcggtttctaattctcaggggctttaaaacacatatatatatatacgatacattagggttaaaaaaacaaggattcaaattgccaacaacttcccttcagtttcgggaaagataaactcgaattctctcattttttacgtttttgcactttaatcctctgatttttctctatttacagattccgcccagatttttgaatctctcagaaatcccctgaaaccagacagtttcaaaacgctcaatttaacccaaaatctgatcctatattttcttttaattttggatgttacaaaatcttacaaatttatgcaactgtattccattgtaaatatgatttatttcaaaattatctatgaaactgtatatatatagataaactaacaatgaaagaatatcataattattctaaaacgtaaatgttaacccaattataggtaaattaaaattttcaagagaaactgttacaaatgttcttacattgataccctttttaaaacaataccccaaaacatttctcgacaatcattttctcgtcaacaaattcagaaaaagtttcctgccaaaaacattctaacaatcccccccccccaaatcattcttgacaaaaaatttaccaccaaaaaataatgatcccataaattttgtgggaaatgtgattccaggaagtttagcgggatctggatttacaaggccattaaaagggttttaataaaaattacatgggttttataaggtttttaaaatatttataagggtttaaaaatatttacaactgttttaaaaagattcctaaaatattttatacaggattttaaagatatttacaaaggttttgaaggttttgaaggttgttcttaaaaggtttaagagaattgctggtatctttgtatctttgctggtatagaagattttaacaagatttacaagggtttaaaaaaaaattataagggtttaaaattgatatataatagttttaaaagatttatatatatttttaaaaaatagtttataaggattttctaattttttatcaaaacaattatgcgatttaattttctcattatgttcacttaataaataaagtgtaacttagtcatttaagacataaagaaaggtataactaaaaatggacaagaagagagggtattcttgaaaggaacgtttttggatagaattaactgaatttgtataatatttccaaatattcttttcaaataatgtttttaaaaatataactaaatatgctgaaaacaaattacttattttattatcaatataaaaatcaatatcatatcaccaatgtttaaatataattgaaaaggtaagatagaatttgctgtgattttattttgacttcaaatctataataagaaattaagtggaaggattgtgctatatttcatctttgactaggaaaaacaatttaatgtatatttgtgttattatctatatataactagtgtaattataggcaaaatcaaaaagagaaagttcagagaatatcataaaatgactactactatgaaaacttttgtcgcatttgttttgactgtcttttttattatgtcttctgctcattgtcgtactacaactggtggtagtccgggtaattggttattgttatatttatattatttaactatggacatgtttttgttttttgttaatgattattgattattgttaataaaacagggtatggaataggggggcgtacaaaaacatgctttacaccagctttatgtatttatcgtggagtccatgggtgcgatagttattgtaaaactaaaaattttgattacggctattgtagacaagaacattgttgttgtgttaattactaagatgaaataatttactaagtttattggtatctgattaagaaaataaatcgatagttcacattttgtttttaatacttttagacagcggaataaataaactttaccgaatcgaagtaagtttgatttttaagcaataacattttgcaatttaaccataatttataattaaatttaaatgtaacagaaaaaatggaaatgtaaaataaatggaaattcgatccaatacataccattaaaaggatgctgacccacaagagtgaagtaagcggatttcggctcaaagtcatgtttattcaataaagtcatatcactgatcgttttgcatagaataggccatgcatgttgtagtcaccaagagtcacggcacgagcattcgcaactattagacgtggaacattgttaccatgtgggccaacgactctgtttaccttgtatgccaccaatgttgtgttgtgggtgtcgtttgccaccaatgttgtgttgatagacaccaacggtcgtttgccaccaatgttgtgttgatagacaccaacggtgtgttgttcgacaacgagatttccagtttatctgtcttgtggttgctggtcaaccaccaaaattgtctcaaggataagaacccgttgttatcaagttgttgtcctgctttatcgtagacactaccatcatcatccctcaaaaatcctttatcctatatatcaaacaaaaccctatatatcgccacctaaacgatcgatcataactcccccacccttttaattagctctttaaacccaactagaaacctactctagcatggttaaggaactcatccaagtaaggtttaataaactcataagaacatgatgaataagaactgaataggtgatataaccgtatatttactgattttagctagctatgttttaggtatatgattttgagtctttatgttttttctcgaatctttttagtttcttttcaggtattctatgcaatgggacaaca

SEQ ID NO: 5493 - DNA, 3000 bp, Unknown
  misc_feature (1)..( 3000): cDNA_ID_2151143_gDNA_ID_1620794_Annot_ID_168415 3000 nt of promoter + ATG
ggaacataattggcacaaggaaagcatcttgtgggagttgtcttactggaatgacctcaatcttcgacataatattgatgtgatgcatactgagaagaattttcttgacgacatcatgaacactctcatgagtgttaaggataaatcaaaagataatatcatgtcaagattagatattgaaattttttgttctcgatcagacttacatattgatagtcagggtaaagctccatttccagcgtatgcattaaccgaagaagccaaaaagagtttattgtcatgtgtgaaacatgaggttaaattcccagatggttattcttcagatttggctacttgtgtagacatggagaatgaaaagttttcaggcatgaagagtcatgattgtcatgtttttatggagagaatactgccattttatctttgctggactccttgaccggaatgtccaccttgcattatcaggtacaataaatgttgtttaagttgccacacttttttaaacctctgatttaacttaaacatatatatatatatatatattttagggattggagcatttttccgggacttatgttcgagaactttacagaaaagtcgggttcaaattctcaaacagaacatagttttaataatctgtaacttggaaaagatctttccaccatcattttttgatgttatggaacacctacctatccatctcccatacgaacctgaattgggtggccctgtccaatatcggtggatgtacccatttgagaggtttttcaaaaagtttaaaggaaaagcaaagaacaaaagatatgcggcaggatcaattgttgagtcatatatcaatgacgagattgcttatttttcagagtactactttgccgatcatatacaaacaaaatcaaggtaaatataattatttattttacgatgcgcaagctatactttagaattaaaatcaattacatggatcaggttaacaagattcgatgaaggagaagttcatgtatatcatgtccctggagtacctaacatatttatgcacgtcggccgtccaagtggtgaactgcacgtggaatggctttcagagaaagactaccaaagcgcacacgcatatgttttaagaaattgtgactattttcaaccacttgagaggtattttaaatcactccttaatttaaaattttcattatgataagtttgatttatttatctttggttgtaaatatagtatgttcgaggattttctttttgtgaaatatccaaccttgtccgaaaaagaactctacgcgaaaagagctaaaaaatattatcaatgggttaaagaatatgtaagtctacatcattttagtaatttttaaaagtgatcatttaaattatgttgatattgttattgtttatttattatgtaggtaacatattggaaccctacttctccatttcctacttgggttcaagagattgtgcatgggcctttgaacaaggttaaaacttggccaatgtatttcacacgaggatatttgtttcatacgaaaaatcatggcgttagacgaaaaacatgtaactatggggtatgtgttaaaagagaaaattacgtggattcatctgatgaagcggatttctacggtaccttatatgatatcatagaacttcagtatgagggcatcgtcaatttgaaaatcacactttttaagtataagtggtatgatcctgtgattggtagaggcactcggcgaagccatggtggtgttgtagacgttctatcatctaggaaatacaataaatacgagccgttcattctaggtacataattaagaatacataaggttctctgttaattattaaataactttgtatttttattaatatgtataacttgtgtatgcagcatcccacgcagatcaagtttgttatattccgtatccatatacaaagaaaccaaaaagcatttggctaaatgttttaaaagttaatcctcggggaaacatttatggagaatatgaaaacaatgatccgactcttttgcaaacaaaaaatgatgaagctgtgttgctgactacaattgaagatctggtattagacaatccggtagaaagcttaaacccaatcatactcgattacgatgtcggagatgctgaaccagaagatgaattccgatgtaatttatcgtcttcaaacgatgatgaagtcgaagatgatgaagagtactaaatgtgtgctttatatgtatattaattttcctatttatatgaaatttttttgtttaagaatatatcatataatgtttaattatttgaataaatattacagaaaccttataattatcatgaatatttataattataattaatttgttgggctgtcggcatcccaagcccaagcccaaacccaataaaattaacgacggcaatacgactaatagacgatggacgtttaatgatattgggcttttaaatttcgagcccaaacccaaaagaattaacgactataatacgattaacttgcgacagacgttttatttgttgggcttagtaattccgaagcccaaacctaataatgttaacgacgatattacgactaacatgcgagacaccattaatttgttgtgcttttaaattccgaagcccaaacccaataaaaattaacgactattcaacgactattcggcgacaattgtctttattgttgggctttcatatttcgcggcccaaacccaaaaaaattagtgacgaaaatacgactacgttgcgactacctgtataaaaaaaaccctaattcgatcgattcacttctcatttcatccaaacaaaactcttcttcttcgatcttcttcttcaacttcttcttcttcgatcttcttctacaacttcttcttcgatccatttcatctcatatctacctaaacccagtcgagttcttcacctcttcttcttctcagatctgattcgaatcgaatcatcttctctttcttcgatcgtcctctttcttcgatctcttcgtctctcttcaacc

SEQ ID NO: 5494 - DNA, 375 bp, Unknown
  misc_feature (1)..( 375): cDNA_ID_3088971_gDNA_ID_1620795_Annot_ID_50495 3000 nt of promoter + ATG
agataagaactgggtggagttgaagggtaaatttgtaatccatggttcgccatcgagagtaatactataccttgaaggtccacctccacgagctgacattcttctcaacagtttagttgttcaacatgctaaaaggaatcgtccatcgcctcctcctttctacgaggtttagtccctttaccaactaaactaaatgacactagactgatggttcttatggggatactaatctgttttgtttggcagaatcctggtttcggagtcaatatagtcgaaaacagtgaagttttagatgggggaactaaaccatggttcactctagggaactgcaagttgagtgttggacaaggcgctccgcgcactctgcctccaatg

SEQ ID NO: 5495 - DNA, 3000 bp, Unknown
  misc_feature (1)..( 3000): cDNA_ID_3077329_gDNA_ID_1620795_Annot_ID_168435 3000 nt of promoter + ATG
ctccttttgtagcgcgcatctctcgggggacttgtattttctgtctggcccaatgcttctctctctctctacctctctcacatgcaaatcagcaatgacaacagtctaaagtctttcctttctttttctttttttgtcaacaagtgaaacactaaaccaaacgtcttttcttcttctgttttcttataatatgttttgtattttcggtgtgtgattagtgatctttggatggtataagaagtctgtgctttgtagtttttatgaatcgggtaagagagagataccaaagtggaaaaaatagacagttaaaccattgtatggctatttaaatttaacttggtaatttgttagtttttgaggcaaaaaaaaagattccgcttgtagtgcgtagggtagttgatgatcaggatcttaggacataaactcgcataagttctaggttaggtttgattgaaaacaaaacagattacttggacttttaagttttgttccatgtgtttcatctgaagtaataagtttgcacaaattattaccaaatagtctgcccatgtccgaattagttgggtttaacttggaacaataatgccaataaaaagacgataaaaaaggtaatggaccaataaataaattaaaaatagttaaaaaaattgagttatttgtcttaataaaaattaaatatcagaactattttctattcttaattcaactttataaaaacttttttaaaagaaaaaaaatctatacaaagttttcctgcaaatatagaaaacattttctaaaataaattgttgtatgttttgaaaagacaaagaattttagcagtattttgagtattatacctattttgttttttggactagagtattatactaaaatcaataagttggatacttgattttgtttttcttttttcctttttgatggttttgtttcatatttctatcttgtgtttcatataataaggacatctattttaatttttacaatttatcacatttactaataatgttcttaagaaaccaacaattattgaaccactattttgttactgtgcagtcatttattttctttttctcttacttaattgtctattctttaccacctaaacacttattgccaacccactaaaagataataaaaatttgttttcttagttatcttatgcgtattttgagtctaattagtcaatacatgttctatctgtaagaaatgggctatatagagtagtattaaaaaaaaaactaaatcatttttagggtgattaaagatacatttatatttcgtattttatctttaaaatatcagtttgtaagatctaggaaaaattgataatgacaataaatatgcatgtttttatataaaatagcaaagataaaatttatgttggtaatgtttaacatttgtcaaaagaactgtaaatactttcaaaataacgatttttttattggaaaaattgaacctttatacctcagaaaaaacaaaaacaatataattccacatatgaaatattgctccctatataactgtgggcaacaataatatatgaatttaattttttaaattaatacataatttttactgtagatgatttatgttaattaaaggagatggttggttggtggtcttttcaaaaatggaataatcacagtttctaactgttaataagaatgcaataaagttctaaaagatactaattcaacaataacatcaactagatatgttttatctaggttgtcaatttcttttgttcagtttaataatcattttatataaacaaaatcacaatatccttatgaatgtaaaatctttaaaatagtcttaggttttcaactttctaccatcactgtaatttaaattcaagttttcataattcaaaaaaataagttatgaaaacaatgattattttcctaaaattatatttagcgtgaaaatcgccaaaatgtcaatacataaaaattaaaaaaaaactgaaattcaatttctacatatatttacttataagtagatctatcgatctgtttaggtacttaataataaaaaatattttggttcaccgctaaaaataaactaaaatgttcacctccttttattcatgctaataagaatttaccatctaatcaaaaacttaaacttatttaactattaaaattcatatgtcaccaaaacaaaattatgtatcagtttggattgatagaattagaatttagattttataattaaataaaattatatatcagtttaggtttattaaagtgtggttagaaattaaattttataataaaataaatttatttatttattagataacaggttttgattgataaaataaaatagggtgaacaaaatagttaattgtgacaatttagataaaaacccgaaacataaaacctacacgaacacagatgatgattatagatagacacatgcacgcacgtgggctgaagcaggaggaacagtaataggtgtagtcagtcatttttttcacttcattgcactgccaaatcttttgatcactgttaatcgttgaataaaaacatccaacgcataagtcaatcccctactctcacttccactgcctctctttctttctttctttttttttcgttttccactcattaaccattacttactgactcgtagttctattttggccatttattaccgtcagttcttgtaacctggccaatttgcaaatatgtactttatttctagatttgattagcttatcatctccttttattttcttaacatttgaccattgattgaaaatgattgataagtagctatgttgtatttagagattagtttaattagtgtatctcttgagtgttttattgcaggtttagataacctcatacaagtcgttacatagttatgagtaaatgagtttattaataaatttagagaacaatctatgcctaccggtgaatttttatataataaattgaatgttttattttattgttataattgactttctaatctaaaagatagaattct

SEQ ID NO: 5496 - DNA, 3000 bp, Unknown
  misc_feature (1)..( 3000): cDNA_ID_3077307_gDNA_ID_1620795_Annot_ID_168445 3000 nt of promoter + ATG
catctttctcttgatcatcaaaccaatgtactaaacacatggacatcagatgatccaagttctatgttaggtggaaaacgttcaaactgaattggtggaatggtttgattctcttgaaagatgattagggaaagatttaaaggaatccataaccttgtttggtttggttgttaaaaagataagagaaagatttttcagcttgaagttatgtgatttaaactgtgtttttcagcttgaagttatgttgttaaatagatgcggttttagaagcttcaagttagggtagggtgttaagttaaagctctttgatattgatcacagagagcaataaatcacatagagcttttacttacacttaacctaccaagcattcaataaaatagaccataactatgataatacttttacccaatgtaaaccactccaaaatacactagttaacatgcatttatcacagttaaaaaacagttagcttttattgcttagaccaattcagagaaattttgagcgcaataactaagagagagcttttaaaagcttcaagttagtattaggtgttagaatttttttttttttttttttttttttgatcaaaggtgttagaattttatttaaccatagagaacaaatactttcttctaagcatttaaaatattaatgtaatgctatctcaactcaaaaatatattgcatttaaacagagaaacaaataaactaatcaaaagcagacaacaaataatcaaaaccggacatcaaataatcaaaagcagacatcaactaatcaaaagcagacatcaaataatcacatatcaaaagcaaaatcaacaaatcaaactcagacaacaactactagatgaattaaagaaggctcagttctaccttcgtgttatcaagaaatagtgcaatctgtagagcgtggtaagggccaggacagacaggatatcagaaatgtacttctgcaaacatagcaaatgtaatttttaagccataccaatataagaattgttaataacttgaaatcaatgatgacataccttgagattagaatcagccattgtttcatgaaacgctttaagagttacatactggggacgcagaaactttagtggtttgggaactgaagtcattgaacttgttaaagctcggatttcctgcctacaaaaccaaaaaaaaattaaaaactccaacaagggtagaacacaaggagcagaaaagaaagaaaaactttataaattatgagcttcaaagacagtaatctgaaaacccgaagctaatcaagtcaagaattacctcatactctcaagagcagccttctgcaagtccggattaggatcctgaaccatctcaacatagagcttaaggttctgctttagttccaaatcctcttaagactacaatcacaacccaatgtaagtcgagtcattagtcctgtgaacatatataaaaaaaaaaactctcctcacagcacaagttagcaactttttaatccggctatactaatgacgaacaaaacattcactttgaacatgcttattgttttgtttttgtatatctccttatgctttgtaaaaccacgtacaatactgtaattgatatgttctcgtaataagaaaagaatacgaacccacttagtcttcataattagattcatcatatcgaatcaaagatgaaaagatttattacaaaaataaaccaaattaaaaccgataaataagtttttttctactatagacacaacattccaattgccatggtgattgaacaaccataggaaaaaacgattatcatcttcatttcttctctctttgttcttttccatcctctctttgttcatttccatcttcatcattctaacttcctctttgtaacgcccgtgaaccggaaaatcagttagagtttgtttttaaatcatccggtttaattgattgggttaattggaaaccttagagtatgcctataaaagaagtaaactcgaaattagggctttggttagccacttttcgttttataaaggagaaaaagagagaaaaggagaacgagcagaatcgttagggtttgggagaaatcagtttcgtcatatcaaatcgtggtaaaaggtaacgaaatttggcagagttattcccaagtcctttatcgttattctccaatttacagaattggatttggattcaaattggttgagttattcgcagtttcgtgagacacgttttctcagacgcgaattaggaccagcggagattgaaactgagatcgtggtctcgtctgttttccgatcggcacgagattttgtggtcagctttgtgacgtctgcagctaggatttcaccggagagattgaatagttaacggttagtttgtatttgagggtttcgtctttgagactgcttgtttctggtttttcctgtccagtttgcttcaaggttgcttttggttgtggactttttgtaggacgtttctggactgtttcagacgcaaggagagtctctcctgggtttaattgctattagaatcaatttgttaaggtgagtgcgtgaccatgagcttatctgagcgatagggttgtgtgatttgttttgtgtgatgatatgtaggtgtggtgaatgtgttttggatgaattgttcaatgactggtttgtttgtattgtattcgtgattatacctttttatttgcttgtgtgtatagctcgtagatgggaggatcgcctcactaagtatttatgataatacttacgcatctcattgtgttgttgatacaggtaaagataaagtgtgatcgtggaatcatggcaaggaagagaggatgatctaggaactcgtttgttttatttttggtgtttttggttattggaacccggttaggattgttagttattcttggttttgttggtcgaattatttatttattcattaaatagtatttttgacttgtggtttaattgttattctattggttggtttaattagatatttatggaaatatttaattattttttttaaaaaaa

SEQ ID NO: 5497 - DNA, 3000 bp, Unknown
  misc_feature (1)..( 3000): cDNA_ID_3077285_gDNA_ID_1620795_Annot_ID_168461 3000 nt of promoter + ATG
tttttagcaaccttttattctagatttttatactttcgagataagctattcataaattggatccctgtttccagagttcattatagattttaatatagtgaagagatcttttctaactcttttcttcttattgattttttttatgctttcttattcaaacatgtcttgttattcaatgatcatgtatgagtagtctgcttgttagggttagggtttctaaatagggttatagatgatttagtagatcgcccatctattaggatatctgtaagattttttatctttggttattctaagtgctagttctagagtacctaactagaacttgataaataataggtctgcccaaaaaggcatctattaccagaactactatttgatgagccgagtttataggtgtgtaaacccgattagcatgcatgtttaggattagggatttgccaagcaaacgctgagaatctttagctttattcatagggagtaatgccaagttaatgctgggatattctataatagttgtttgagattaagaacggttcgataacatcctagcaactattagatctactaatcatctgttttctgagaataccctaagcctaacgttttaattatcttattttagaaccccataatctactatcgcttgttgctttctttaattatcttacctttgtctagcttgatctcgatacttatgtctattttgtgaacaaaagagctttgtcgaattcgacccttaaaaactaacgatctctttttttgagggagtaagcttaaggtcaatttgatccatatcatcttcgtataaaatgacgtactaaataatggttggtagtagtgaaagactatccaagaaatcattcaaaattccgcgatagtcattccattgaatgtaagttcactaattttacatagaggacatcttgaagacattcccgaaaatccaccatgtgaagattctgaagatcatgataccgatcttgagatgacggattcaaaaagttccaaagaagaataagaccattacagagaggattattctcttgggaatttatgttttactagattgataacccgtgcttcgctcgggtgttggtaccggatcccgcaccgatagtccaggacaaaccaaagattgccatgtaagaagaaaagggacccacatgaagcacaacttggaatgagtcccgaagttgggtgaagaatgttgtgaggtgatcacgtcgcgagatagagacgaggccgatatgagagcagtttggtttagatatgttggggcgagtgttaaagcccatgaacgtcaaagtcaattcaaattcaaacattgaggcattaagtctgaagcagaagcattaagattagataccacattcttgtataaataatgaaggtcttgaaccatgtaatatacacacgcaattctcctagcaattatactatagccattttttatatcaatccaaaagctctttacatccgatttttgtcctcaagattaacccttctcaaaaattaagtaaatatttgagtgtgtgaatccgacatccattttttttattacaagtaaacatgcaatttgagactcttttttgtgactctttttatggtcgcaactatttgcgacgttgtaaatactactttgtgactatataacgaccgacacgacatcaacgcaaaatcgtcgcaaatgtacgactccattatatagtcgaagaatggtcataaataagcgacgtttgtacgattcatttgcaacgtagtagaaatacaatttgtttttttttgaagtttcacaattgtcacaaaagagttttaaagttgtggctgttttgcctcgttttagccactctttgagaaattgcaatataagaatctagaatgattaatatgttaagtaaccatattttaccaattatttgaggtaatatacgtatagattctttctatttattttttattttacatgttttaaagcaaatctttttgaacaccaaatcatatacaagatatgttacataagcttttcaaagaaaggttaataccttatatatgttggaaaacaaacttatgaaataatctttgtatctcctacaaagaatgatatacatcataattggactgtaactgattcaaaatactcattattaatgtaattagatcttaaaattaagaaatcttaaatcttggcttgtgactcctatgcttacgtcgcaacgaagtggctcttttgcgacgactttgccattctttagcgactcctcgagatttaaattttacagtttgataatttagaatgattaatgttaactagcaaccattttggcattgatttgagctaataaattgatagattcttctttaatatattagttttacatgttttagactaaatctttgtaaaagccaaatcatgtagaagatgttacataagtttttaaaataaatgtttctaatctatgtaagtttcaaaacaaacttaaccaatgattattttcctcttaaaacggaatctatacttcagaaatggtctgttagtgatcataaacacttataactaatgtatttacatcttaaccttcagaaatgttaaataattgtttgtgactcatatcggtggtcacaaaatagcgacgtgtttgccactaccttacgacgaatttggtgacaaacattgagaccaaattgcgactattgtatttacgcgaaaatatttttagggttttgattaggcggtaaattatccctcgtgttttttcgtttgtgactaagttaagactaatgttttttgctttgtgacgactttgcgactccttttattttattactaaccactgaaaagtcactttcctcattttctctatctcgaattctcgacactaagaatttctctggggtttctctcctcaaactcgatctgattcttttgttctagggttttcactcaattggatctttctcaatctcctctctctcaatttgattattttgttctccgtg

SEQ ID NO: 5498 - DNA, 3000 bp, Unknown
  misc_feature (1)..( 3000): cDNA_ID_3077303_gDNA_ID_1620795_Annot_ID_168448 3000 nt of promoter + ATG
cacatgagtcagaaaacaaaatatgaccacatgaaaagctttataaaagtttgtgacatcatttattagttaacaatacctcagtacccaatatcaatatcaatatcattatgattagtttactaaaaacaatgtttagccaatatcaatatcaatattataacagtttgtgacatcgtttattaattaacaatacattagtacccaatatcaataacaatatcattacaattagtcaactaaaaataatgtttagtgtgtactatgtagattaaatggtttattttctttttcataaatggtaaagaataaagcttttgagtttggtatgaataatggaaatattgaagtaaattgaaaatccttttaattgatgatattctttggttttgttatcaatggaaaaaattgatatacaatgattttatggttaaaatagacataataattaaatgataaaatacttgcagtttgaagcataactaattaccttgaaatccttgattcaccacatatccgataacaccagggtaatccctccaatcccgaaacccatcctaagtatataaaaaaactagtcttattattataaagagaaactaaaattcttaagagaaactaaataaattcgatcctaagttgtctcctcctccagcaagtagtatatgttcttgaaccaaattggatctgcaataacagcttcaagcttaaatcaaagtcactatataagggtttttatgacatgttggcgattccttctatgttgcctccatctccaatgatgatgtaaccagagcattttgatctttcattggagtactcattccatcagtgatattgtactgaatgttggacacacgctctgatcgctcgtaggcattaacatgaccagcaaagatcatatcgactttgtttttgatgaaccatggctcgaacttaactctcatgctctcaccttccatatagtaataattgttgttgttgtaccatggaacgtgaaccagaacaatcagccacgaagtctctgatcggttaactttctcgagctcatccaagagccaggagttctacggtgtgtatttgtctatggtaaagtgtcacaaaagaaaaacattaacattgtaatatagagtaaaatataataaagtgtgagtcttagatcgtaccataagctgagtaagaggagagtacgatgatgcaagtcgaggcttgtttgattgagtaccaaagtggagatgtactctatgaggctctgtaaggaacgtggtagcggttcttgtacgacttgaagggttgagtctccccctacaagcggatttaatgttttaacactaaacctaaaaaagtttgaaaataaatatacagagtggatcttactatgctctaagcgtaatgcaactcgtggttccctgcagcccaaatccaaggctgatgctcggcgcttggttccacaaacctgccgtgattaccattttatttggtcttggttaggatggtcatcaacataagacaaatctccaccaaaaagcaccactaggccttttggattcgacatgtagttgtacaatttatggtttagagacatagatttgtccaagatcacctaaaaaaaaagttaaggttactgatattaggttcaaaacatttaaatcatagttgaaacttgaaactcaaagcctattcactaaaataaaaaacactcttctacgacctctaatatatcaaatatagcaagtcatatttgttaatacataatagtataatcgtgaagtaataacgttcatattgatttttacaagtttagaaatatatgcagtcctggaataaattggagtagtagaacgagaaacattaaagcacttattgaagacgagtctttaatatctcttaataactcttagaaaatctttgtaattttttaatcttaaaataattaaattatatttaattttcaacataaatccttaaaatccctaacatgactctgttgaaactatgaatctgtggactatatacctataacaccaaatgtgtaggaaacatctggaccaacttttggaggagtcatgaagttgaattgtctagtggagctaccagttccaactttatggaaatatttagttttttacttagaaggaaaaagagaggttactttacttacaaatttatatatatatacatatatatatatatattacttgggatatagtcaaataaatttataataactcaagcccttttattgtggcatgatgaagataaccatatgtgtaatcaaagtatctataggacaaagttgtcgctataacattcttattatcactacaatcactactggcaattcaatatgtaatgacattagaacaatatttatttaatggcgttacccacgagatgatcacaccttgaccatcatgatctccttacattatgtgaacatgagaaagaaccaagaatgaaagctccaagtgatgaaagaaacaaataatatgtaaacgtgattttataaagaaaaactggaatcacttgctctggagcgttatagtggtaggaggggaaaatgttttgagtggcatttcttcagatggttccgatactcggacataggcactgtgactccagcttggctaacgacaaaaatgcttaataatgcaaccacaaagcatacaagtgctaagtgattcaaccccatttcgtgtttagaaaattctaatagattctgctttgtaaatgataatttttacgacgggatcgatgtgaaatgcaaggtatatgcttttgacgatgattttatttgaaagaaaataagttagaaaagtattctaagaattattcctctttttcattttcaaacaaaaaaaatcagagagaatcatacagttttttaattttttctcccaacaactattcttattataattttatgaaaactaattaaaaaatatttgaagagcctcaaagagaatatatattcatagaaacaaaaaaggagataagatc

SEQ ID NO: 5499 - DNA, 3000 bp, Unknown
  misc_feature (1)..( 3000): cDNA_ID_3077329_gDNA_ID_1620795_Annot_ID_168436 3000 nt of promoter + ATG
aataagaatttaccatctaatcaaaaacttaaacttatttaactattaaaattcatatgtcaccaaaacaaaattatgtatcagtttggattgatagaattagaatttagattttataattaaataaaattatatatcagtttaggtttattaaagtgtggttagaaattaaattttataataaaataaatttatttatttattagataacaggttttgattgataaaataaaatagggtgaacaaaatagttaattgtgacaatttagataaaaacccgaaacataaaacctacacgaacacagatgatgattatagatagacacatgcacgcacgtgggctgaagcaggaggaacagtaataggtgtagtcagtcatttttttcacttcattgcactgccaaatcttttgatcactgttaatcgttgaataaaaacatccaacgcataagtcaatcccctactctcacttccactgcctctctttctttctttctttttttttcgttttccactcattaaccattacttactgactcgtagttctattttggccatttattaccgtcagttcttgtaacctggccaatttgcaaatatgtactttatttctagatttgattagcttatcatctccttttattttcttaacatttgaccattgattgaaaatgattgataagtagctatgttgtatttagagattagtttaattagtgtatctcttgagtgttttattgcaggtttagataacctcatacaagtcgttacatagttatgagtaaatgagtttattaataaatttagagaacaatctatgcctaccggtgaatttttatataataaattgaatgttttattttattgttataattgactttctaatctaaaagatagaattctatgaaattgtacacacttttgaaaacaattttttttttaatagaaaattataagaaattagatccatatggttatgggtattataatatttttatttatatatatatatatatatatatatatatatattcttcttgcatgaccatattaatgagaatattgggatcagagacttatttatagtgtgtttttagtctattgcacttgtgttttggaatattatgatatttaattcaaagatgtacccttaatgaatgatcttttatgatgtcaatgtttcagcatcttatactgaaacagaaaataagaggaggtcttaaaggaaaagaaaacatttcgaatgcaaaaatttaacctttaacattttcgattttttttaatgaaattctaataatattggttctaagcagctgattttatttttttaatagtaagaaataatatatgtatacatatatatttaaatatttactatcaaaatttccggcatagcaagtcataatttgtaagaaatcttacattttgttgtttacaaactctcacaagtcacaatgtaagtttcggtctagtgcagtgatgaggtaaacaaaaaaaaaaatctatcgatgagccaactttttgatctagagccctaggatttgacgatttatatataaataaaaccctaggattttcgtttctttttgtataaaaatgaattcataggcactctatacgtctcatgaatcatgaaatataaatcgagattaaatagaaaattgaatgttgaccgtggaacagaacaagtgttgaaagaagtgtgtttgcagcatggtcttatcatagagccaatagttggaaattagcagaatatcgtataatatccactatcctgtaaagcatttttataattccttttttttttctcggtttctaatgtaatcttctatccgataacaaatattcggatagtgtgatctctccactaatatacatacgaaattacgaaaactaaaattataatttcatcgatttgattaaactccaaaaacatccaagtcttgcatcaaatatgtacatttctatcatattgtttataattctttttttgttatccgtaagttttaggcagaaacccgtacagtgaaaccgaggaccagaacaagataaacgtagtcccctctcctaagtatagaattataatgtgacacatgatcacaatttgttgaacgaactctatgttcaaccactagactacaaattcttgggtttatatcgtattagaagtatatataaatcatacatattttttttaaaacttttttcttgactattcttttaagaaaaaaaaacatttcattactagaaaatagtacaaaatatatcattcaacctagcaagaaaccatagcctgaagtagccgcgaagacctagttgcttaaacactgagtggttcatcttaattcgaatattataaaccacattttaattaagtaaattacttagtcttgttctaatgtataaaatagcctatgagaggaaaacagaagagagaagcctttgccttatctcttgtcccttctctcttacctttattttaattttcaaatatttctttttgctcccaaagcaaacgacgtcttgtcaatccactcaagccacccaacttcttcattattgttaatctctctctctctctctttctctcttcttctctctttctcttttttttttttttattttcttctcttccatgtcacttccttgacgaattctatatacctagttcgttttttcttcctcaaatatatctttttcaatttatttggtttttctttgggtgcaacttcacctcacaaaattttctctctttttttatattaatttgagttaggcctttttgatttcatagatgagtcgtctagtcgtctggatttgatgtggttatagtcttacagagacctttgattgaaataagaacaaaagcaagaatacatacatcctcttcatcttacacccatccttttttatttttctagggttttatttttttttaatttattttttttctttgatttttatattctctctctctctcaaatctttactcatctgggt

SEQ ID NO: 5500 - DNA, 3000 bp, Unknown; identical to SEQ ID NO: 5499
  misc_feature (1)..( 3000): cDNA_ID_3077329_gDNA_ID_1620795_Annot_ID_50496 3000 nt of promoter + ATG

SEQ ID NO: 5501 - DNA, 3000 bp, Unknown
  misc_feature (1)..( 3000): cDNA_ID_2150917_gDNA_ID_1620796_Annot_ID_168474 3000 nt of promoter + ATG
ctataaagtttaggagattgttaagaccaaattacccttaataattttgaatagcaaagaataaaatccaaatttgaaatcaaaattgaggccaaattagacaaaatttcaatttgtacttcccttttaataataaagggatatcttgtttcattaaatttgtaaggactaaacatataattaggaagttgactaaggatttttcaacccagaatccttactaaaaatgtatatatggataactaaatttaaatacatctttcttcaatatattttcttattttacatttttataaaaaaaattaatataagactcgtaaattttaaaaatatcagtcaatgagataggtattgtgattaaatggctattgtacttaaagatgaagtaataataaatttggaaagattaataatcaattattttatttttttacaaatttaataaaatagaaatttatatttttatactttttatattatttagtgacaaaatatttagaaaactttctatattttcaaattttctttaattttcatatattgtttttttccattttacaaaaaatctaaaaaatagaagataataataatttcataaatgaagtcattatcctaataaggttttcgatctactaattccctattgagaatctctaaaagccaacaagaaaactactcaaatatgctcataaaagagcaaaacatgtttaaagtagaaatcaatgtaggaaacaagaagagaatagagtttagaatgttcttcttaagagggagctccctaggggtttagcttccatgaacaagtaagcataaagggtaaagaaaattatcaaaagttaggtctaaacaatgaactttaaaatctatatataagtttctaaaaccgtgcaaggacttcttcaaaaataaggagaagttttggggccaatttggatatatttaaaacttcaataagttgcgaaattgaattgccgtcagatattggtgtcccttgacactaggggtggtgtcgattgacacctacgcaaatttacgtctccagattgcttttgcatcataagttctctgttttgatccagaatgttccataatctcaaaatgcatcccaaacatgtaaagacctgaaaaagactataaaagagtctagaaataacaaaaaaactctaaaaaccagtattttcacgcccggtccgaccggttgaaccgtgacccgaacatttttttggtttgggtttagtgctaaaacctgacgggtgtgggttttaaaaattctcttgattttggaataaaatatgggattttagactttattcaatcatttgtagaaattttttcagttcttaaactcatttgatgttctagattttgatgaagacttcacaatgccgctttaaaaaatgaatcgaatggtgagtgagacacgcgatattagttgtgtgaattcacgatgttttattaatttatttccgtcattggtgatcttctagtatatttgttacggtattagacatttagttggatttacaaaatttaatcactttattattattgtttggtataaaggattttgtattttcattcattctgtaacgcccgtgaaccggaaaatcggttagggtttgtatataaaacatccggtttaatcggttggattaattagaaaccctatagtgtgcctataaaagaaaaaaactcgaaattagtgctttagttatccacttttcgttttataaaggagaaaaagtcagagaaagagaagaaccagaatcgttagggtttgggaggaaacgttttcgacatatcaaatctttgtaaaaggtaacgaaatttggtagggttattcccaagtcttttatagttattatccagtttatagaagttgttttggattaaaattggttgagttattcgcagtttcgtgagacacgttttttcagacgcgaattaggaccagcggggattgtaactgcgatcgtagtctcatatggtttccgatcggcacgagtttttgtgggaagcgttgtgatgtgtaaggctagcgtttcaccggagggatttaataattaacggttagtttgtattttagggtttcatctttgagactgtttgtttttgtttttcatgtacagtttgcttcaaaggttgcttttagttgtgacatgttgtaggacgtttctgaactgtttcagacgcaaggagagtctctcctgggtttaattgttattggaataattttgttaaggtgagtgcgtgagcatgagcttatctgagcgaataggttgtatgttttgttttgtgtgatgatatgtcggtgtggtaaatgtgttttgagtgaattgttcgatgattggtttgtttgtgttgtatttgtgattataccgttttatttgcttgtgtgtatagctcgtagatgggaggatcgcctcactaaatatttatgataatacttacgcatctcattgtattgttgatgcaggtaaagataaagtgtgatcgtggtatcatggcaaggaagagaggatgatctaggaactcgtttggtttacttttatgttttggttattggaacaggttagggttgtgttaggattgttagtcattcttggttttgttggttgaattatttgtttattcataaaatagtttttgtgacttgcggtttaattgttgctttattggttggtttaattagatatttatgggaatatttaattatgtttaaaaaaaatgggtcgggttgtttcaatttggtataagagcgatcacaattctaggatgtgtagaaaaattaattgatgaattattttcttgatgattgatgtgggatgagctaggatgttagcatactaaggtttgattatggagtgtttagtcaattgtgtgttgttggaggcctaccatcatcttctccgaaccttaaatgaaattccacgataagttctttgtgatatattcgtttgttctagtttcttaaccttttgtacctgagtagcgcagatg

SEQ ID NO: 5502 - DNA, 3000 bp, Unknown
  misc_feature (1)..( 3000): cDNA_ID_3077368_gDNA_ID_1620796_Annot_ID_168487 3000 nt of promoter + ATG
agtaagcttccatggaaggagaaggggaagggctaaggagaagtccatggaagaagaaaaactccggaggtgaaagaagaaaaggaaggtgattatgttgccctcgcttcaaagctgtcaatgaagccctccaagttaaacgcaaaagtggaactcatgggccgagttttcaaggaaccgtcgagacctttgtgatccatggccaaatcttgagaatggtaatcggatatcccagtccgagtgtgatccaagaatgcttgacccgaaccaaatcaaaatgacttgatccacgagagtggtttccacagctaacagaagtaagaagaaatccgatttggaaggaaagaatcggatggatttggaggattcatcggtcaagagatcgagttgaatcacccgaccaagactctatggtcgagagctagggacttgaagattttcgaggaaaagatgattaattttgtctaagtatttggagtggtaaagtgggcgaataagggttgcgttatttatagaagtgaaggaaacttggagccgaatccattcgggcgagtcatgcaagtcaaataaagcaaacttggtgaccaagtcggctcgcgtggagctgaagagaatagactaggatcccaagtcccttggtcggacaccatgcaaaatgcttgccatttgtcattgccacacggccgaattcacttccatgtgcgagtgattggaacgcgcattgccaagtgtcgatgggcttgagctaagtatcttaggactctaactcttgccaaacgaccagaccctctatataaaccaccctcctcacttccgaacattcctcttgagaatcaaaaaacgacttagaagttttcgagagtttttagtgagtcttagtgagcgtttttgaaagttctaatgagagttttcgcgagaggttttagaggagattaagagacgtttcaaggagatggcggaggaagatcttgaggagaaagtcgagtttgtgagtttgcgcccaccttttcttgttgcattttcatgctagggtttcatcattttcgaatttggttgcatgttgataagctatgcccttaatgcatgtagagcacttagaaacctcatcgttcatcttttccatgcatgtcaaaaatccgactaagttaaatgaatctcatatagaactcatcacccttcatgcttgtctttgttattcataatccggcaaggttgtgtgttgcatgtagatttctagggcttgcttgtttatgtgtttcttgcttgtttggttgtgttgcatgttttgtttcttttctttgtatgtgagtcttgtaagtcctgcttgactgtcgccatctcgaatccatggcggatgagagatgtgcattgtttgagtgtctaggtgatcgtggatgcggaatccatggatcatagattgagtctagtttagggtgcttgccattttctgcttgtgtgtgtggagccttcgagccttggtcccaaagggaacgctcgttggttagcctcggaacctaggtcgagggtgcatgacgatgcattgtggacttatctgtatccagtgtgggtttaatagagtcggacttattggtatcctatgtaggttgagtcagacttattggtatcgtgtgtgggttcatagagtatgatcttgttggtatcctgtgtgggttcaacaagtggttggtcaggttgacggatccatgtaggagaacttaacttctgacgttttgtgtgaggaggaatggagcacagggcccacatgttgagtataggttgagtctaggtcgagtctaggatagatcgagtcttgtccagtttgtgtgtcttgtgtgtttctttgcttcctcatgtttctctgatccctgttacattctttctttcttgcttgcttttgttcgttagccctctaggatagaactgcattagttggcttagagttgccataggttgtgtgctgcatggtcccgcctcactgagtaatgctagattactcatgattctacttttctttcaggcgcccgtagtctcggctgtcaagagggaagacgaacgcaaggcctccggattaggttattattttttcttagttgctttagtaaaacctgattttgtatttttacgagttttatatgcggatctgtttactaatcgtttgtttttggtaggttttattcgaatatcatttaagtacaattgttttacaaatgcggatggtttgagatgatacaaggctttgtctaagccggacaacactaggttcgccgcaatggttggcaagcctacgcggagaatctggtggagagaggaccatatgcaatttggccgagggcttggaaccctaggactttggcgagttgcgactggttctttccaatttgtgatgccacccgggacggtcatggccaggctcgggggcgttacaagcgtgtgcggcgaaggtgcggccagaagttggccacatcatcgaccagctttaggcgacaagcaggtgggtaagcttcttcagtgttttatggctgaggatcggttatgtcgggccgccataatcatgcggatgccgatcggccacatagctgtttctggttggccgacaagtaggtagtgactcagggccggctgtcgccacctcagcatccctaggacggctgtcgccacctcagcatccccaggacggctgtcaacaaatggattgcgctgggtgtctctagcggtgactcgaggccatgtgtcgccaagaggggcacgactaggggcgaggcaccgatgatgtagtagcttgataaaccgacctaaaaccctataaatactgtcgacctcattaggaaacctccacccaaaattcgctctaagttagcatagatgagaaaacccgcaaaaagttctgattcggaagtcggtaagttttccgaccttagttagtgttagtaaccgccgattagtccttaattgagtaagattatcatttgatagataaccaagtaggagaaggaaccaatg

SEQ ID NO: 5503 - DNA, 3000 bp, Unknown
  misc_feature (1)..( 3000): cDNA_ID_3077357_gDNA_ID_1620796_Annot_ID_168491 3000 nt of promoter + ATG
agtctttaccgttttatcaaattctaaaaagaaacaaagaattccttgggatgagaaatgtgaagaagcttttgggtagcttaaagcgtacctaaccactccacctgtattgtccaaacctgaactggatgagaggctctatttttacgtttcaatgtcgaatcatgcagtaagtggagtcctaatctgggaggatcacaacgaacaaaagccgatttactacataagcaagtcaatgacagatccataaactagatacacaatgatggagaagctcacatttgcggtggtgacttcagcccgtaagctacgtctatattttcaatcccaccctatcgaagagttaactaaccagccacttcgaacaatacttcacagcccaagtcagtctgaacagttggtgaagtgggcagtggagctcactgaatataatataaagttcaaaagccaagtcagcatgaaggccaaggttttagctgatttcctaaccgaactaagtacttggtgcgccagaacaaccggagagtcagacttggaaattgcatgtagacggatcttcatcaagacaaggattcggagtgggaatcaagttggagtcacccacatcggaaattcttgaacagtcattccgtctactatttagtgcttctaataatgaggcagagtatgaagccttaattgcccgacttcggctggcacaaggaattggagctgaagaagtggttgcttattgtgactcgcaattagtagttaaccagttcaatgtagactatgaggccaaagactcaagaatcgaagcatatcttgaggtagttaaagatctttctaaaagtttcaagaagtttgaactggttcgaatacctcgaaaagagaatacaccggcgaatgcactcgccatattagcatcaactttggatcctgagttataaagaatcattccagtcgaatgcatctcggagtggagcattaaagacaaaaaggaaactctcgtcattacagatctcgagcagcgacacgtgcccatggtagaattactgatataacactgtttttactgatttatctatgttttagatttaggattttgagtcttttagttatttctcgagtctttttagagtcttttcaggtattctatgaggagggacaacaatggaaatgaggagacattttggagcaaaagctaaggagaaggaagctaaggatgatttcagttccatattcagagagagtgtccatctacacactcctggtgtcgatcgacaccagtttcggcctagtaaagaccatgacgtttacaagtttataaaagtgcaaatttgccccaaaagacttccctatttgcattattagtccctgaatgttttataagacatatatatagatttagaggtcattgtttagacctaagttattttctaccaaatttccaaagagacataagctattcatccctattttcagagattcattcaattcccaatagagtgaagagatcctttcatactctaatcttattttctgtgtttatgctttcttacttaattatgttgcttgtttcaatcaatatgtctgagtagtttgcctgttaggaatagggtttctcattagggattcatatggtttagtatattcgctccccttgctaggttatctttagaattgttcatctttaattgttcttaatgctagatctagagtaattaactagatcttgaatctaaacaatagatatacctgcaataggtatatgtagatggattattatttgatgagcctggtttatagttgtgtaataagaatcggcctatctactaaggtgaacaatcgaactcgtttagaatgcatgtttaagttgaagatctctcggcttctccggttattcttaactataggcatagggagttttgcggaatgtcactggttattccataattagagtttgagtttaagaatggttcgataacaacctagctatcattagatgtactaaccaatagtttcctgagaataccctactcctatctctttatttaatcgttacacaaccttcaatctgctgtcttcttactttgtttactttttatttcaatcatttcatgctagcttaatcttgacatttgattcattgtatgaacaaaagaactttgaggaaattcgacccttaaatactgaacccgatctctttttggaaagagtaggtttaaggcaatttgaaccatatcaaatttggcgcagttgccaaagttcttggtaatcaccattgagtttagtttagagatttcgtctagtttttacttttattttgttactcacgcgtttcttgttttcttcttttctgtgtttcaggtgtatgtctaggcaaacaaagagcacacaatagaaggagttgatcaacttgtcagttcttaacttgggaaaactcgaacgtaccaacagcaaaattcagagattagcaatggctaacagagtcatcagagctgatgaggaaggagtttgagagatgaggatgggcaagcctaaaatgaggctggtcaaagattggatgatcatggactcatcgaccctgaggacgccaatgaggatcagccgcgcctcaatgcgcaattagctgtcagagacgctgcagggctcggtgtcgagcgacaccaactgggtgtcgatcgacaccttcatgaccagaacgcagatgcgattggtgtcgaacaacacaacagaggtgtcgatcgacaccaaccccagattcctatagctattcctcctgttacggatccacatcgtactcttggggatttcaacatgtcggacttattctatgattatcgatcagcgattgtatccccacctttccagaagaacgactatgagctaaagcttggctactttgctttagttggccagcatcctttccatggcttgtctcatgagcagccaatggaccacatcaagcgttttgaggaactcgttttgaggaactcgttttgagcatcagagctaatg

SEQ ID NO: 5504 - DNA, 3000 bp, Unknown
  misc_feature (1)..( 3000): cDNA_ID_3077345_gDNA_ID_1620796_Annot_ID_168500 3000 nt of promoter + ATG
aaaaccaaggtcctgctgctcctgatgctgaaatgaaacagatggtacaaccgctgctacaaggacaagcatctagctccatggaatttactaagtagttatctgaattgcaccataacctggactgcagctacaatgacctgaatgctaaagtggaggcattgaataccaaagtcagatacttggaagaacaatcagcatatacctctgcacctaaagttacaggacttcctgggaagtcaatacagaatccaaaggagtacgcaactgctcacgccatcactatctactatgatcgagagctgccaagtcaacctgtccctgacttaatccctagggacagtgatgttcaagaaggggagccttctactcagactgaggtctctgttgttgaattcaacaattctgatggttttggcgatctcattcaatccacctcggaagagaaagcaaccataattgagaggatggtaaaacgtttcaaacctactccattaccctcacgtgctcttccatggaaattgaggaaagcatggatggagagatacaagtctgttgtagcaaaacagctagacgagattgaagcagtgatgccactgatggaagttctcaacttgattcctgatcctcacaaagatgtgagaaatctaatactggaaaggatcaagatgtatcacgattcaaatgatgaatgtgatgctactccatctcgtgctactgaaaagaggattgttcaagaaaagttagaagatcctggatcttttactctaccatgttccattggtgaattagctttcagggattgcatgtgcgatctcggagcctatgtcagcttaatgcgactctttgtggcaagaaggttggaatttattcagtacagaccttgtgacctgactttgatccttgcggataggtcttcacgaaaacccttcggcatgttgaaagatctaccagtcatgattaatggagtggaagtgcctacagacttcgtggtgctggatatggaagaagagcataaggatcccctaatctcgtactttacgcgactgcgctactgatcgcagcgaaagaagagaggtcgagtatcctcagagcggtgctggccgccacagagctgatgaggtcgagtacccacctgctcgagctgatacagaacagggcggctcgtctatggcctgggagcaatcacaggcagccattgacgaccaactgataacactagattttaacctttttaagcccttgcttttcatgcatttagtttagtttcatgtcttttttcatgcattcttagtctcttttccttcttttgcacattttgcattgcattgcctagcatacttgcatttggagtgttttgcaggtgaattaggtacttttggactcaacttggaggtttctaagacaagggatggacaaactcgagttcgggggacctaaggaaggatttgaagtttactcggcctatgtactcggctggaggccgagtggagcacacgtgaaaaacaaggagcctactcgaccaaggcactcggctaaaggccgagtggtgcacttaaggaagaagagaagccacttgaccaagccactcggccaagagccgagctatgtgaccaagaccaagccactcggcttttctactcggcctagggccgagcgctcctgcgccgactttcctattttgtcttattcccaattagggcaacctaggattgtgtataaatagatctcttatgtttttacccaaaatatctttgttttgtcttctggatattagggttcttagatttcttttgcattttctggttgttgtgttgagaatttggatttcatttcttctggaaacttgtttatctcattgagatctatcatttgttaagtttataatgatttctgggttttatgaattttctgggttttgttctatgatgttcttcattgttcttgagtagtcttcttcagagttcttgaggatgggttaggtttaggtggattcctcttttctttagctagctaagtttataaatgcatgattcccttctgttttaggagttcttaatgctattttctttctgatcaattgaaaattgatttcagactttctccacctaataagtgtttgatgaaatgtctgaaccaactaatttcagagatttgtagattctagcccaagacattggatgtttagactgcttattgactttaatagattggtgtttaaagcctgctttattatgtttcatcaatgaaaattgagattaggaagttctaaagttatgagaatcattgtcacgaaagtggattgatttggttttgaatctattgtctagggatagcttgattgagtttgttagttagctaatggattgaggagtccactaagaccaattaccccattcttaagagctctgtttcgtttatttgtgcaaaactcatatttttagtactctgttcgtctcgtgcaaaattggtgtttttagtattgtactcgacctgtttactcgtttgctcgaccgagtgctttacctagtgcttggtttactttccgcttttgctgtttgagttctttattttctgcttagtgtagttttgtttctgaatttgatttgcatgttaacctgttgcttaggtttagtagaaacacaccaaacctattcacacttggcttgacttagtattctttgatcgtatcctgattgatagcaattacacccatttggattgacaccttacatgttgcaatgacataagatgcatttagggaattgacacaccgaaaacccttgtatcaatttggcgccgttgccatttgggtgtttttcttgttacatttagaatttctgagttattaagatcaagttctatttctttctttctggttactcacttgtttcttcatttgcttgtttttgttttgcaggtactcttactctactagcacgtcgagtataagcgtcgagtatcatcaaaactggattactcatttcaaatctggtcgta

SEQ ID NO: 5505 - DNA, 3000 bp, Unknown
  misc_feature (1)..( 3000): cDNA_ID_3408947_gDNA_ID_1620797_Annot_ID_168504 3000 nt of promoter + ATG
tctttacctaatggaaagggcttgttcaactgaggaaccaaaatcttgcaaagcaggtgcgagtggaccttgtccgactgggtcaagtggggaaccgggatatcgaattaaagctataccgccaaggtaggaatcagtgaaccgagctgtggcgaatatgtagtaagaccggtaaattccaaccgggtcggttttggcagtgacaagaatagagtatgattggcctacgtggatgtccaggctcgagtaaacacgtttttgaacatacgtaccctctgtctcaactagaagcatatcgtggtcttggattctgaagtttaagcatgttttgagacccacgtttgatattcttagcctatatgttttgcctgtgattatatatagacaacataaaaagaacatttgtgtgtaaactacattattaaagatataatgtaatatttttaaaagaagaaaaaaactcacctggttcaaatgcaaagaaggtctcttcagggccacgcccgttaaaaagaataccatcaggatttggcaaactgtgaccagcgtcaagtgaagctctcataaccttacaccaaaatttggaaaccaagtgttaattatgcaaatcaagcaaaacatcttttacaatgaaactaataacacattcaataaatgggcaagataaaactcaataaccaaaatgattatgatctacaaaattagtttttttatatataaaaaggatagtattggaatgtaggtttgatgataatacggtaatttatcaaagaaacatactgtatggtcgagataaaaccaatctccaatcaagatgtcgtattcttcgtcgggcttagggaatgggactgggacaagttctgggggatagattctaatagcaccgtatcctccggcagctttctgaagtagaagggtcggaaaataaaagtaacttccaatttgatccttcacctgaaaacggtacgtccaatttgtccccggtagtatgggacagtttgtccctcgaactccatcttgccacgagttcttccgcaattgcaatccattcctttaatttacatagaggtttaataacaattattcctaaaattaacccaaaacaaaaagttgaaaatatataccaagtcatgaggaagggttcgggcaaattgttgaaaatgttaacgacaatgatatcgtttgctgttgcattaaggatcggtccagggaacatgtcgttgatcactataacctatagattttttttttggtgaatactataacctatagattgatcatgcatctgaaatttcatataagatagctaaaaccatattattgtaacaaataaaaacatattcaaatgaaaatggttacctgcttgttgcctccaagaatgaaacgttgagaatacgagacgacccattgatacgatgagattggtgcaaacgcatagctcaactccaagatgaccaaagagatcagaaccaacacctcgacaaagacatgtctcatcgcgaaaagagtgatttaagaaattttaagatgcttgtgatgtgaaaaagaggtgttagaggcaagacgtagctacatatttttctttggaacaatatattaattagacgacaactattgttactctgtttggagttaacgtttgttttgtgctatgttttttgaatatgatcgaaaagttcatgcaatctgcatttccaacctaatttatgggcagcacatttgtgcttttgttaaaatttgctgggcttattcattatactaaaccatgcataaaggcccattaaatatcttattgtaatgtgacggacgaaaaaaaaaacgtgagggaggacgatggcaattgcttacgatatattgtaaagtggatgtgacctgtctgtctacacaatattacaaagatggtcgctattactcctacaaaaaataatacaacgcaaaacaattattgaaaaattattcatcacttttgtatctttcaaactttcacagttcacaccacctaaaaaacagtaaaaagtaacaacattatcactttccacaacaaaatatctaacaactttgagtatacagaaatgtacatagtacatacgtataagcaaaatgaattttgtttctccttttttttcctggtgtatatcgttgcaaacttgcaattgatcaataaaacgcaaagatattatattgaacaaataaataatttttatatagccaagatattatatggatcctcattcctcaaatataataatttacatggcccgcgattatcatgaaagacgttgaaacgtccactaatcgtacctagttgttctgaaaatgaaatgatgattttataaatgatatggttttagacttttgaagttcttcatcacttattgttagatgaaacaacaacgttgcattcaaatctcaaattcctataaatcacagataaaaaagtaattttgttttacacgtctacgtggttacaaatcctaatcacgtaactaaacagtaaagttaaagaatcttgaaaaataaagatctactttacgttttgtagatatttttaattaaaagtgaacgtcaaaaggtaattggatattttcgttaaaatgttatcaatcaaactcggacaacaattagtggtaatttaactatttaaaaaccagactaacccattatcgtatagtgctaattatgaactatgaaccgattaaacaacaaaatttactatataaaatcatcaggtgcttttcttaatctcaacggttaaaaaaaataaccaattagatgtgtccacgtaagcaggcgtaccataagctaccaaccaacacatacaccagattctcaccaacagaggaaaaaagcttctactataaagcacacatcttcttcttcatctctctttcgctctcagaatcctcttttaagtctctgtttcataaataaaactaataaagaagaagaagaaaacagagcaattaaagtccttaaatcttcttcttctccaattcaatg

SEQ ID NO: 5506 - DNA, 3000 bp, Unknown
  misc_feature (1)..( 3000): cDNA_ID_2113928_gDNA_ID_1620797_Annot_ID_168509 3000 nt of promoter + ATG
atggaaacaaaagaaaattaaaagagatcacaggttggcaattagctatataacagctgttaatgcgaataacaacacttcacagctgtcttacgaactcacttctctatcactttttcttaattttctttcctttttaatacatttcagcaaataaaggttacgtccatttttgaatctaataaataaaaaagtgttctatctctaaattattggccatcgagatatctaaacgacaaattttgttataggaaatgactacttgttatgatttaggattcatatcgtcgtctgttctcttaggttatgaattctgaatttctgatacttattctcgattgtattacatatatatatatatatatatatatatgaccctgattagtatataaactgacaaactgttaccataaaaattaaatgatattttttgataaagtttgattaaaactaatgttactattgataaagtaaactattaactatgtatatactgaaaataatgtaagttgggtgcaaatattgatttgacttaacataaagttcaatgaaacgactaccatgtccataagtatgatattatatgccagccatgataatggaagtgacattttcatgcataaagaaacatgcatgctcctcagtttttttagttttttgatttgttaaataaaaaggctatggtgtagacttcgtgaagaatgtgtgttaagtgtgcgtgcgggcgggatggggtttggagtcgataaggttggtgaaaaagccaaacactgaaaacagactatccgtgatattgacctctctctttcttcacctttccagtttttgtctattatttcgaaacgtcaatttgtataatttgtaacattttacatctactctactactgtctattatttcgaaacgtcgatttgtttctattgatattattgggtaaacattttttttctttttagagaatagttaaaaatgttataacataaccaagtgaacctaactttttatcgactcatatgaacctaagcatgatttcgactctaataataacaacgtccaaacatatcatagaaattagtttacatttgtatataactatatatatatatatatatatatatatatatatatatatatatcaattcaaagaaacaataatttcggtgttggagcccaatttgcttgttgcctagctaggggtaattagatagggacaatgcgtaaatttactctctcttttcttttgggttcagttcctattattgaaacaaaaattacatccaaaatggatataggagttgtgaccgtatgggttgtcgaatggttgtgttatatacttatatgttatttgctaaacaaagttcatctagaacctccaattcaaagccagaaatcagttaaaaatcaatatttgctaaaatgttgattcggatcattcattcatttttataaaaaggaaaaaaattaatcggttctggttaacggtccaaaaatattatgtagattaaatatatataacttttcggtactaaaaaaaaaagattaaacaaccaagagtggaaacgaaaagaaaaacaacaaagaaaagatcatggaccataagaaaaatactagtaatacttaaaaccaaacataaagattgatctagaaatcggtttaaaataaaaataaaaaagaggaaattagataaagacgaagagtgggtcataactcataagaagaagtgcaagctgtgaaatgaagcattcgcaaaaaggaccactcacgtctacttcctctcatccttcttgtctcaaccacatcaactctcttttttagctccatttttgtcattaattaattaaccatacttacaattttaatgtccttccattttctatttttgtttcttaatttcctcaaattattgtgatggattcccaagacaacggagatcaacacaaaataaaacttgaaattgagcattattgacatcatccatccataaccatatagttttggtctttcaaaattgtggtgttttccattttttcgcagatcacatacatcgtatgaagagcgttcatatttcaaaaccggaacaagaagtcattgtatacgtcaagatattagtttatgttataatataacaatctcataaaaaaaaactcactatggaagtcaaaagtcaatcgttcaacttacttattatatttacatatatcaatgaatcaggattttttggtagaaccaaaacttaccaaacccaagcgacccaaactaataatagagtttaggtctaagtacatcatagaagtcaatacaattgtacagtaatacattggcttttagtctacttctatctaaagcaagattcacataaacattgaatttcatacaatttaataagtaaaaattcgttggaaaaaaagttataccgaatccattgatcaaagttaaaacaagagaccacacataatacaaccttatttcccccaccaaaatattctcatctccgcatactcacaacttttatacgcaccaccaaccgacccattttgaaaaagagaaaataaaccacaaaaacacacataaataatatgctgataacaatgtcttaaaaatctatttaccatttctagtaatcaatatctattgcaaaaaatatttataagaatacaaatgaaaaatgataaaatacaaatgatttctcaattacctaaaaaatataaaaatgtcttactttattttcagccactgttggaaagtacttgcaatcatatcgtattttgaattataaaactcagaaacaattattttccctgaaaagttaaaacttttaataagatatttataaaataaaaagaatagtctagaccgaaaatggggtcggttgtccatccaaaggagtgctataaatagaaccctccaagttctcattaggacacaacaactaaaaccacatttatcattacagtctgatttgagctaagttctctcatcataaactctccttggagaatc

SEQ ID NO: 5507 - DNA, 3000 bp, Unknown
  misc_feature (1)..( 3000): cDNA_ID_2990351_gDNA_ID_1620797_Annot_ID_168508 3000 nt of promoter + ATG
aagacgaatatgatgaagaagaagaacaagtttacgaatcttgatcttacaacacaaaccaaaagatgaaaaaacacagaagtcacatctctatctcttttattgaaatctctattcctactattaccactatatatatatatacatgtatcaagttgaagaatctgggaaatgtgtttgtttgtttgttactttatctttgtggttctctcttattgtattttgcaacttagtttcttcttttcttctcattgcctttataataaagagtctgtccacgtatctccctctttagccttttatttcatagtattcaaaaaaacgattcttagaatcctttcagtttatagtatagacaaccaaaacattggaaacttggttgcatattcgttacaaaatcctgctatttctgctatataattatcaccccaaaaaaaggtttatcaaaaactacttaaattgataagaagagatgaatctattaaaaagcttcttagatcgaatcaaacctagtcttctttgtcttgcttgagcagctacttggactttatttggcactctctgaaaaccctcctctgctgctggaagaaggttcagatcaaagccacgtcgttccaagttatccattcgcaacgacgccgtttcaacatccctcacattgaccgtacgatcaaccgcaaaaaacggtagttgttgatcgtatcttatgggctgggctattaaaccagcttgctccctaagtaaacctgtctccgcctgtatctccacagaatattatcaaaacggaaacaaatatcaaaaatgctaaacatttttttatacaaaagggaaaacaaaaaataaaaaggtaacaatgaacacctcgaggactgaagaactctgatttttcctacaaaattcttcttctaaaccctttttaatctgtcgtttatatcaaaaacaaacacaaaaaacaattactcaataccaaatttaccacataatgaattttacacagatacaaattagaaaaatttaagaacaaacacaagaaaaacaagtctctgtttaaactgagaaaaattaagacttacgatttgagaattggttttcttggcctcaccggttaagcacgaagaactcgaattacttcccatatcgccgacatcagccatacacggcagcgattttatcaccggttccggcggatgcaggtgagaagaagaagaagacctctttttagtgcgaccccatttatgtaacacaggagaatcagaagagaatatgacaggatgtgaaagttgcaataagatagaagaaatttcgtagtcaatgctatcgaaaaaatcatctctcttcttgcctttgccgtcacggtgatcttccattgataaactctgtgtcttcttcttcttcgacattgaatgaagagagacacgaatgaatagtcttctcttcttcccggcttgaaacgattgggttaatgagataaatctttctcagaagattttgtttgtttttatttttcatataataatttgatgggtctaagcttatgacacgtgtcagtacatttttttggttaaattttcttttctcgtcttttgtttcttattttttttattttcgagtttcttgttttcgtcgtaactacctttttggccaactaatttcagtcaattttggaagtaaaaaaataggattaatccccaatatgtcatgtaaaaaaatacaaaaaattatttttatttctgatattttttcgactttcatatcttttttttatggtataatattaatttccatccaaattgggctttggcaatgggttacaacaaaaatcaatggtggtctctttctttctccaaacttagcaaaactcacacaagactttgttctgatgaagcaaaccaatgttgaatgttatgagcttaacaagtttggtaagagaggtgtgttgagtttttcttaattagtttttatgtttggagtttttgactcaccaagtttcatttgattgttcagtggcaaatgacttgaggatgaaaagaaaacaattctgatttctgactatattagagataatcatcaacaccactagaggaaagattaggagaacaagaacctcataaaataggggaaagtgggattgtatttagatattggaaagagtttagctgtattattaaaaacaaatcgattattgaaataattgcatcaatcaaatctaaaacttcctataacctatatttttataattaaagctctaatttttatttcatctactgtttaatcttaattactattatcgcacgtatattccaaatcaaattcttgaagatcaaaactgattctgcaaagatttggggagtgttagtggattgatcacctcagtacattttaagagcactatactaaattaataattaccactctaactaatataatcattttgtggaatctgatacagtctaaaatcagaaaacaagatatttacatagccgtagaaacaatcattttacaacacataaaattatgcaagaaaaaaatacaaataattatgaatcaatactacacaatccaattataatcgtttaacaattcattacaaatattttgaaatgaacttacattaagtttgaagaaaacctattcaataaagtttctctatgaatacaaagagacaaattaaaccagagtcgttggcttaccacgaatctaatttccacctaaacatacttaacaatccacgtgtcaccgtcataaagtgttaaaacttttggacttttttgttctgtaagaaaaaaggagtgatttttagcaatgggtgcgttaccaatttctccagtttcccactccacatccaaaaaaacagtgtaataataatcataatcacctgatcaatctcttacataaaagctacagatctggttttatacaatcatcaccgcaccaagttcctaaaggtttcgactttactgtttctattttcggaaagagagtgcaagattgaaatcgaag

SEQ ID NO: 5508 - DNA, 3000 bp, Unknown
  misc_feature (1)..( 3000): cDNA_ID_2164296_gDNA_ID_1620797_Annot_ID_168535 3000 nt of promoter + ATG
gatttttgtttttgtttttattttttgtcctacaaacgcatttcaataatgatttttctttgacatctaatattgtctgaaaactataaattgttttctttttgatatttttacgtattgtttccgatgcatatcgtttttgataaccatattttatggagcgaacccaaattaatggttgatgatataggtgattggcaaagtgaacacaaaaacatgtaaagactttgaaacaaattgaatactttaaatttaaattcacatttgagtgatttgagagagttaaaaatctctaagaactattccaagaaaactcacattgccttcattttgtacgtttgtttctctaaatccaataagtatgccttttttataaagcgacaaaaatacttcacagccaagattttaaagtacttgcttggttcataaagaagcatttgctcaccaaaaacaattaaatacgcaaatccttacaacatgcataactcattttttttttttttttgtcaatcgcacatctcatcttcaaggattagctagtaatataggtaagagactttatcttgagaaattggttgtgtattaattggctcgtcgataccgaagatttgatcaaatctagctatgagaattggagaagtaaaatcttactctcgtgacctgcttattatgaatatgcatgagaagtcgtcaacgattggcaatacaaggtggaatagactcgtaaattttgaaataaatataattcacaagttaaatttgagatcatgcgatggcaaaaattaggatatgaaaattggtaatcagttttgaagtaatgcgagtgttattaagagtttaaggtatgtgggttggtcgtcgattacaaatatgaaatatctttaaatatttttcaaactttgaatagaccatatacttatatactgtacatgcacaacatttaggataaagaaaaggcgaaccatcagagatataaactttaaaattaaataccaaatgcgcctaattatgattataaaatgcaaattgcgccgctaattcccgcgattccacgtgatcaaagaaactagagtgggtctgcctgcttcggctctaatgagggtacaaggtatgactgaataagtaaatcctttagtgatttaaattttaaattcgcagatttatgtacgaccaattacgtgatagtataaaatatttaattagttggtataattaatagtagctagtttaagataaaccactaacggtttttatgtactcttaactattctcatgtttatgcaattatgtgtgtgtacatatttatagttttaatttgtaaaacgagcaaaataagctaaataaccctcatatcccgtttagttatatatttttccaaaatttgaaactatatagtactgtattaacgtgaaagctaagttttctacttcgattggaataagctaaaaacctttaaaaaaaaaaaaaaaaaaaaaaaaaaaaaaaagctaaaaacctgaatacagaaataatacattatattcatgtattagtttgggtaaagatggaagacgatcacatcccttcgtcggctaataataatgactcgtgacctagaactagactagggatcgctgtccagcaaaaatcccttaaaacaaaccacatagttttttttttgtttttttttcacacaccacatagttttcttatagttcatattcaaaaagtgtttaagtttctacgatcgccctcttcatgtcgattcaatgttaataccacgtatttctgattagacgaataaataacaaaattatcaaaaaaggaaaaattaacgcacgaaggcgtcgttgaaaaagttatgtcattgaaagtctaatcgccgtgattaagcggtaaacctcacgatgagaccgtccgtgacgataaaatgtcaaaggaatgtgacgttagactatccttttcattttttctcagatttcattttttttttcctttttctttatttcagacttttatctttgccttttttgttttctcaaacttcccatatataatttcatcacaaaatagataaaccgaagtaaaaagataaacggtggggagggttttgcgggggagggacgagtggagaaaaactccctgttctaacacgtggcactctattcaccattgataaaaattaacactatgagcttaaaaagcgagctattttctattttctagtttagttttaaaagaaacaacattttcgctaagaaatttcttttaattaacacatcttaaatttttaaaatctactaaaacgaaaacgagtcattattaaattcgatacgttggttcggcgtaatatattttatactccttcatgcatattgttttgaatcctaaaaccatcgattagatatataatttgcatctgtggacaaaaaaatgacttcctacatagtaaagaaaacaacgcgtcatttaatttttatcatcttacatgtattaattagattgtaataagggattatgaaaatacctatgaaaaatgtagagaataagcatatatacatattaatggaatggaatgattactctaacaaaattacttaaaaaatgtcacctatctatttatccatattcctttttttttctttttttttcaacaatagtttgagtgatatttatgtgatggggattcactcaaactggaagataactgtagtgaagtgcccaaagcaaaagatcttcatgggactctctatgtcttaaaaactttttttctctctctctctctcttaatccaccgagtaaatccagcaaacttccactttcagagatcaaacttgagttatcttaagtgatgaagaaagactaattccatggcggcgtttgcagtttcttaagcttcctcatcatctaccgtcaatctttatagcaaagaaaaggaaatcaaatcaagatttacccttttctttgatttctctttgtggtgtgttgggtgtgtgatgttgattaccactggggaaagaa

SEQ ID NO: 5509 - DNA, 3000 bp, Unknown
  misc_feature (1)..( 3000): cDNA_ID_3077457_gDNA_ID_1620797_Annot_ID_168532 3000 nt of promoter + ATG
actgtgatgacactttcctcgcttcagatcagactattggcgtaagcgattacgtattaatttcaacaacatatatagtaagaattagaatttggattattatgcactttttacacactataaaactctaagttttagtttaattatcagctttttagtaatggtccctgtatacgtttcatgcttcaaaaaaaatatgtcaaataatgtggggcatattcattatacgttaaattaatgaaactcgcatagtggtccagcaaaatcaataaattcgttttaataaagaacattattattaaatcgctgttaagagtcgagaggtttccatattgtcctccccaccatctgcccattccgatccaactaatttccttattatattctacaaatatataaatactttaataaccaatgggatagttgttaacttctatcaacgtgaaattattttgacacaaatattatttggtttcactaaatttgtttaatttcaataatattgtgggagtagatgacctagagtaggagtttaagtgtggagcttcgaacaacgtacgagagacacggcggaccaaacgagccacgtgttgtctctcttctttgcccatcccttcttctaccttctttgaacgtcaaattcttataggttgaaatttagtttcaatgttcaaaacagaaaataatgaattaagaacataatccagcctaccagaaataatatcaaaacaaatttgccgttcatattaaaatgtttttcgccatgattatccacttgataaaatgtagtacatgagatgagactatgaagtgggacccgtctgctccctagctcacatcaaaagttataactattctactaaagtaatcttgcgttagacgctgttcacatggatgctgtattatgcgctcaaatattaatatcgaatttaagtttaaagaactgtctaaaaaactccacactgctgcactgaatctcgatttgaaatatctttgtatcaaacatgttaattactgattggcacatgtttctttattattgttttgaaaaataaaaatctacattaacttgactgatataacatttagtaacattagaactgcgggagatatatgattacaaagatcattttcaatctgagtattttcaatcattttcataccatagaaacatttataaattcttgattaaccactgcaacaatgcaacattggatcgagcttccacgactaaaagggtatttctatggactatggggactcctattatagatatttagggggcatatacatggattcttaaaagagaattacaactttcaaatcattatcatattccaatatgggttcaaagtttctttaagcatacgcctttagttaattggagaatcttttattctttaatatatataatgctttttcagggatataatgtagtaatttacaagatacagttctactagatttcactcctgaaaaagtaaactttataatctttggttgttacttgatagtggttctagattttgaaacttatccttattccttaatattttatatatctatacgaaccaattaatatctttttacttttaagaaaccatgtaaggttttatcatactaaaaagaaaaatctagttttgtctccatttgctagctaggttttcccctgttttaagactagaaaatatacgtagctaacaaatctgtataaaaaccaaaaaaaagtattaagaatcaagccgaactaaatgacatttgattttcattccatttatatatatttgaactgataaaattataactgaaattaataagcattattgggcatctaattatttatttattttgactgaacaatctttcagaattcaagatagaaataaaagcaaaataaaaataaaatgactagagaaatgtaattctaatttgtcataaaaggaaaccactgagacattatctgtttaattattgatgtagaaggaaagactcccactagtcccacttggttcgatacccgcgcttcagccttcacaccatccacgtccagtgcaaaattcttcgggcttccactatataatcttctaaacaaagataacacaataaaatataacaagatgatatattcaaatataatcttatccgatcctctattttggagttggcgtgcgtgactgcatgccatgaagtataatatagatggaaatttgaataaacatgagatcaatcggctaaaagcaaggttgtgttatatcgatcatcttaattctgatgtaaatgttttgacataagcgtacgtataggtatgatactagtaaaaatacaagtttaaacctgtctgattgttcacatttcttaagttaaattagtcaatcgaaaagtgaagttttaaagagttaatgttgtttacattcgatggtatataagtgagttttccatcatttttagtttcattatgaaaacattgtctacttcaattttttgtttccaagttaggagaattaaacagaaaatttttcattgctactatttaagttctatttattttgtttttttgaatgctatcaaacaatcgaatggaatgccaataaatttatttgaatatatcattcttatttttttttgctggaaaatataattagtttacattgaggaactaccgaactatcatgggcataattacttctcatcagtcaagctctcattatatcgctgtgttttattaatccaacaaagtaataattaattattttttttacttcatggacatctcatataaaacaagaaataattttctaggaataaaaaagaaaagaaaaagagagatataattaaacaaaaaaaaaaagatatgatttgagaaacaagaaagaaggaaaaaagaggagctgatattacataagtaccctcttacattactactccataagaagatctcacatcttctctcctatcattttcaactaccaccatctctatctctctcttaatcgatcgatg

SEQ ID NO: 5510 - DNA, 3000 bp, Unknown
  misc_feature (1)..( 3000): cDNA_ID_3077467_gDNA_ID_1620797_Annot_ID_168527 3000 nt of promoter + ATG
aaaaggaggatattaagttaattaaagggtaataagagacttaattattagtggataataaaaggtattgtttcaaataaagctccaaattacttttagcaaacatttttggatgagctggtcgatggactggcttaacattgacgtacttgtatactcaatgtaaggactaaggactaatcatttcccaatataaattgatgctaattattacatgattacttttgtgtcgttaactaatcaaggtccattttcgttattaaaaataaattaaaaaaatattgtaacacgtactataaaattcttaatgcttgaagtccgaaattaggactaaagttattcgccctcatacgtcactgcgtacttgttcattcgctccataacaaatatcatttctaccaaaacccgttttatatgattaattttcatcctataattgcaatgcaaggctgtgtcctttgcttctcttttaacttaaattatcttatagctttttgcctcttttgttttcattctactacaacccatgaggtaaccaaatctagtgttacacaaacttatttaatcatcataaataattatgatatcttttgacaaaaccttcttgattttattattagtaacaagttgaacgaccatttccagtattggcatatatttattataaagatcccattagaatatacataattttttctgaccatggttagttttacgaattataatgagatttgaaagtttcaccaaattggatttgagtctgatgctgtggatgggttttaaaaagttgtgcctaacacttatgttatcaatagatgaaacatgatctaaacaataccaaaaaagtgaaaaaatatatttctaatttatatatattcacaacacaatagacatatacataatgaaataattacgtagatctaaacagtttcatatctccattagcgagtttgtattagagttttcactgattgtacaaatttatgttgtcggagccatgaacagaaacaaaacatttatatgaatatatatttaaaatacgaggggagatagagacgtggcgaaatctgataaggagttagagatgccgaaagacgtttgcctaaacaaatccaaagtataatcctgattagcatatcttaatgcttttgttaacctaaacattgcatgtgcatttctatgtcttcactcttcttcaaacttaaaataaagcactgatatataaaacttaaaaattatttaactcgacataaaaatgaaagctaaatctatgaagcaaataaataaaaactaaagattccaaataggcttttataaagtacaatagctaactattaaccgaacttatgtttttgtgttttactcgtcatgatatgataaaattttgttataaacagtttttaaaaaaaaagtgtacatgtgagtggagaatgacaaatttcactcgtaaaaagctacattttacttaattttaagaaacattgaggaaacaaaactttaatcaggttcatcccttctgcttgtagctaatcactgcctaatacgtaacattcactgtgtacaacggagcgccgtcacttatttgtttccttctttttctggtaacacctaaacctttggactgagaaagagggtcacaagtcggtcaacgcgatttttaatttgtttgaccactcttactgaattagctggcacgccacgtcatcttctgacgctgacatgtcagcgttaaacacacgtccacatcgacgttattcagcgcctagtagacgttttccactgaagctatcaaattaattatttacaacatttatttatttctaatcacaaaatatagaatttaacaacatttatttctatttataactgaaacatattgatgtacttaaaatttaacaataaaaacgtataatgatcgactaaggatttataaggatattgttgcttcaacaaatgacattatacaaagatttttatttgatgtgatttgtgtcctattgaaaacaaattaagcgattaatttattgtttgatcccatataatatactcatttcctcaatttgtgcgtgcatgttaatgcaatttggtgcatggaggcagaaagagacaatccactgccgattcatagcatacgatcgactctcttgtaattatatctttatggagaaaaattaaataattgagttcgattcattataaccaataataataaaaatttgcagaagcattaatgaagatttgcttaggaagataaaattaaatgagaagatccttaaaacgtaacaagtggggtgagaacgtaacgtcgcatgggggggatgcatccataacatgcatttggacccacctttgtttatttcaatttttttttttaatactatttattcaatatttagatttgaaatagggcaattcaatcatctatatcaaactataatttcagtatgaaacatatatgtatatatatatatatgagtattcgacttaaataatatgataagcgaatagtatatcataaggttattatcatgccacatgcggaaaatgtgatatgtaggagtgataggaactcaaggtgtggacagtggatcattgatcaacgattttttttttttttttgtagttcaacaatttttaggcgatgaaataaatttctcacagtacttaaataatctaattgcaatgcaataagggttatagtatacttacaaactatacaatgtaattaaaagaacataatctattagtagacataatctgaaaagtttaaggataagagtaatgagtatatcagattagaccgacagtaacaatgctgatactggttaatcatgcatttggtcacatgaaaatgtacgatacagagataattaaatgtacacatttatcatcagatttacctttttcgcaatataaaatagaaaattctgttggctgcttattgctaagaaatttttgataataataactggagatggggacattcgctcacatggaagc

SEQ ID NO: 5511 - DNA, 3000 bp, Unknown
  misc_feature (1)..( 3000): cDNA_ID_3077471_gDNA_ID_1620797_Annot_ID_168526 3000 nt of promoter + ATG
aacgtctttcggcatctctaactccttatcagatttcgccacgtctctatctcccctcgtattttaaatatatattcatataaatgttttgtttctgttcatggctccgacaacataaatttgtacaatcagtgaaaactctaatacaaactcgctaatggagatatgaaactgtttagatctacgtaattatttcattatgtatatgtctattgtgttgtgaatatatataaattagaaatatattttttcacttttttggtattgtttagatcatgtttcatctattgataacataagtgttaggcacaactttttaaaacccatccacagcatcagactcaaatccaatttggtgaaactttcaaatctcattataattcgtaaaactaaccatggtcagaaaaaattatgtatattctaatgggatctttataataaatatatgccaatactggaaatggtcgttcaacttgttactaataataaaatcaagaaggttttgtcaaaagatatcataattatttatgatgattaaataagtttgtgtaacactagatttggttacctcatgggttgtagtagaatgaaaacaaaagaggcaaaaagctataagataatttaagttaaaagagaagcaaaggacacagccttgcattgcaattataggatgaaaattaatcatataaaacgggttttggtagaaatgatatttgttatggagcgaatgaacaagtacgcagtgacgtatgagggcgaataactttagtcctaatttcggacttcaagcattaagaattttatagtacgtgttacaatatttttttaatttatttttaataacgaaaatggaccttgattagttaacgacacaaaagtaatcatgtaataattagcatcaatttatattgggaaatgattagtccttagtccttacattgagtatacaagtacgtcaatgttaagccagtccatcgaccagctcatccaaaaatgtttgctaaaagtaatttggagctttatttgaaacaataccttttattatccactaataattaagtctcttattaccctttaattaacttaatatcctcctttttcgtataaattattgagtaacatgtcagcgccacaacactcgcaacttttatttagaagtgtataggtaaaattgaaagctattattatcaaaaaggggtaaagatactgatgaatttcgagaaacccgtacagtaagagagtgcccataaaaagccatgcatttagtcatattttcagcttcaaatcatcaactgcaaaattgctcgaattaactagatgtgaactaatatttctttattcttattgttatatgattggggtcagaaagttatcgaatcgttgttgtggacgaaatatgtatgaatgtatctcataatctcatatgattgggactgtggatttcaatgacaccgccaatatatcacatgaatcacacaagtagtcgttgatccttatactatattcaccaatcaccataaccttcattgtcaaatcattttaataataacattacattttaaataataaaaaatagtaatactccggtatggacgtatatggctgtgagttttttgaaccacttgatataaacagcagtactaatcattggattgagagcatctgcattcgcagagaatatatgatcatccaataatattattgagaaatatatgactcctctaggaccagtggaccagtgaaaagaaaaacaaaatataataacatcttctatcatttttctcgcaattaagctagagaagttcaaacaatttcaaagagagattcattaagtcaaagtcttagagatgtgatagtatggtacacgttagtttggagtcgtataacgcaatcattgtttttaaatcataaccaagagattggtaatgatgattatacattaattcttggctattggggcagttaggcacatgacatgaatgcaagtagaaacactgtaaggcatagtaaagatgaaggatctaactgtaattacgggtagttgtggaatataatggccgaatacttagaaaatatcatttggaattaaacgtaacaatcaagaaatggtatagctagtagcttttatgttggtcattagcagaatcactaaacataaaattgtgattgtgcaccattgaggtttagacctttatatgaacaattgaactaaacttaccaaagcgaaacctttatatgtcaatgatagggtcgtcactatcaagaaacgttattgggaagtaggacttatagttacatcaaatatcaaatacaatcatattctgtttaaaatatagcaactctaaccaatactccatactatgcttagaataaaacttaaccacattttaaaatacctaaacaatctcatgatcatgatcatgagaagatcttgagtgtccttatatttgttttatatgatatcatatcaaatatgtctgcatcacgatatatgtttgctttctctacgtttctaagatttatgtttcttgaattcttgggaagaacttgcatatgtgtttttatgatgtggctgctacaatgggcttctgggcctgttttaactggactgtagagtccattcatgatcaatagaggcccgaatataagtctactcattttaaaaccattacttaaaccataagaaaacactaaccttaaaacacacaagatttggaccaataataatcgaaaacgcagatcgccacgtatgctaatcttatccttaatcaaatatggaccgtcgaaatggcctttaatcggacgtctataaactactctcccgttaatctcccaaaattaaccgacctaataattcacctcatcactataaattcactaatctgcttcacttttctcaaaatcaaaacaacaacattcaaaagctattagcgattcttcttctctctgattcaatcttcttcatagtttctaagctctcaagttcttgacgaagcaatg

SEQ ID NO: 5512 - DNA, 3000 bp, Unknown
  misc_feature (1)..( 3000): cDNA_ID_4254705_gDNA_ID_1620797_Annot_ID_168521 3000 nt of promoter + ATG
aagaaaaaaatcttgtcataacctactttttatctttcttctttttacttcaatatttttactttatttgatagtaatttttcataaaaaaattaccacataatcaaattaatctttaaaacttttatgtgagtctaaaaagtctaaatttagttatatttcgaaaatacgtaacactttttttttaatctcaatccgacggtgtacacgatagtgtaaaaaatggtgtacaaatagtagtgtacgacgataatgtaagaagtaatgtataatattaatgtgagaagtgatataccatatatgatagtgtacgtcaccgtacaaacgaaaatatatagttgtgtacaactacctaatatgatggtgtacaaagatgtgtaaaatatagtgtatataggtatacataaaacgactagataataggtcacaccatacaccgcctcgtgcgccgtctacaatattgtacaccttcctattttgtacaccacatacataaagagagaacaatttttgtcaagtgataatgtccaaaacgatgtttataaaatagtgtacgaatttggtatataaagaagtgtacaaacattagtgtacactacgtagaaatgtataaatattacttcaaatttaatggtatgtatcatcatatttcaatttaatggtgtacatgatggtgtacacaatcatatttagtattacctatagtttacattactatcatgtttgtattaatcttatgaacaataattacttcaatttataaatatgagacaaatcgatgtatttaatgatttatgagatattataataatttttttgtatatgataatctggtgtacaaatgttagtgtacaaaactatgtttaaaatactggtgtacgaatacatgagattgatgatatataaatataaaagtcattataatattaaaaaaaaaagttatttttaaaagtatatttaaaaaaaataaaataaaaataaaaataaagaggaaatgttttaaagaaaagtggtcccatatattttttctcttatctcttaatataaaggcattttagtatttgatatatattttgtcttgtagtttattacacaaatcctctatctcacaaaaagtaaaaaaagtgtttatttctctaatttaaaaaaaaactacctagtttgtaaattatgtttgaaaaagtgtctacttttctaataaacccttaattttaaatcctgtatatgaattgattatgcaaataattaaaacttaagcttagtaaacagtgatatatctcaagttaaataactacggtcaatactgagaacttttctcggttaggattaattagcattatgaagacgtggaaccgacctgaaatgtactaatattaaatgttaattgtcgtcgaaggaacaatttctatgattgaatattaacattatacgcgagcggttgaataattctgctgattgtttagtcattttgttcgtgaaatgatgctttgtcaacatcaaacattataatgataaattgataaccataattgtaattaagcaagtcaatgttctgattatctcatacgtgtaatttcttttgatatttactttttaagtactccaccgtcaccacaaaaatccagtgaatcgtaaatacaaggtttatacaagttctatacatgacacgaataacaaatatgacaaacaaatgcgttgggcgtgtttaaaagtgtactttttcaaactataaacccgtgtttataaataaatttgatgtagaaagaagatttttattctgtctcgttggtccaactgtccttccagataaatattctaagcaacaaagaaaagttttataatgatcaagatcgccaaaatatatcccagaataaatcaattatttcgtcgaaaaatataattaattgttttaatacatttgaccatttgcatataaatctaaaaccatgtccaaaagctgctctaattaagtatatatatgttttttttttcctcatattacaaactgtaaagaaataagaatctctgcactggacagtttatgtttgcatgtgtacatatacataatacatcgaaacgtatataaaacaaaagcgaccaagatgtttgttttctattgtttattctctaattcatatgagctgtatatatatgatgcagatttgatttactctattctcaattacatttttattctgttatcgtatgatttatatagataatctagctatgtgtgttgtcaatctgtccaaataatatctttgagggaatgcattcgtttatacatgtgtacaaatatagatatccaccaaattcaatgattgatccaccgttgacaattacataattcattcatgaaactatgaacacacaggatatgtttcactctcatttctttgctttataattttcttattattatttggccatacctcagttttttatggacgtaacatgaacatcgatattatgaatctgatgattgaccgttaaaattcattgcatcaactctttacaagcttacactcattgcatcaaccgtacgttaacattcttataattttttaattcattgtttcaggttgtcaacgtcaatcttattttcgcagtaatatttaccatcatattctttcctcaacagaaacataaacattctatcacgctgcataataattcctaaatacatcacaccaaaactagtggttaataagcgacataaccaagatgaacctataagctagcaaaccacaaacttgggttttatcttctgatgtttgggcctttcctctaagcccaataaagtaatctagcatcaccaaaactgagagaacccacccacacgtttgagcatttttttaaaaaaactatttttaaccgccgttattattgttttactcccgtaaaaaaaaaaaaatctatctccctctcacaatctctcctaacaaatactacaatttggtaacagatctcatcggagcaacagtcatcaaagagccaatg

SEQ ID NO: 5513 - DNA, 3000 bp, Unknown
  misc_feature (1)..( 3000): cDNA_ID_2724473_gDNA_ID_1620797_Annot_ID_168519 3000 nt of promoter + ATG
gagaaatccatagttctttgggatatgtccggagaataagttggaactgagatttaagtacttaagactaaccaagctgctgaaaccttccggtacgacgccgccgagcaagttgtttccaagagcaaccacttgaagatccggtaaaccaaatagttcgactggtaactgaccagagattctctgtttacttatatccaaaacctgaagcttcattaatccgctaatgctaaccggtatccgacccgttaacccgcatccacttatgttgagaacactcaagcttttcagatcacccacattggacggaacttcgccggagaatctgttgaaactgagattaaggatggtaagattagctagctttgttatctccgacggtattgctccggtgagatgattttcattgagattcaatgtctcgagtccgtacaagctgagaagatccgatggaatccgacccgagaacccgtttcttccaagagatatcgttgtcaggctccgtaactgacttagaaaacccggaatctgacccgagaacttgtttccttcgaaatcaacgactcttaacgatttgcaattacggatactcgtcggaatttctccaacaagtgaattgttagctactctcagctcctgaagcgccatcaagttcccaactttagccgtaacaccaccggagaaaccgtttccagaaatatccaaaaccactaaagaggtcaaatcagtcaaccacgcgggaaaatcgccattaatgcgattctcgtgaatgtcgagaatctccaaattagggttcacgcaagctgcatttgacggcttagctattcccgtgaagttattaactcctaattgaatgattcgcatggaggaattgtaacctgaataaccacatagaagactaaccggaactgtaccggtaaatgaattctccgataatgaaatcacctgcaggcttcgaatcgtgcctaaagtaaccggaattaaaccggtgaggtgattaccggttacgctgaagtgtataagcgatgaacagttggctaatgcggatggtattgtgccttgtaattggtttgagtctagccagagatactcgaggtcttgtagttgtcccaatgtagccgggatctcaccggagaagtggttgaacgagaggttgatgagctggagagatgaatccgctgagaaattcgccggaatcttaccggatattgcattggaagacaaatcgacgtaacgaaggctcttcgagactgtgacgtcggatagatttccggtgagtgagttgtgagcagcgttgaggacctggaggtttcgtagattcagtatctccggtggaaaatcgccggagaaggagttgtagtgaagataaagagctctaaggaagacacaacgagagagagacgaaggaacggcgccgtttatgtcgttggtgtgaagacttagtttacggagctgagtcaactcaccgagtcgaggactgaggtggccggtgaggtggagacgaggaagacgaagctcacggacacggccggagaagcaagaaacgccgtgccagtcgcatggagctgatggagatgattgattccaggactcgagagctcctagagggtcgtggagagagagtttgaaagatgtgagtgcttgagtctctgatgagatggcggaggtgtggtggaatctggagaagaagattgcggcgaagtgaaggaagaaaatgaccgttgcggccattagagtggagaaaggaaagatttttatttgcagagaagaattagtgtttcgtctataatataagagaggagcgtaaaggagggagagtgtaacgacatcgttttggattccactatatggaactcttgggatggtgtgaatttttgttgttccccaaaagtaaattatataaagatgtatttgattattaaaaaatggttacctagtgcttatatctacaagatgtagattaaattcattgatcatgtctcaccaagcaacgtaaatatcatcaaaacactatgagaaaatatcttacatgcaatatggttttgtgtatgtaagtatacatgtgcgtgtatgacagtatctgcattatgttcgtagctaccaatcttgtgacaaatgttacgaccaactctgcatctctcatggctggtaaatcagaaactaccaaatcgtacatatttctcactaaaaggatattcatagcatctcatatatggttagattatgaattattatgattttcaatattcaaagcttactctttctaaaaatcgaaatccactaatcaaaatgtttttcattctatgttaaggttcctggttattagttaaggttcctggttcacccatagttcatgcaaagcaaaaggggaatttataattttataacaaaattgttttatttacagtactattagtcactatgagacatatggataatgtagacaaatagattataagaaaaatgtataacaaagacttattataccactaatctcacaaagaaagattaaacaaaaggatattttaatccaagaatcataatttctgccggaatagatggaccacaagaactagacataaagccgaaagagactagtttaatcaagtacaacaagtccttcgtgttctcttttctttgattcaaatcttgttaagtgtcatataatttgagctaagaaatcgaacacaaatccgttgtagtctagctggtcaggatactcggctctcacccgagagacccgggttcgagtcccggcaacggagtttctttttattttattttttgataaatgggcttccgacaaagcccatattttggtttgtcttaagcccgattactgtttcattaatccgatttttgctttctcatccattaggaaaaaacccaataaatgtgcacttcgtgaccttaaccgccgtcggcaaacaccgttggttttttactttcttgttcctttgtgtcgccggagatatatatcttcgacatcggtgaagaatg

SEQ ID NO: 5514 - DNA, 3000 bp, Unknown
  misc_feature (1)..( 3000): cDNA_ID_3077403_gDNA_ID_1620797_Annot_ID_168518 3000 nt of promoter + ATG
acatttcttcattgtacaatgctgttttgttcaccaaacatgttgagagaacatcatgacatggatattgtaattgtgaaagaaaaccaccagagttcaatcaaatgtttcttcttgtacttacctagtaaccatgtctacctcgtcaagcacattgattcagtttgtaatactaaatctatcctcttgcgttatggaatcagctttccttgacctcaaagcagttaccatgtccgacaaagcgcctgccattttccccaatgctgctggatcaaatatggctcggtctcaaagaggtctttgaatccggttcactcttcctttttctatccaccaaatgtgtgtttgcttgcgctacaattggtgatgatacattgtctgttgccaatgactcttctgaaccctcaaagttaattgattacttactgttgaagttaagcatatcatcttttttaatttgatttaatatttttcttcataggcatagtggcccatatttaacctcacataatcaaagtttttaaaattattattaaaaatccaaattgaaaactttaatgctaaatctacataataataggaaaaacaagttgaatgtttggaatcgcttacgactaatgctggatccaaaatccggttagttttcatatcattatgtaaatttaatatccaaacaaataaaaacattaaagaaaagttttttaaattctgaaaaaaagaaaaacaaaatcaaaatcttaaaaagtatttttaaaaatccgaatgaaaaacttgaatgctagatctacataataatatgaaaacaagttgaatgtttggaattgctaacggctaatgctggatccaaaatccggttaatttttctatcattttttttttggtaggctattttctatcattatataaagttagcatcctaataaaataaaaaacaaatataaaagattaaaatccgaaaaaacaaaatcaaaattttaaaaacaatttttaaaaatctcaattaataatttgaatgctaaatctatataataatagaaaaacaggtcgaatgtttggaatcgctaatgacgaatgctggatccaaaatccagttaattttttttttatcattatataaagttagcatccaaataaataaataaaaagacaaacaaaagagaaaaaaaaaaaaaatccgaaaagaaacaaaatcaaagttttaaaaaattatttttaaaaatttaaattgaaaacttgaatgctaaatctacataataatatgaaaacaaattaaatatttggaatcgctaacggctaatgctggatccaaaatccggttagtttcgtatcattatataaatttaacatctaaaaaataaaattaaaattaaaattaaaaacaaacacaaaatatatcaaaatctttattagaaaaaaaaaaaggaaattaagaatcaacgaacctgactcatggtggactaaatggattatgactctctcggcatgactcatggattgttgtttactaaagcccattcgttgtaatctgaagcccatcgattcttccttgacttgggccgaaactgcaatttttgatgatgaagaagatctcgcttttcaggtctgaaactctgaaccaccaaaaccccagatcttgtcgtcactttcactcgcgattctctttgtgacgattatattttgccgaaagtttagatgcatccagtttttgcgtcacgtcaaactagtttctggaactcaaagtaatcttcctccataattagcccgcgatcgtgaaaaattgatcaaacacgagagacctctttcgacatgacgttggtacagtacggcaatgtatatgggtcataaatttcacggtcacgatagatcagcgatcctttttgtaaaacagtcgcagagaaagagaataatttttttagggtttagaagaaggagttatgatttcttaaggaaggaaggaaaagatgaatatttatgacgagagaggttcacgcaacaaaaaggaaacatcagattgttgttttccttttttcatgtttggacttataagaaaaaaggaaattaatcaagtttacaacggtcttatttttctaactgcaaaagagtacgtgttagaattttattatacaacggtctatttttcacgcgcctacgcgcatcatccttgccgtatcttctctcgaagcttcccatccaaattcagcttcttccgctgccagttccactttgatgaaaaataaaagcccaggcccaataaccccaaattcttttttaatttgatttaatattttttcttcgtaggcatagtggcccatatttaacctcacaatagaggatacaccaggatcgaagcctggcttgataagataatggcaacaacaatgaaccaccactcgcccaattgttccttcttaacgtgtaaagtttgttgttcccataagtaaaaatattcatatataactaaatattcaattttatattttgagctaaaaaaataattttattatttagcaatttattgtttttttttatcatattatatttacttattaatgtggacaactaattaaattatagagcgaccgacaattgtgacagtgacactggagttggactcggctcaatttaaaggggtagttcagtaatcatacctcacattactacactcttgattaatatataaaaccaaatcagtttttaaaaataagggaaaatcctaataaaggagaagaaaaacagatctgaaatcccgcttgatactccaccgactttaaactactggtttttgtttgatttaagtatagtgttaatgactcctctctccaccttcctttgattctacctatcacttcccttgccgttgctccatcttcatcactagtcactatacaccaatcttagatccgggaagctaatttctcttctccgatcggtgaatgcagttacattgacctcggatctaaccaagctcttctggtttccagctctctggaattcaaaaaa

SEQ ID NO: 5515 - DNA, 3000 bp, Unknown
  misc_feature (1)..( 3000): cDNA_ID_3077409_gDNA_ID_1620797_Annot_ID_168516 3000 nt of promoter + ATG
tttgtgacaaactcaagaagatacctctctagatacaaaatggtgttactgtgcctaatgtattattcgtttaccatgttataaaatgcacgtgtgatttggggtatgaaaagttggcaaaacggtttaaatatatggaaaaaatagagacaattgtgtccccatttcatatagtcataatactttatactgttcatatccattagtagaatttgcatcacctttgaagtactttactgtatcacgttccatcttctaaagcaaacttctactgtaaaagtttacagtaaaaccatagtcatatgcctaaaggaattgccatgaaagtgttgaatacattgtgatcatacagtatatatgaaaagcatgcggactattttgatactagaaaccttgtaacaactacaatgtatttcttttcaaacactcattctaaaatcaaataaattgtagaaaataagatgtgagaaaatgattctggttttggtctttaccacctataattgtgttatcttttgtttgttatgttgctgttttggttagaagtagagtccaaattaggagttcgcatcagtttggctcatagagaatcaaacaaattggtgaaaaaagaagaagaagagattctagctgacactcttttgtttcacactgaatcatacaacaagcttcatatcaattaatgcaattgattgagtagatagatatacaacaactatcattcaaaaatggtccctaatttttatagtaaattcatcaatcattcggttgcatccttcttcaattattgatttctctacacaactcattaatttatgaagttctgcattcgttattgataaatttggtaatttgtacgtacacatacaatgccatattggataggccatctctagaatttttgtaaatatttatgtgtttttccacacaatgatgatatgtcacgacttgtagccgtgtggtcctctggttatgtatcatttttgtgtaactcctttaattttattatttactttgcagagtgttctttttttctttaattctttttcttttgggataaaatgtaatattgacctactagtgtaatttttttgaattttaaaattaaagatttaggtaggagatgtcagagcgggttaatccgtcccatttaacctaatttacaacaaattgcgatactttgcgagttttgacggatcattccatcgaagacctcgatattcaaacatcattctaaatcctactcaaatttcaattgtctcttgtactcatgtatttcatgtatgagaattatttcactgtctgaatgggttatggatactactgatcataaccatatcgcaaacccattttcaaacatctaagattataatcctaatcagatgtatacggagcaccactagatttaagagaatggggacataagctggtaaagaattgggccaccattaaacgtgtgaaagaagaatttgggtttaggcccatatcaagctagattctcatgatacttggttaaaaagcaacctttttatttttctccgaagcaatttacatttgagattcatgatttattcatagtaacgactaaaagaaagaagatgatgcatagttagttagtacagtgtgttttccccaatagtttcccacgagtcaggcttaacgttttcctctcgaatgactctacgtacctcatttagtgacttcgttttctttcaccttaagaattggatcatcgagtttaggtattgttgtctctttcttttcctgttcacaaatagaaaaacgagcaagattttttattgaagttcactcacaagtcaaatgttaaaatgaaacagagaagagtagagaggtgaagaaataaatatacctcagccttagattttggtgttgattgttctgtgatatactgtaagatctcaaagaatttggtctgcccttggttgattgctttttggagatatatcattgccatatccttagctctagtctttaccttcaccaagttgcggtcaatttcattttcatgctttgctatatatggcctgaagaaagaatcgtaaacgtatgttgttccctgaaatgatataacacataggtaataaaaattagagaaaaagtcagttgaatcaaaagatatataagatattacttactttagtctttggaaaccagagataaatgaagaaagccaacttcgcctcgctatacattggtaaccttcaagacaacatgaaaacataagaatactaatatacaatactgtaaaactctttgttttctaagtaatataaacagcctaccaagaaacaagagcatcaccaattctttcgaaaatcgtcaaagcagctacaataatcctgcaaagatgttttgagtggaaggaagcaagatttatataggaacctaaaaaggttatagataaaggatagaatgtatgcatataccaatactggcaccagaactgaagttgttgaatttcaggcttgttgagttcgaccgttttgaagcactcataagcaggatatgcatatccaaacaccattctgtcaataaatagaaagattcattacttagtttgattgaaagaaatgtgtgttttataaaattaaaagaagagatcaataacatacaaaagccctcttgtcagaaacgatccaatcattgtgatcacctgctaaaacgtttaaaaaaaacaaaagaatctgcttgtcagaattaaattctcgaccccgattcattgaaatgattatatcatccaaaatacaaaaagacagagacaaaacaatcaactaaacaatattgatgcatgccttcaaacgattacacttcctaaaggctaatatgaagaagaagatattaacggtttaagcgattgaacaataacacataccttatcagaaaaacggtttcggcgaaaaaggaatgagaagaatgatttcgaacgaattatagacgacggttacgtacgatagtgacttgcgaatggagaaacaaaag

SEQ ID NO: 5516 - DNA, 3000 bp, Unknown
  misc_feature (1)..( 3000): cDNA_ID_3077412_gDNA_ID_1620797_Annot_ID_168512 3000 nt of promoter + ATG
ttaatgagttgtgtagagaaatcaataattgaagaaggatgcaaccgaatgattgatgaatttactataaaaattagggaccatttttgaatgatagttgttgtatatctatctactcaatcaattgcattaattgatatgaagcttgttgtatgattcagtgtgaaacaaaagagtgtcagctagaatctcttcttcttcttttttcaccaatttgtttgattctctatgagccaaactgatgcgaactcctaatttggactctacttctaaccaaaacagcaacataacaaacaaaagataacacaattataggtggtaaagaccaaaaccagaatcattttctcacatcttattttctacaatttatttgattttagaatgagtgtttgaaaagaaatacattgtagttgttacaaggtttctagtatcaaaatagtccgcatgcttttcatatatactgtatgatcacaatgtattcaacactttcatggcaattcctttaggcatatgactatggttttactgtaaacttttacagtagaagtttgctttagaagatggaacgtgatacagtaaagtacttcaaaggtgatgcaaattctactaatggatatgaacagtataaagtattatgactatatgaaatggggacacaattgtctctattttttccatatatttaaaccgttttgccaacttttcataccccaaatcacacgtgcattttataacatggtaaacgaataatacattaggcacagtaacaccattttgtatctagagaggtatcttcttgagtttgtcacaaaaatatctgaaatcttacaaaaatttcaaaacatatctgagaaaattcatggaaaagatacgatttatattcaaaataactgtgtacaatacgaagttctctttctctctctctgtcggtgttttagaaatcagctatcgttcgtggctctaatatttaatggcatattcaaagcacttgaagttatacaaattgggaattggaaggtttctctttactgcaatacaagatgggcaataccaatattaaatttatatcgattttgaagttataaatggaaaaaactattaatcacaagccaatactaaccggccacgttgtcagtagagactcttttaacatgcagtaggattaaattttctgtcagtcgaataaattccattgtcaccggactaacaatagtattttaaatgttacgtacgtaaacaattactactttacttttcgttttttgaaattcaaacttgtttatgaatcaaacatattctcaagatctcgcgcttcgtttcttcttttgtctcaatgaacataacatatttaacaaaattttaaacgaaatgactttataacaatctctggtgatttttataaccaaagtttaaaacaaaagagaaggacaaatgtggaacacgacaagtgagaaggccaaagcgactgcgtgataaatccaagtattgcggcgaatgtgaaggtcttagaattttacatatagtcaacgatcaaccttaaaatcgtagtttcttttgattgctacaaattttcaccctaaatatgattaatttacttttatgttattgatgatgaatgattaatataattactcgaaattgtgtgttgtgtttgaacgcaattaccacaatctaaaaatatacaagctcacttgagttatcacattaaaaatgttcttcccataatgtcgacatttattacacattaaattattatttatttagtgcattaaactgttttttatgataatcagtatattaataaatgaatttacacccatacttttttacacaaacttcaagtgtaactccacctctatttactgtactgagattagtttatgacaccctatcctaattactttgaaaaaaatagtctatcaatatgaagtaatacattgcataaatctgaaatacttacatacaaactgagaccaaaaactattgaagtaaaaatgatataaatgtaccaaactatttaggaaacaaggaattaagagcattgaaattttcaaatcgagacaaatagaacatttggaatccgtaatcacagttccaaatacgaagtttccaaagaccttgtctggtgtttaacgtgtaatcttgttctgttaaaaaaatacttttgaccatacatatcaacaacatcatttttagaattattattattattatatttttgatgtactaattaattccatttcttttcttgttgtcttgcttgcattcatggaatctccaaactttgatttttaaaactaattatttctgtcatcaaacttgttttaatggtgaacttatacatttttattatgtagtaacgactattaataaagagattccattcaaagttttgagtataataaccaaacaaatcaatactaccaatataaacatcagtgacgttgactaattccgcctttaagaaggtcaaactgtaatggaagattatagatgaagcagttaaagcacatacaaagccaaccaagctcgtccaaaaaaattaacttcaagatcttctaactaatttataatcatcaaaaaagtaatttactatctatccaaaatccataattaaatactgttttttcttttgaggaaaatccacaactaacaaagcaagcaaccagatgccaaaattaattagaaagatatttttctctgacaaaacaagatatctgaatatagttaaattagtaccctattttctattaaaagattataattttaataaattcgaacgacaagaatattaatcagaagggtaagaaagtaaaactgtaaaataaagaattaaagaaagatagagcccactactttaatcttcttccctccttattacccatcttggatccatcttcgatttcaacacctaaaaataaaagcttataattaaagaaccataaagacgaacacaaaagaaactctcacattctcaagagtttctttcttctttcaatg

SEQ ID NO: 5517 - DNA, 3000 bp, Unknown
  misc_feature (1)..( 3000): cDNA_ID_2164222_gDNA_ID_1620797_Annot_ID_168510 3000 nt of promoter + ATG
gcgtgtgtagcacggtgcaggctttcgaggaggccgaggctgtgtcacagagcgtgcgggacttgctgctacaggtgcaactgtgtgcctccgggtacgtacggaaactacgacaagtgccagtgctacgctagcctcaccacccacggtggacgccgcaagtgcccataagaagaaacaaagctcttaattgctgcggataatgggacgatgtcgttttgttagtatttactttggcgtatatatgtggatcgaataataaacgagaacgtacgttgtcgttgtgagtgtgagtactgtattattaatggttctatttgtttttacttgcaagttttcttgttttgaatttgtttttttcatatttgtatatcgattcgtgcattattgtattatttcaatttgtaataagattatgttacctttgagtggttgtttatcatactttttttctatggtaagaggttttggaaaagtatcgagaatgatatataaagtaattttgatatcgacgcaagatgataactactagactagctgagtataagaatattgatgtatatatttgcggacaattttgaatttattataccattatttaatcacgaccatataaaaataattcttgtttgcgttataatttgtgttaatacgatagagtagacaaatgaagaccgagaacataaataatcatgatcattacggatagaattttggtataagatatttgttaacatcgatatttatttgacagccatataccttattccaaaatttggtccacacatcgaacctattacctatgaatagcatatagcttatataggttcgtgtctaaatgaaaataaaacaaaaatatgactttagcgtatatgaattgatgatagtaaagtttccttaaatctagcaagaggaagtaaactgatttggtaaatcccttgtgaaaactgaaaagttcgttttgttaaaatcatcgttgattcattttggtatttttcaaaaaggaaaaaataaagaactgaaagcccccggcgaggatcgaactcgcggcctttcgcttacgaagcgaacgcaataccactatgctacggaggcttttcgataatctctgacaatcttggcatatttaataaaaagcttatgagaaatgttggggactcgcaagttttgtagcatagtcattgcattttcagaagccaatgttaacagaaggccttttctcacgtttatacgtttaattcgtctactttctaaggttatatctttcttgggccattgttcgttatatgggccttagttgtcacatgagtgggttcttaatttactcaactcgtatttatgagaaaattgtccaagtgaactgataatgaaatttgcacgaaggagagagtccatgcaaaaactgaaaaaagtttgacaaaaactcgaaaaagtgaagccaacataaaaatctttggttagacactaaaacacagtagatgagtagacgtttggcgaaattcacctgacttgtcgatttcaatttgatgacgtggtcaaatgatttaacttacaacaactaataatagccgtcgattttaataaatctccactagttatgagcattcagaaagccatgccgtttcttgagactagaggattaattaaaaaaaacgccgtgacattctctcgtagttattgaagacagccagacgtttgagtagaaagggacccgcccgacccggttaacgaagttgatcataattggtttataaatatggttgcggaaaagtacataagaaattcatcaataattctagtgctcaatatttgaatatatatcactgaagtagatgatgcgttcagaaatattggatgtttagtcttaattaaacgtatatgggtaaaaattgattttaacaaaaaatttaatttggttagccgtttagtcattaaattatttggtgatagattaatttgttcattttattaaacattcgtaagtgaaacattatatactaaaaaatcggaaatgaaaaataaaaataatgcaaagtcgtagtacggattcaaatcatcgtcataggaaacccatgtcgtcctagtacaatttttttcagctctagcttgctgacgtgtctgacacattgattttctaaggaattacgtggcacaaacacttaaaaataatcagacggttctcgtatctccttgattacacaccgttggatcgatgactgaggaagataaaacgaaacagagagagaataagcgttttgttttgtcatattttgtgttttgtcatattttgtgtgacatttacaaaaagcgatcgagtgagtgaagcgacagcttcggattatccgtcttatcggaatgtggaaactttgagaaaatacaagaacaactcatagagagacacacaagagacgtttttttttttatctcttttctctatttgaaatctctgaatagcttctgtgtttttcgatgatttgtactgtgtacgtttttttatcttcttctacttcttcttcttgtgtcagttacatatcaatgtttgatttgattgaagaacagtgactccattaatgaagctttccttatagtaaatgcttttttcgaaaaaaatcaacgatctacattttttttttttgtattcacgggttgaatgtacaaacattaataataataaaaaataatttcttctttaagtcttcttttttttcttttggctttatttgtctcatctcttttatttcacgaagaacctgattcttcgagacacgagaaacgattttataacttttctctcttttttcttttcctcttctttaacgtctttttacttttctctcttttctcttcttcttttgtgtatctatctaacaatcaaagtgtgtgaaaatcgtaagagacctttttttgttttgcagagagatgttgaagaagtgagtttttttttgttcttctctattagtccttcttcacctcttgcttgagtggtgagaaaaaaagaag

SEQ ID NO: 5518 - DNA, 3000 bp, Unknown
  misc_feature (1)..( 3000): cDNA_ID_2105101_gDNA_ID_1620797_Annot_ID_168506 3000 nt of promoter + ATG
aaaaaactaattttgtagatcataatcattttggttattgagttttatcttgcccatttattgaatgtgttattagtttcattgtaaaagatgttttgcttgatttgcataattaacacttggtttccaaattttggtgtaaggttatgagagcttcacttgacgctggtcacagtttgccaaatcctgatggtattctttttaacgggcgtggccctgaagagaccttctttgcatttgaaccaggtgagtttttttcttcttttaaaaatattacattatatctttaataatgtagtttacacacaaatgttctttttatgttgtctatatataatcacaggcaaaacatataggctaagaatatcaaacgtgggtctcaaaacatgcttaaacttcagaatccaagaccacgatatgcttctagttgagacagagggtacgtatgttcaaaaacgtgtttactcgagcctggacatccacgtaggccaatcatactctattcttgtcactgccaaaaccgacccggttggaatttaccggtcttactacatattcgccacagctcggttcactgattcctaccttggcggtatagctttaattcgatatcccggttccccacttgacccagtcggacaaggtccactcgcacctgctttgcaagattttggttcctcagttgaacaagccctttccattaggtaaagaaatactctttttttataccaaagaataaaaacttttatatgaaatatttcgtttagtatttgttcttgactaataaacgttaagtgtacgacacagaatggacctgaacgttggagcagcaagatcgaaccctcaaggttcgtaccactatggacgaataaacgtaaccagaacgataatattacataacgacgttatgttatcgtcgggcaaactacggtatacgattaacggcgtttcgtttgtctaccccgagactccgttaaagctcgttgatcattttcagctaaatgacacgataatccctggcatgttcccggtttatccatccaacaaaacaccgactcttggaacttcagtggtcgatattcattacaaagatttcatccacatcgtgttccagaaccctctatttggattggagagttatcacatcgatggttacaatttcttcgttgtcgggtaaaaattacaatatttaaatcataattatgtgtatgatgattaaattaggtgtactaattttatttgagtttaatgttagatatggatttggagcttggtctgaaagcaaaaaagctggatataacttagtagatgctgtttcacggtcaacagttcaggttaagccatatctaatctcgtaatttaaagtattaaaccagtgattagttttggttaattgattctgtgtgtgtttaggtttatccatattcgtggacagcaatattgatagctatggataatcaaggaatgtggaacgtgagatcacagaaagcagagcaatggtatcttggtcaagagctttatatgagagttaaaggtgaaggagaagaagatccttcgactattccggttagagatgaaaatccgataccgggaaatgtcatccgttgtggcaaagttcgataataattaattgtctgaaataataaaacctagaaaagtctattttaattagcaaaactaaagaacggtttaaaggaatgatcagagagtattaggatctgtgttgatcttagggtttgtggtttgattgcgattcgaatcacttgtgtaattgcagaagacggatggtaatttaaagagatgatcttagggtttgtggtttgattgcgactaaagactactagacgatgccgttttagattttaatgggctcacacagttgttatctgcaaaccggcccaggtctgttttgacttggtgagtgctaacgtgctctataagaagatattgtagccacatacgaacagctaacgtgctcccatttcctctatgttcccttgagtgacatacgttttcacaataagttgggagcaagtaatttaccaagaacaaatatatattttaaaaaatataggatccttttacaagttcaattattgattttgacgttacgtataaacagtagatcgaccatgacataaataaaaatgaaaaaataattggatcaaatctcagatcttactacagtctacatctacctagctacatgtgctatggcattatttgtttttcatgttatcatcaatattgtataaaagatccaaacacaatcagtgtgatgatatttttctatacttttgatcattcaaccgatttcaattattgtgtttgatcgtttacatagaaataggtacatatgcattcaagatctccagatcgtttattacgtcttgctacatgtgctatgtcactaaaacaactaagatactacatgcaaagttactgtattcattacgcattgatcgtcttcttctacgcactattattgaatttttgtttctcgatgttttcagaagtcataacatataatcaagggtggttgtagctagtcgtgatgaaattcgaatagtaaaagattcatcaaatggatcaagatttgaaactagaatgaatgatcgatacttgaaagctatcacacttaaatagttaaatggacgatataattcaacaatatcttaaataacattaatcattcactttgtagaaatttcaatttgacggtgctaacaacaatatgtgacatttttgtttgcagcaaaaaagtcaaatggtaaaaaaaaacatttttttaaaaagagagtatagtaaaaaaaacagaggataaaaaacgaacaaacggttaaagctggcaaagatcccatcttccccacgctgtcaaattttgtcactacttcccaaaaaaaactctcccgcctctctctctccctctcccttcttattctcctccttcttctccttcaccatctccagatcccaaaatcttcatcgatcatcatcatc

SEQ ID NO: 5519 - DNA, 3000 bp, Unknown
  misc_feature (1)..( 3000): cDNA_ID_2164214_gDNA_ID_1620797_Annot_ID_168507 3000 nt of promoter + ATG
ccttcacaatgtctttaagatcagcaatcatcacataactacaaccaatgtatcaacaaacatgacgatgactgaaagcattaatgatttacctcttgacatagtagtagcagaagtcggctagaatgaaggtttggacgatttcagagagaagaaccattataggccagaaaccatatcctaaagcagtcaataaccgccctcgagtgtccaaaacctacaccatcatcacattatcattatatactacacaatcaagctttctagtttggaggacagaaaacaaacctgaaggacccagtgtgcacaactcaagaacctagcgatccccaaagcgaatacgtaatgtgctgtaaatggctccacgatctaagacgacacatgcgttactaatttaaaaagggtaaaggacagggactagtttcaagctttttaaaagtaccttagtgttttgcatgactctaagttgaggaaggactgaaacagcttcaaggtaaacacagaaggcccaagaaatcttattgattatatgatgatgtgttgatgggtgaatgagtactgatagaacaacacatggaataacctgcaaccatatttaaaaactcttcacaactaaacacttcaacaatgaaactcaaagtgattagcaaaggaaatctaacaaaaatgatcacatatggaaactaatggaactaaaggttgctactttataacccttttcaaatatatgattcacattcttcaaaaacacaagttgagattctcgaaaaagaaccaaaaaaggaaagaaagaaagaacaacttacgacgtagtagatagcaaaattgtctttgtcgtccatataactagctttgagcttaaaacggatcatatagataacaaaaagtgtagtcaccaatgtagccgagtcaagtaacgtgtgaatatcaaactccatcacaaaactacaatacagtctcaccgccaaaaacagagctgttagctcttgtgacttgagagataatcctgtcaaaacatatcattcaaagattgcaactttgtacgaattcaatagcatcaaacaaaccctaattcgaaatcgaaacagatcaggggaaaatcaaattcaataatcactaatccactaatcaaaacctaaatctagaaacttcaaaatcaagaaatcgaatataccagcacaagtcctctccttggtgagtttatagataaggacggagattccaagggaatgaacagcttcagcagcgacaaaaagattgtcgtggtcatgaacaatcactctcaacaaaacgagggcagtcatggcggagacaacaccgagaaaacctttaacctttggtggttgccgacgaacccatgtcgtcacggcgtggatcggccttgttgccgccttcatcttcgatttcaatcttgcactctctttccgaaaatagaaacagtaaagtcgaaacctttaggaacttggtgcggtgatgattgtataaaaccagatctgtagcttttatgtaagagattgatcaggtgattatgattattattacactgtttttttggatgtggagtgggaaactggagaaattggtaacgcacccattgctaaaaatcactccttttttcttacagaacaaaaaagtccaaaagttttaacactttatgacggtgacacgtggattgttaagtatgtttaggtggaaattagattcgtggtaagccaacgactctggtttaatttgtctctttgtattcatagagaaactttattgaataggttttcttcaaacttaatgtaagttcatttcaaaatatttgtaatgaattgttaaacgattataattggattgtgtagtattgattcataattatttgtatttttttcttgcataattttatgtgttgtaaaatgattgtttctacggctatgtaaatatcttgttttctgattttagactgtatcagattccacaaaatgattatattagttagagtggtaattattaatttagtatagtgctcttaaaatgtactgaggtgatcaatccactaacactccccaaatctttgcagaatcagttttgatcttcaagaatttgatttggaatatacgtgcgataatagtaattaagattaaacagtagatgaaataaaaattagagctttaattataaaaatataggttataggaagttttagatttgattgatgcaattatttcaataatcgatttgtttttaataatacagctaaactctttccaatatctaaatacaatcccactttcccctattttatgaggttcttgttctcctaatctttcctctagtggtgttgatgattatctctaatatagtcagaaatcagaattgttttcttttcatcctcaagtcatttgccactgaacaatcaaatgaaacttggtgagtcaaaaactccaaacataaaaactaattaagaaaaactcaacacacctctcttaccaaacttgttaagctcataacattcaacattggtttgcttcatcagaacaaagtcttgtgtgagttttgctaagtttggagaaagaaagagaccaccattgatttttgttgtaacccattgccaaagcccaatttggatggaaattaatattataccataaaaaaaagatatgaaagtcgaaaaaatatcagaaataaaaataattttttgtatttttttacatgacatattggggattaatcctatttttttacttccaaaattgactgaaattagttggccaaaaaggtagttacgacgaaaacaagaaactcgaaaataaaaaaaataagaaacaaaagacgagaaaagaaaatttaaccaaaaaaatgtactgacacgtgtcataagcttagacccatcaaattattatatgaaaaataaaaacaaacaaaatcttctgagaaagatttatctcattaacccaatcgtttcaagccgggaagaagagaagactattcattcgtgtctctcttcattcaatg

SEQ ID NO: 5520 - DNA, 3000 bp, Unknown
  misc_feature (1)..( 3000): cDNA_ID_2154004_gDNA_ID_1620799_Annot_ID_168562 3000 nt of promoter + ATG
cattgagcggcgaagaaaagaacatggtcatactaacaaacaatattccctacatttcataatattaaatgttttagataaaagcataaagtttaagaaagtaattaattttgagttttataaattaaaaatacaaattaatatctattaaaaataattagggttcaaaagccgtttaatataatgttttgcatagaaacttgaactgtttcttcaaaacatcatataatatgaaacataaggagtacaacataagaatatatgaaaatgcatagagattggatgaagaacaaaagaaatttacctatgttttacttgtaattcattttttgttttgcttatattttacttactttttttcttaaaaacaatattattattaacaaaatttatattttgtgtaattctagaaaaactataacgtattaacataatcgtaaacaaaatctcttattacaaatacattataagcctacactaaaatatgggattatagttttgacaaagaatgtgatttaccttttctaggaatggaacttggtattgtttttcatttttttagctggaacatagcaaaaagtaatcgaaaataaaattagagagattcttacatagaaataatcaaacaatttacaatcaaaattttaaagaaaccaagtagcatatgtggctagtcatctaattctatatactaaattaatattataatttataacaatgtaatcatttttccttaatttgatatagctattaatttttttttatagtttatagcaagtaatcatttgttacaacaatgtaatctatctaagtctaaattttccaatgaaattaaatgatataatattaatttactgtaaaaaaattgaattagacaaaaagataatcatttatttcaatttgaaaactgtattaaatttcagaaaaaggtaaaccattccaaaaacattaattcattgacaaaaagttaaagagaaaattcgctaaacaatttttaattggtttttcatcttataatttggtattaaatgtaaaatacataattttgtttatagaaataaataaactacataatttattgttgacagtgtatacatttatttagatgtgtttctatataaggtgcaaaataaagaaaatagaaaatcatatatatgaaagttggcaaactctctccatatgagtgacacatcatcacaccagtgagtgtcacatgtcattctaaattaatatcattaaaaaataacaaaacttagtgataaaaattgaaaagtttcacattgcattaaatcatccattaatctcactcttaacaaaatatctttatttataagaaaaaatacaaaaaatcatgttaatgtatcaaacactactttcattttacttttcttattttgctatttttataatagtcattacttgataatgactataattttttgtgtattacaacttagttgtttgctacttaacctttcttagtttagtaattttaacttactcttttctttttattacattttttggtttacatgatatggtttttttgtgtgtttatgataaattggtaacattaataatgacatgcatatttttaagtagtgatcttttgagacgttagatataccaaaaagttcaatatacgacgctttctctaatatggatatatgcaaaggcaaagagaaaaacctaaaactgttgacttaaaagactatttaatttaagctttcttttttctctttcatgggaaaacttttaaagtagatgagtagtttatatatttgttatttaaattatgtcaatccaatatttagccatgagcctatcatgatgtgattggaatactagattaggagagaatacatggaacaagaaattgtttgcttagaatcaagttaggcaactttcaaaccaaataagtagtataattgcataccattgtatcatattgttgatgtaagtatttcatgatagttaaaaaagtttagaaacttggatatatagataagaagatttatacatgaaaaaataataattgatatttaaatcaaaagtgaatctaactatacaaatataattacataaaatgaatataactttattaactacataataacatacacgaaaataacataaattagtaataaaaatagttaaacataattatttttaaacaaatttcaaacaacaacccacgcgtagcgtgggtactcacgtagtaaatacaaatgagcaaaatgctggaaaagtagtcgatgtgtgcacattctggatatgctttggtgtttctgtccatttgttacatggttcttggtgtaaagaagaaatcaagaaatctcttccataacaaagaacaatacatagaatatagttgatcttctcgcaggagctaagctaattggactaaaatggatgtttaaaataaaaggaaactcgtatggaagcatcaacaagtataaagcgagacttgtggctaagtggtatgtgcaaaggcatggtgtagacttcgatgaagttttttactctagtggcccgcatcgggacactatactttattattgcattggcagcctcaagcggatggaagtaaatcatcttgatgtaaaaacggcgttcttgcatggagagttaaagaagctagtgttcacttctcagctagagggtttgtgaccgaagaaagtgaaaataaggtctacagattgaacaaagcattatatggactcagaaaagggcctagggcgtggaataataagctgaacaagatctaaaggaattaagctttgtcaagtgttctaaggaaccttccttgtatcggaagcaagataaggagcatctccttcttttagctatctatgtagatgatctacttgcacatagtctagtcaaagtcaaattatcgagttcaagaaaggaataatctccaagtttgagattagtgattttggtctgctaacatactaccttggcattcaggtgtttcaacacggtgagggtataatg

SEQ ID NO: 5521 - DNA, 3000 bp, Unknown
  misc_feature (1)..( 3000): cDNA_ID_3077517_gDNA_ID_1620799_Annot_ID_168564 3000 nt of promoter + ATG
ctatataacaagcttatataggtaactatgccgcacaaggtcattgacatgcacttccacgaaagagaagaagaagaagatactggtgagagtagatcatcctcaagaacaccgagagggcatttcgtcgtttacgtcggtacgaagaagaagttggaaagattcgtgatccccacaacgtttttgaagagcccttcattccaaaagcttctagacaatgcggccgaggaattcggttacgcggaagctcaccgggacaagattgtattgccttgtgatgtctctactttccgaagtcttgtcatgttcctgacttctcatcaggacaagtcacattaactatatgagcccactactacgtcgtctgaatgataaaatggttatatgttatgtatctcatattgtatgaatatggtttaattcttataatgtacttatatgctaactttattcaactacgaactacgagtgtaagatttttatttatcatatgttgaatattagttcaatgtgcttttgattggtaactttaagactacgtaaaacttatagcagttaggtattttatatcaagcataaaaaaaaaagtcaaataagggacgaactttgaatatagtgacacatgttttatcaacattttttaaaaataagacaaggaaggatttttgttttacatttactctagaggtttcgaaatttatgacaaattaaagaagtgcaatttgtgttgatccaacaaatattgccgaaacacatcggcaactgcgtcgaactcaaaaatcacattcgcttttctacctagaacaactcgagtagccacattcgttcacaggaagaactggacaattaaggttcttacattttggttgatgactttcatgccactacttaatagttatgacctccatgagtaattattttggttccgccattgattgtaagtccacagaaaacttcactgagtttatgtttacttctcctcttccatttagttgagatcatcaatttagctatactcatatggattaacttggactaatcaatcggaagccttttttttttaatgtaatgtcaaattatatttaaaagaaaaatatatacggttttacaacttgtgcataagaattttgaaaaaagaaatcaaaagaattttgaaaattttagagaataattaatcgaaattgtgcaacaaaaggtatctagctccgagattgaatccagtggaataacgttataacgcttgtcacctgaaagtcgaatagctgaaatctgatttcgaatttgtttatccatccatcctgtgatacgctgagccggttgtgaggtttcaccatgtttccggccaatcaatcggaaggcttattatgatttatgaggtaaaaatgttcaaaacctgcttttctccatttgctttataaaaattcgaaaatttattttcttaaattccatttactgtacttcttactgttcatgtaaataaaatattatatgaattaatcaataaaatgataaaatcatgtattaacaggcgagtttctaatttaatgctccatgaatatgttaaatcaatctgtttttattttttatttttgtttttgttgattttcttcttattttgtttatattttttattatatatcaaaatataattgatttgactgacgaatatgacaatcacgctagatcatccacattagttagaacccctcatgggtttctttaaaattaaaagaaaaactatatttatgatctaattataacattacaagtgttaagagagatgcttaatgagagatcattgtatcttccccaaaaaaaacctctctcactcttttctcacagtcacaattctttttctttcttcaataatttaatagaggataccacctccaatggaaatgctctaattagaattttcaaaaagtatcaaatatattaattaagattttacatcattcattttaaaaaaaattatagagtagactttagcaaaaaaaaaacatattactcaccaccatatcattattttcttaaaccaaattctggacaaactctatcaattaaaatacagctacaacactaaccaattaaataacttaaaaagaaaaatcaaactaatttataagacgttgaaacattaaacaagtgcgaaattcttttaaaaaattgtaggtgatggagaccaaacagtaaaaacttacacctcaaatttgaatttaaagtgtttgtgtaaaacagtttttagttttacccccaacaaaatcaaatcaatcaacaacaaaactaatgatgctaaaacctataagagcattcacaactgtggaactctcattttaattattaaaatattataaaataatgaaaagaaagtatggaaagagacaatgggagagaatcgtcaaataaaactctctctagagaaactttgagccatatgagagaacctctactttacagatgttaagattttattggtaaaaaccaattattttaattaaataataaaattataataaaaataatattttttattcaatacatacccatttttgaaaacccaccattgtggatgttctaatgggtttaaatccctttaccaccaaaacgacatcgtttacttaatgactttaaacttagcctaaaacgacatcgttttacgtaatgacttgcatctttctaactgagcagaagccgacaaacgacacacgacgtcaccacaattctcaactttggagctgcagacacaattccggcgacgtttacgattctgacaccgccggtaagggttaaaatggattctgattctgattattgtagattcgttatctaaagattcgaactttctgaacatttcatcgcaaatagctcattcatagaattagagatctctacattgctttgtaataagagatcgatcgttatgtgaatcattgataattcttaaagtctcagacttttaatttcctctttaccaattggaacagaacccacttgtagcaa

SEQ ID NO: 5522 - DNA, 3000 bp, Unknown
  misc_feature (1)..( 3000): cDNA_ID_2154074_gDNA_ID_1620799_Annot_ID_168585 3000 nt of promoter + ATG
ttagaagtatgttgagtgaaagtggtcttgacaagaagttctgggctgaagcagcagcaacctcagtatatctcatcaacagatccccatcatctgctttggaaaacaaaatacctgaagagctgtggacatctgcagttccaagcttatctggactaaaaagatttggatgcattgtgtatgtgcactctcaagaaggaaaattagatccaagggctaagaaaggtgtgtttttgggatatccacagggagtaaagggattcagagtctggatgattgatgaggagaagtgctctataagcagaaacgtcgtgttcagggaagatgtaatgtacaaagacatcttgaacaagttaacctcaggtatgagtcttgaactaccgtttgttactaacaaggttcccagttttgaatgtacaggtcttaacaaggatggtgaacgtttagttcaaggtggagctattgaaaaagagtcagatgaaactctagaactatccaatacagaccaggaagatacaggaacagaaaggattcagagaacccatcagatagccagagacaaaccaaagagacagattgttataccctcaaggttaaaggattatgaaatgaatgaggaaatacttgatgagatagcaggatatgcgtatcttatcacagaagatggaggaaatccagaacccactgatttccaagaagtcctgcaagaccctgacaataagaaatggcttgaagcagcagatgaggagatagaatccctcattaaaaacaagacttggactctagtggacagagacaattctcagaagcctatcgggtgcaaatggatattcaaaagaaaagctggaattgctggagtagaacaaccaaggtttaaggcaagacttgtagctaaaggttatgcgcagaaagaaggaattgacttccaagagattttttcaccagtagtgaaacatgtgtccattcgactcttgttgtcaatggtagttcatctaaacatggaactgcagcaaatggatgtaaagacggctttcttacatggctacttagacgaaaccatttacatggaccagcccgaaggttacattcatgaaaaatatccagataaagtttgtctgctaaaaaggtcattgtatgggttgaagcagtctcccagacaatggaacaacagattcaatgagtttatgcagagaattggatacgagagaagtaagtatgacagttgtgtgtactacaagatcttactaagtggagattacatctatctgttactctacgtggatgatatactcatagcatccaaggacaaggagcaggtatgtgagctaaagactttactgaattctgagtttgaaatgaaggatttaggtgatgctaagaaaatcctaggaatggaaatcacaagagacagacaagctggtactttgactatctcacaagaaggctatctactaaaggtactcaaggactttggaatggaccaagccaagtctgtcaacacacccatgggaattcatttcaaactaaagccagcaaatgatgaagaagtgcagaagcagtctgaagtgatgagggctattccatatcaaagcgtagtaggaagtctgatgtactcgatgattagtacaagaccagacctagcccattcagtaggtctagtttgcaagtttatgagtaagcctctgaaggaacactggcaagctgtaaaatagatactcaggtacattagtggtacattagaccgaaagttgtgttacaagaatgaaggagaatgcattctagaagggtactgcgattctgattatgctgcagacaaaggaagcagaagatctacttcaggagtagtgtttacttttggaggaaatacaataagctggaagtctaacctgcagaaagttgtagctctgtcgagtacagaagctgaatatatggctttaacagatgcagcaaaggaggcaatttggctaaaagggctagtgaacgagttaggtttcacacaaaagacagtgaacattcactgtgattcacaaagtgcaatagcactggctaagaatgcggtatatcatgaaagaactaaacatatagatgttaagtatcacttcatcagagatttggtgaataatggagaagtgcaggttctgaagattgatacagaagacaaccctgcagacatattcactaaggttttaccagtgagcaagtttcaagacgcccttgaattgctcagagtgtctcaaaattaaggtggagcactgctccaagaaaccagctgagtgggtttactcagggagaagaagctgagtgggtttactcagggatttgaagctgaacgagtttgttcaggaaccggagaggaattcaaactaaagcaaagtggcataaagatcaaggtggagatttgaagtttggtgatctatatgttaagtctcaaaaaacactctaagagaatcagaaggtctcagaagtctgttttaggcgagctaaggaggtggcgacatcaggtctggtttaggcgagctaaggaggtggcgacatcagaagtctgttttaggcgagctaaggaaattacgacacgtggagcaatctccttagctcgcccatctctaacggaattatctcttccgagagctcgtcttcttctgtttctttaagtactcatctgttatcttagttctgattattcgatttaaaagtgtattgaatcgagagagagtaagagagagaagagaacaattgtagagagaaagagctcgagtttgagctaagtgtttttagtgaattccggagacatctccggcgagacgtagggttccacatcggagcctgaactcgataaattcccgtgcgtctcttttacgttttttctttgaatccgatctcaaatcaagtcagaacctgaaatcgatccaatttctgaaggttcaaggttcacaacaacaaccatgaatatatcgtaacagagagctctgacattttttatcttcagcaccttcgtcaatg

SEQ ID NO: 5523 - DNA, 3000 bp, Unknown
  misc_feature (1)..( 3000): cDNA_ID_3077483_gDNA_ID_1620799_Annot_ID_168589 3000 nt of promoter + ATG
ttgaatcagacactggtacatctcgtggttcaactggtactaatatattgtttatatttgtaggaggcgatgaagaagaggatccagacgaacctacactttgactatggagagtactatacagcagaccatgagtggagttgcaaaaattcagtatacggtatagtgtttaaaacatcatcgttggagagaataacatatgcggatttaatagataacatctttagaaagattgctctaggtggacagaaaaggaatctgaaattgagttacaagatatctaaagcatggagagagtcttatattgtagataatgaggatgtgttgatatatttaacgtcattggataaagagggacttagacctgttttgcatgtagagttatgcagtgatttggaaagtaataataggctagttccaatagtagagcgaagaagttcatgcggtgtgaattatggggaattggctgccaatgttgtaatggttgcggatgcaaatacatgaattctgagtactaatgaacctattattgaactagaggaacagagtgagacagttagtgaacctattattgaactagaggatcagcgtgagacagttagtgaacctatgatgctagagaatggagttactgaaactgttattgaaccgttgatgctagagtgtggggttaatgaagattctgataatgattatgttagggaaaatatgttcatcttgcacgtccggtacaagaaagtgtggctgccgttgtcaaagaatgggaagatggtattggtgatttagtaggtcaagaatttcgttctaaggaggcagtatgggatttgattaatagagcttcaaaagaggaagtgtttggtgtgaaaactattaaatctgacccgggccgtcttatgttagaatgcagtcaagcatcattgggttgtgattggtatttaagagttacaaatacttcgagcacagatttttggtgtgtgaagaaacacacacaaatacataaatgctctcggtgtccggaggcaactagatatgaaaaactaaaaggcacatcgcaattagtagcagatgtgttgcatgaggactatccgggtcttcttaatactctgaaacctaaacaaataatgagtattggtaaaggaagacttggtttcgattgttcctactccacagctttaagagagaaaaaaaacatgttagtaatgtgcgtgggagccctgaaactagctacaagttattgtttgcttatctgcacattttaaggtctgtgaatcatgggacaataacggaagtggaattggatgcagatgacatgtttaagttcctattcatcgctttgggcgcaagcattgaaaggtttaaggcaatgaggaaagttatagtgatctatgcaacttttctgaaaaccatatatggagggatgttagttattgcaatagctcaggatcctaatcatcatcattaccccattgcgtttggtgtaattgatagcgagaatcatgctagttggaactggtttttcagaaagttgaatttcattataccggatgacccggaattggttttcataagcgacagacatggaagcatcatcaagggagtcgcggatgtgttcccgaaggcatcacatggacattgtgtatgacatttgtctcaaaacattaagaaaaaactggcaggtgacaaagaagaaggtatggccaaatttagggaattaactcatatttatactacgactgagttcaacactagatatgcagaatttaggagaaagcatcctaatgtagccacctatctggatggggcaattgggcttgagaaatgggctaggtgctatttccagggagacaagtacaacatagatactagcaactccgcagagtcaatgaacgccgtgttttcagaagtaaggaagtaccatctgttaccgatgatcgatgcgattttggagaatttttctgagtggttcaacacacatcgcaaagattccgcgtctgcatcgaacacaaggcaagtggtgcctgttgtggagaatatattacacacgcgctgtccaattggtgcaaagctaaatgcaactgaactaaacagcttctgacaagaatacaacgtaattggaaatgacggtttttcttatttggtggacttgaaaaagaatacttgttcttgctgagaatttgatattgacaagtacccgtgcgtccatgctatagctgcagccataaagcgatctaagatggattggaatagccattcaatcttgaatgtaagtatctatggtctatgctcgaagtattacttgatcgagacgtgggcattggcatattacagaacgatttatgtggtgccgcatcaggctcattggttctttcctcctgattatgtggagaaggtcgcaaaaccgccagattacactccaaaaaaaggaaggaatcaagaaacccggtttccatccaaaggtgagaagcgccgaaagaagactaataacaaagctacgcgtggcatcaacttggagaggtggttgcagcctgaaaccaatgatgattgacgttaactcgtcaactagtacaagaagttcaactacgataaagtctttgtgtgtaaatttgtgtttctcggaattgtcaaatattgttcgacaggttcaattaagaacaatcctttgtgtttagatttgtgttttcggaatttttaagcatagttaagttttttagttcaacagaattgccaaacatagttcaacaggttcaactacgaactagtcgttgtttggcaaacctagtacaacaggttcatctgggtcaactatatacacgggtggcatcacaatcaacgcgtcagttgaaatattagcagtgacaggtggcactgcgagtaccaatcgtcgcgtcgtttggaatattatttaagacaggattacaatcgattttacaccattcatatttcatcctatccaaaaaaaagagcccaccccactaataaaggaagtcgtcgtttgtcaac

SEQ ID NO: 5524 - DNA, 2296 bp, Unknown
  misc_feature (1)..( 2296): cDNA_ID_2154105_gDNA_ID_1620799_Annot_ID_168594 3000 nt of promoter + ATG
cttgaaaaacaaaacgagccctttaaacaaaggaggttcaaggaattttaattccagatctaagaattgaaacacaagagagccaatcaaactcaatacaaagaagcctaagagagaaaacataatctacacgagacaccgtagacggacgatgaaactctagacataagccagccaaccaccgttgtggaagccgacggatgccagacggtagccgaccaccaccgttaaaagaaacggacggtgtaagaaaaaaagccggccaaacatcaccataaagacgagcgccgccggacggaaagctggacatccctgctgagaaagctagatgattccagatagattgatggccaacgaacactgaaaagctgtcgttgccggaagaagaaactttgatgacttcctctctgaaaaatagaggtgagagaagagagagaagtccgatgttttgtgtgataaagactcagaaattaacattcaaataaaaaaacttttggtatttctgttatgttatattcattaagttataatatatacatattgtttattctaaaaccgttagactatcaaaaaatcacctatgtacatcttgtaaaatcgtctagaactagactaaaattgcctaggtatttcagacgatagatggaagctttggtgaacactaatgggctttcttggcttatatagttatatattagaaactctttttctaaattttcgatgtggaacctttggtttatacctaacaaacactgcttaatacatccatgtattttattcctttaagcaaatgtttctttcgtgacactctctctcttgtaattgtccttctaaatcaatgtgtattttctctaatgagtaaatagatgattaacatattttccttcaaacttattattattttatattagtaggactatatatgaaaatgacttccgatggaagtgattagttatattgtttttgatgtatcctttttttttgttagagtaacaaatgtagcaatattcgtgaaagttattagaggattcaaatgaagcccaagatagagtcatatgagaagtccattagcccatataactagggttttagttaatagagatttatataaatatgtgtttagaaaatcaatgtaaacaactttgagagttgtttccaactctccctttcatttaatgatatatcaaatctagaatcatttgtgatcttggtgacaaactaaagtctttccctttcctttacttcacattttaataaagctcttaagctatctaatttcaatcttaaatttttctgttaataagctcatttaagcataaaccattgttggttaggtttctcctacaaaagtatattcgattcttcatatacgctctaagcagtctattggtcaaaaatggtttcacctcataatcccacaattattttttgttcttatatctcattgaaattgataaatgttaaaaaaaggtttttcaaattatctgttcagattttttttttttcactggaacgtgttatatgtacgcttttggtgaaagattcgtctttcttttcattctaagcctaaaccctaaattaatgcatatttctctgcccaaaattattaatatattttttttttttttgctaagaatgtaaatatcattagaaatgaaatgtaaggtattacaagagacgcattacctaaattaaattaaccttggcaaaaagaaataaaaacaagattaagataaagagtagttaatcaggaaagattaatggatccaaagtagcataagttgtttacagtgcttcctatgtcttcgagaagtaatagtattgcgcacctcacgatcaatgcaacggaagatgattgacggagggatgtgttgaaggttgtgaaccatgttattcctttgtttccaaatgaaatagacagaagcttgagctgcgactttccggaggagtgacgggccaaaatcattaatatgaacacgtctcatttgaatacccttttcttttagaaagggttaatttatgccatttgtctgatcaacaattttagtccttaagttgactcttttttcttttggtttaacctttagttgacttgcttattagcatcacaatttaatttctcttttaaatttgtagacgacttttacgctcatgagtgggaactttaccaaaagttgtgatcttgagagcttgaagaacttttagcttgccacaaaaataagaaatttcgtcaggaggaaaaacaggaaaagaagagcttgatgaaccttaatttgtcaccgatattgttggaatg

SEQ ID NO: 5525 - DNA, 3000 bp, Unknown
  misc_feature (1)..( 3000): cDNA_ID_2154097_gDNA_ID_1620799_Annot_ID_168592 3000 nt of promoter + ATG
ccatggatgaggtctcctttaccaggatatatggggccggattttgttccagccccaagagatttcgtcccaagtgaagttatttggcccgaaaagttttttggtcaaacgaatctatttccggagatgcatgaagcatgtcaaatgttcattcaaaaggtaaatgtaagaatagtgtttcgttgttgccaatgtggtttggtttagggtttaatcaaatttcaggtttagggtttagttgtgttgattgttcgttatattaggtgaatcatatagtggtggtatagttgtattgatggatatttagcgagaaattgacatttatattgttggacaggtggataatcaacaccaagcttatcgaaggcgtcaccgccaactactcattaagttgcaagacctggagagaggtatgaggcggttggaggctcatccgaaagactgggtgagatacggtttcgacaaagttgctgacattccactgccactaaggagatggtgtgttgagcatgatggatcgtcaccgaattatgcgtgtttcgcggagccaattcccattaaggaggacgatgaaccagatgatggaagttactacaggagagtggatgagcctccacgcgagtatcctcctgactctctctttcaataaacattatgtctttgttttgcttaagtttgtaaaataaatctaaatctaaattgtggttttaaatctttattttgctaactatctgtgttttgaatacaatatatgaatctaaatgtttgaatataattatctgtgttttgaatgtaaattttgctaacaattatataatcagtcgaacggaggtactttattggtcgaaccatttggacaacttagtcgagccatttggactattagtcgaaccggatgaactatttgaactaatcagtcgaactggatgaactatataggtcgaaccgtttgaactaaccagtcgaacacatttgaaccatttgaactaatcagtcgaaccatttgaactaatcagtcgaaacgtctcgcacgcattcaaatcgccaacaatccttaacagaaactcttcaatgtttccatcattctttgcaccagcttttactaccttgaccaagaagtacaacagcactaacttcaacctatctgaaccatgcttcatcttcgagcacttagcaagaacatctaaaacctttatcctagattcttttttgaatatcctcgaacaaagttaatattccccattgtatttagttcttttggggaactgtggcaatcaaacccacttaacaacgcatgctctttaatggaatacctaataggtactccatttaccacaaaccaagcctcctcgagcaaatttgtcttcactatgcgtaacataagcacccacatgcctgacgattaacgttctctaccccttcttttagaattgtattcaccatttcctcctcctccagctcctccccattcccgtctttcgcttcttcgaattgttgaatgacagcgtcaattagaggtttcaaagatgtacctgtctgatcctcttcaatttcggcggttcctttaggagaagcctcatcaccatcacgcggttcctccatagccttttcaatcttagcggtttcttttgtagtatcattcgccgcaacatctcgtgctgctggttcggtcggaaccaagtcgacggcatctccgtcgttctcaatttctgaagtaactggttctgatgtcgaaactttaccggacggcttgtccgtcgaagtaactggttctgatgtcgaaacttcaccggacggcttctctgtcgaatcatatacagggccacctttaccgtctccggcggcatctccgtcgttttcaatttctgaaggaactggttctgatgtcgaaacttcaccggacgacttctccgtcgaatcatatacagggccatcaataccgtctctaacacgagtcatcaaactattacacgaatcaagaattcgtcggaaaattgtgaaaggcgagaaattatgaatttgattttggaaaatttgaattgaatgagagtagaaacggtttgattttagaaattagggatttcgcttaagtgtttggaatgggttttgggttgctaggcatggatcttaattggatcggatattttgttgggtcgtctgagtttttggtcttttgccaattatttggattttctctcatttatctttaattcgacaaaaattgggaattagaagagtggcattcctggttactttttcgcagatagtggcactccagacatttgaacttttatcacttatgccacttttttgaaaaaactgatctggactgccatcagttaatctgaatgccaccgaaaatgtgatataccagttgtacccttaatgagttgattaaaaaaatgaaaaagaaattcaaaagctaaataaagaaaatcgagttcggagattctcctcttcgtcgtcgtgttcttcttctttggtcgacgttcatcttcttcgttggccaccatcgatttcctcatgccgccgacttgaaatccggcgtaaaagccacgaattaggtcagtttcttctcatatttcctttgacattggtgcattgtgattttagattgggattttgaattctatataattcccagctcgattcaatttgatagtttgatgattggtttgcaaagtaaagagtaatcgattagaggttgccgaaacgttatttgaggtgatgagcaaaggaatgtaggttgaatgtgagttgaatttgaattccgagatttcatattaaagatttggggggtttgtgtttgcaaagtttagattaaccaattagtttaacgaataggtatgtattaacattggaaatcaattgaaaggtaacgaattaggttcagtagaatcgagtgcgacgagagattgatttcaacgtatgataagagtacatgtggtataactattaaaatgtttgattggagttgaactggttgtattttcaggagcg

SEQ ID NO: 5526 - DNA, 3000 bp, Unknown
  misc_feature (1)..( 3000): cDNA_ID_3077495_gDNA_ID_1620799_Annot_ID_168586 3000 nt of promoter + ATG
agaatgcaggattcaaagactctcgaagaaaatgttgatgagtttctaaagatgatctcagacttgagtaaccttcagattcaggttcctgatgaagttcaagcgatcttgatacttagtgccctacctgacagttatgacatgctcaaggaaactctgaagtatgggagagaaggcatcaaattggatgaggtcataagcgctgcgaagtctaaagaactggaactaagggatagttcaggaggatcaagaccagtaggtgaaggtctatacgtccgaggtaaatctcaagctggaggagtgggaaataagtcaacagagggcaagaaagtctgttggatatgtggaaaggaaggacacttcaaaagacaatgttacaagtggcttgagaagaataaaggaaatagtgcaggagaaacagcactggtaaaggatgatgctcaagacttggtcggtttagttgcctcagaagtaaacattagtgaggataaaaacgatcaggaagaatggattatggatactgggtgttcattccacatgacaccaagaaaggagtatctgataaactttgaaaaggctaagtcagggaaggttagaatggctaataattcttactctgaggtcaaaggaataggcagcgtgagatttgtcaagaaagatggaacaagcattgttcttcagggagttagatacattccagaaatttcaaggaatctgatatcaatgggaaccttagaagcagaaggctatgaattcaaaggtaaccatggtattctgagagtcatgcaggactcaaacgaattcataagaggaagaaggagagcttctttgtatatactggaagcacaagctgaaatggctaattcagaatctttggttacaactacaggagaaacagatcagacacagttatggcacagtagaatgggtcacatagggcaacaggccatggatattctaagtaagaaagggtgttttggaaatgacaagatctcagaaataaaattttgcgaagactgtgtaataggaaaaacacacaaagtcagcttcggaacagctcaacacacaactaaagagaaacttgattacgttcactcagatttatgggggtcacccaatgtaccctacagccttggaagatgccaatacttcatctcctttacagacgattggtcaagaaaggtttggatctattttctcaagactaaagatgaagcatttcagtcgtttacagaatggaaaacgatggtagagacccaaagtgaaaggaaactgaaacacttgagaactgataatggtcttgaattttgcaaccataaatttgatggaatctgcaagaaagaaggaatagtgaggcacaggacctgtacttacactccacaacagaatggagttgcggaaagactaaacaggaccattatgaacaaagttagaagtatgttgagtgaaagtggtcttgacaagaagttctgggctgaagcagcagcaacctcagtatatctcatcaacagatccccatcatctgctttggaaaacaaaatacctgaagagctgtggacatctgcagttccaagcttatctggactaaaaagatttggatgcattgtgtatgtgcactctcaagaaggaaaattagatccaagggctaagaaaggtgtgtttttgggatatccacagggagtaaagggattcagagtctggatgattgatgaggagaagtgctctataagcagaaacgtcgtgttcagggaagatgtaatgtacaaagacatcttgaacaagttaacctcaggtatgagtcttgaactaccgtttgttactaacaaggttcccagttttgaatgtacaggtcttaacaaggatggtgaacgtttagttcaaggtggagctattgaaaaagagtcagatgaaactctagaactatccaatacagaccaggaagatacaggaacagaaaggattcagagaacccatcagatagccagagacaaaccaaagagacagattgttataccctcaaggttaaaggattatgaaatgaatgaggaaatacttgatgagatagcaggatatgcgtatcttatcacagaagatggaggaaatccagaacccactgatttccaagaagtcctgcaagaccctgacaataagaaatggcttgaagcagcagatgaggagatagaatccctcattaaaaacaagacttggactctagtggacagagacaattctcagaagcctatcgggtgcaaatggatattcaaaagaaaagctggaattgctggagtagaacaaccaaggtttaaggcaagacttgtagctaaaggttatgcgcagaaagaaggaattgacttccaagagattttttcaccagtagtgaaacatgtgtccattcgactcttgttgtcaatggtagttcatctaaacatggaactgcagcaaatggatgtaaagacggctttcttacatggctacttagacgaaaccatttacatggaccagcccgaaggttacattcatgaaaaatatccagataaagtttgtctgctaaaaaggtcattgtatgggttgaagcagtctcccagacaatggaacaacagattcaatgagtttatgcagagaattggatacgagagaagtaagtatgacagttgtgtgtactacaagatcttactaagtggagattacatctatctgttactctacgtggatgatatactcatagcatccaaggacaaggagcaggtatgtgagctaaagactttactgaattctgagtttgaaatgaaggatttaggtgatgctaagaaaatcctaggaatggaaatcacaagagacagacaagctggtactttgactatctcacaagaaggctatctactaaaggtactcaaggactttggaatggaccaagccaagtctgtcaacacacccatgggaattcatttcaaactaaagccagcaaatgatgaagaagtgcagaagcagtctgaagtgatg

SEQ ID NO: 5527 - DNA, 3000 bp, Unknown
  misc_feature (1)..( 3000): cDNA_ID_3077513_gDNA_ID_1620799_Annot_ID_168565 3000 nt of promoter + ATG
gatccattgaaggataatcgtttgcttcttgaagctaaacctttggatgaatcagaagaagctaatcacacagccaaagtcgtgaacgaattatcccgggagatatcgcgcattcttgtttcccacccggttaatgtaaagagagctgcacaaggcaagaatattgctaatcttgttcttttaagaggctgtggtattcgaatcgaggtttgtgttcactgtctcttacgaatgcttttaatgaatctatttgctccatctacttatctgttatgggttttgtatataaaggttcctccttttcacgagaagcatggtttgtggccgtgtatggtagcaccaacgaagattatagccggacttggtatgtcccttggtattgatattcttgaagctctgggagccactggagattaccggacgcttctcacatcgaaagcgattgctatagcgaatgcgctttcagctcctttgaatccctgcccaaatgtctttgaaccagcagaggacgggcataaaccgggaaggtcagatggttacgatttcggcttccttcacattaaggtgaaaacatgtctctgtcttttaacacaacataaaaaatttcattctgattctaaattattcgtgcaggctatagatgatgcaggtcatgacaaggctacattgttcaaagttcgaggcttggaagctgtggataaagcgatacgtcagctcgctaagcttctatggcaagctgaatcttcttcaaattaccagtatttcttgtgtgtgactggtgatcattctactccagttgagtatggagaccacagcttcgagcctgtcccattcacaatgtgccggttaaaggactttgtgagagcggttggaggagaatcagctctattagagacatctttagacccttttccacttccaacggatatagcatccagtgaaaatgtcatcggaaaagaagaagaagactgtgggaggagggaagcttctctggcgattagtggagattcagtctcagagttgaacgagattgcagctgcaagaggatgtcttggccgtttccatggcggtgaaatgatgggagttatcaccaagtttctgaagttggatgtataaatcaaatttcataaaattttgcattttttctttgaaaatttggattttggaagtgtaataaaaaattatcaactctaacaagctcaggaagttgaaaaaaaaatgtctaacaatgtttggaggtgtagttgcatgttaaagtttacactttggctcttaagatatacacatgaaatttcctttttacattagctcgacgagaaattaaagatatcgaaaaagaagaattttttttctctcgtgactcaattgcctacaaatttataaaaaatgatggtcacttagttaatgaagacactatctttactagatctaaacaatctgtaatgaaaattacttcacgttaatgaaagtcaatcatgcatttcattgtccaaacgaatgcttttacatttcaagcacataagtcaagatttatcgaaggttgacagctcccataattggcgtgtcttcatttgatagtgtataaaaccatcatattcctgagaaatcatcattcctttccaggaaccataaatgaaatatatgaacctgtgtttctgtaactatctccatttgagttaaagtctacgaattggcttcattttactctaattggagaacctcacttgggtctttatccacattttcataaaacttctcatttcaggctttccaaatgtattagatatttagatgatccaaaaaaacttgaactatgggagccacataattcaaagcaacttgaaaatgttagttaatttatattgaagctctctcatcattctacaaataaaataaaacattaaataaatgtgatatatatacttattaattatattgtctacctaccagactaacaagcttaccagtccaccactgtgtttggtttatatgtcgagaaaaaacaaaaatctataataaagaaaataaaagtgactggagaccgataaaataagtatcccaagcgaaaagtccaaaacccaaaatcagaccagtaatataacttgaccgtttcttaaccggtaattaccggttaactccgtctcttccgtcgacatttttccttaccagacccgttttgtttttgtcttgtttcggtctcttaacaagtcccgttttgtattcttcttccttacttcttattctatctataaaacaacaacttcactcatcatgactctttttccccattttcttactctcttgccctttcttctctcactctccggcgactgttacgagtttttaacacttccgtcgtcttctcaggtttggttcttctcatttatgttaaaccattatgtatggtaattctagaatgtagatctggttcgttctcatggatcttgattaatatgtttgtttaatccacgtattagcactaattttggattattatttggaactgttatcattagataagttttgaattatttgcttaagtaagtaaagaagataagagaaaataatatttattagtctgaacataatcttatcttaagataaacagaatttatttccaaaaaaataagtttttgttaaactaaacacaatttattaccagcaataaaaagattctgtttaatgttgttatcttaataactgatcttttgtctgttttttagttgttgttgttgtttatgacaagatcttgttctatccattaaaaccaaagaaatggaggaaggtcataaagaaccattggtgctaagagttgaaggatcacattgttctttatcagagatggatgattttgatctaactcgggctttagagaagccgaggcagctaaagatcgaacggaagagatcgtttgacgaaaggtcgatgagcgagttatcgactggctatgtaagacaagatagcattttagaaatggctcattctcctggaagtaggtca

SEQ ID NO: 5528 - DNA, 3000 bp, Unknown
  misc_feature (1)..( 3000): cDNA_ID_3077592_gDNA_ID_1620800_Annot_ID_168607 3000 nt of promoter + ATG
aaattacgcaatatttgaaaagtaagaattattgctattaaaaaatcttgatacgattcaaaaaaaattatataaaaaatacggtttttaattatttaaattttcagcatctttacacaaaaaagaaaagaattcattctcatgttcaaaactatctattttgttaactttgtttttgaattatgcaattttaaatatatttcctaataatactagggatgtttgatcttaaaataaaaacaatttggtcttagtcatcaaattttaattttttttgggtttttttttgccgtctatatttattatttattgcaaattatgagaactgtttcatatacaattctacccagaacaatttttacgactcttattagatctacgagagatgatatctccttcttcttctccatgcttttgatagacatattcaatgatcctctttacgtagaatcttgacgaacggctataattgtacatcgttggagatctcatgtacatttacctccattaatctgcaaatttgttaataaatcttagtatctgggactcgaacctcaaattttttggtataaaaacattaataaacctttcgtcaatcaaagggatttccaaaatcacgcaatatccctacctaaactggaaactccgacccaaaatcaaacaaaaatttgaattcaacatccctacctaatactacgtatattatatgaatacaacgtacctcaaatagtattttgtctttaccaatataaattatataattataacggacctactaatatatatacaaaaaaaggttatcgatatctcttctctgtacaagagatcgagtcatgaggaaatgggcccgtaaaagagtaaaagaaatgtacaatgaagaggagacaaagccatgatcctgccttttgctttgatctcttcttttttgtatgggttccactacgttcgttacccatgccccacccacgttttcgacggttcctcgtctttttttggttcttctctcactcttattatacacttgtttatcttttttagattcaacattttaaatagtgattgttgtttgttcgaacttgggtcttataagtcctaatcaacatttaattggatccattagaaacagttctttcattggagctacgtgttacgtttttctgatatatgataaatattacaaataagactagccattttagattttcaaccgtaagtatgtgtagaaatacacggttttaaatttataatcaacaaggtagtagaaaagatagatagtccacactagatatgagtaaaatatatacatcaagtcatattatataaggtgggaactatttgtggttttattataatcgttagaacgatatctcgaatttatttagctcaaaaacaaatatcactagaaaactactacatcaaaatcaataccatttcttacaaaacaatatggcatattgatagaagaatgtacaaatcttcgatgccataaacagtcgcatcagaacagttgcatgaccgtgaccatgcgaagtagtgtacatcctcatcctcacgttcgaatgaacgttctcgtaaatcgttcctacaacacatatccctaaagagagagcaacacatcctgtttgtttaatgattcggccactaaaataaacgtgtagttaagaccaaaaacgtaaagcacacctgattagaatattgatctctaagagtaaagaacgcatatattggtggttttggcggagctaaattccaaaaaccgaacataagacaggtagttagaaatgattttagagtatttgtttttaaaaatgaaatcctttagaaaatgcaatttcttgggacgataagaatgagaagaagacacgattctgaatttttctgaggccaacttcatggccgactttggaaaccgcattcttagccactgaacggcgcccttaataccatagactattctcaattttgttattaaaaatacagccaagaaacaaaccaaaaaagagcacgaagaagacaaaagacttaaaaaaaagtttcaaaaggaagagatttgtgggtgtaacacatgccacgataaacgattctcctagtaatagtatctgtccaccgatgatctaaacgaccaatttggcatttcccagttactatcataattaatcatatttgtcacgtagattcagatgtaagattactaaaaaacatctcaattattttcacaatcttagacttaagtgtttatagcatgtggataagggatcatgatcataagtttatagttatgtttagtgttttgtttttggtagttttagtttcaggcggttttgaaacactttttccgatccgacctatactcattttattttttttgttttatttacaatttaatttacagattagacattaacacatattttcaatttctcaaaattatccaaaatattcatatcttaaagatgtgaaaatttatcagaattagtgaattcgaagtgtaatttagacgatttaaactatccgaatccgatcaaaactatacgattaaaactatccgaatccgagccaaaacggtatttagtaaatttaatattttattccgtatatttctagcaatatatttaaatactcctgcccattacctgtttatacgcaattacctctaatcatctacaaacctgtcccaattggacacttctggcttccccagtcacagcctaaacagagcttgactcaataaacagcaaatataattgcatcaaaacaatactttttttttacaaattttttattccggaagtaaccccaaatggtcaataaggttccaaatctctgaaaaggaatgaggtcacaaccccacgtgggataccaactagccacagtggcacacactcgtaatatatagaaacctccaaggtcattttcatagttctatccccttataagcaatagccacaactctctttgctaattacattttacactcatctcgttctctcttccgtcaat

SEQ ID NO: 5529 - DNA, 3000 bp, Unknown
  misc_feature (1)..( 3000): cDNA_ID_2154433_gDNA_ID_1620800_Annot_ID_168609 3000 nt of promoter + ATG
ttatcctttttctcatcaaactccactttcatcaagtcttccaaatctctttaagtcctttttcttttttgattcatcctctaaacacgctcttctcaaatcttctagaaaccgatactcacacaaaactgtcgcatcctgaattatttcttgaatcattcagcaattttatcagataaaatcatgtattacttcttgtatcattcaacactttcatcagcagcagctacatcttcaacttagtcctgtaatttattttcttaacatacaattgaattcagctaatcgtccttgcgaatgatcaaatgcatagataattgtatcatcctaaataaaagacgtggggaaatcatatgacatctagaactttggagaagggggagataagtgatgatgcatggaagcatttcccaaagataatcgaatagattctctcttttcttttgtgttcgtcagtttttctttaccattccccgagacaatatggtgggtttattaattattttgattcttctataattcttcccattatttttatatattctttttaagttacccattcttttttcttcaatgtcgagacgtcgagttagttagcttttacggcgacttatggataaggcattacgctcggagccatggactgagttggatagatataatgcgtataatatttaatccccataacctatattttaattcctatacattgtaatggtagcatctcaactttaaggttagagttggaaccttaaagtttatgaatattacaaaacacttgtatgggggtggagtgcatgaaaattagagctgggatgtatatatgggaatatatatgcactacattatcttacattttacattgaaaaaatattagaagatattgttcttcatttatttaagtatatttttactgctggtgtattctactgccctatatatatctcgaaagttaaataaattcatatgttatataacttttagtcattcgtggcattcttctgttacatcttactgtggatttttcgtcttattatcttatagctgactcttactttagagagacaagtataccacaatggaaagggtgatttgacggtaaaaaaagcgattgcagtgtacccacaaacgacaatttataatttgtatgtgggatatatagtaagggaaataaaaatcatagggttaaatagaaaaagtgaatgaaactgtcttgtagttgtagtagacgaatcaaaaggacacgtagatggtcaagatacgaacctcaaagccttttccctcccatttaatgattcttgtttttgttttaatctataatttttcatgattttcttaagtctttgttttgaaaatcacgaacgaataagttctgatggatgtacttgaatattagtaacaagactaattgaattaaagaaaagagaagttattcctttgacgtttataattttccgcggctaagggaacatatacgttccttgaaactgttgccatgcaacttttgctttaacagtttagagagttttttacttcatgctacatcctttttctcctgacacacacaagagcatattatacatccatgtacctcctccatcgaccatcaatatatagatacatgtgattattaattatctacataaaaagttataccacgaagttgcgattgataatatgaaagtggtacatgctcgaaatagataatgagaatatatcagctttagttgtctcatcgttagtcaatctatatgtgcatatacagttaacaagaaatctataagcatatacgaactggggtcccaataaggtctaagaatcttttttttctttttttcttttctttgctttgctttagtttagtttgtgaaatttagtgaaaatttcattttgtctcatagagaaaccacatgttagtcaaaaattatatagtaagtccaagaaaactatattaatatacccatattaccatatagtcggagatttctagtatctctagtttagttcttcttattcattatcaattcaagtgttataaaacctcgagaccaataaaataggattcactctccttcgtgcccccaaagatataggtttacatatctatatttccacaccaccattttaaaagcaagagttaattaaagagatattttttagtcatcttggtatgtaatctggtaaactttttagtttgttatcttgtataaacaaccagtaagattttggttcttttgtaaatacttctctttgaatttaggactagtgttttaaaattactttcctcccatatttttgttttgatctttcaatttaaattaaaagttcgtttacaacccatgcatgcacacttccgaatttaaactcggattataatttggcactataataatctattagaatacgtcttgattaattttaaaatatttaggtgtcttaaaataagtacgtacgttgataaatatggagatatatacatctgtcaagtaaatggtattgaatttgccagtattagcttttgtgaagctgacgcaaaatgaaaacggctgatatctaaagctttaaccttgtgtttcttttttttgtttaaaatagtggggtctagaaatgataaattaatttaaagtcctcgatatatataaatagataaatttgtttcttttgggaataacgtagtttacggagaaacccaaatgttaaagggaaatgcattaaagctgtagcaaaataagaaagtaaaaaccaattgaaaccctaatttcacttcaaaaaatgttcccggttgttaaaggaagggccttttgctttgtccatataaatatattgtgagagtacaacaacaccttcataagctcttacactcatttcaactctctttttcgtttccattaccctcaggtaatcataacatatatataagttacatttgtagatacatatgtctttagttttgtgtaatttgttacttaattattattttctatggtgttgtagaagaag

SEQ ID NO: 5530 - DNA, 3000 bp, Unknown
  misc_feature (1)..( 3000): cDNA_ID_3077584_gDNA_ID_1620800_Annot_ID_168612 3000 nt of promoter + ATG
attagcattaaaacccacacagctaacaacatcaaagttatataatattacagagatcaacctcgatgaaaagttcccaagactatagcttaagcaacagccactccatcatcttctcgatgttgttgctttggataaactgtctgtgaattggtttaaacgctatttagcaggcgatggaggttgctcgaggagttaccagaacagcagtctttcctgttatcggcttcatacttgctgcattctctagccttgcccatacttctttcctcttttccgcagcagaacattgctttgcttcgtcctccttaaagcgggcgtggcaagacatgaacagagcctcgtccatttcgcagaacatttttcgtacgtttaaggttaagtttagcacggattggttccagtggttctgagcattcttttctaaagcagtgaacatgattggtaggatggcttgccggttatgtccaatcaagtttacaatttgatcgttgttccacaagaataaagctctttcagaaacctgaaacacaagaagaccaattggttcaaacttagcttatcttagactcatgcagatcaatcatatatgagaactatgtatgaataggaatgtacctgaaagtgggaactggtgacacaacaagcaatccgcaagaacaaagggaccatgatcttttgaaactccatcacactcattgcttctacaatttcttcgacctccccgagaaacatcacttccttctgactattcgtgataggccagaacttcaacaaaccctttatcacaacactgcctagtttcggctctttatctatgaactgagtgatacaataagaaagctgctgaaagtagtttccaacagatttaggcttgtgcaatggaatcaacactctccacaagaagatcttatgctcttctttcaaaggcaacgcaaatccactcactatactcccgaaaatctccaaaagctcagcgattccgctatgcttctctgtctcaaacacaaaccggtagaatatattgctcatggacttgcgtacaaatggcctatgaaccatgaacttcccatatacccgatgcagaatcgtcttcaaacactcccgttctctaggatcctccgaatcaaacaagtcaagcaacctcacaatgaaagcatgatctaaatacttttttgccactttagcatcaagacacggagaagtgataaacttaagcaacaaatcatacacaatctgcaaatgaggccaagcagggtcaaacatcggttcatcatcatcgttttcgccaccagaactagaccgataattcggaggaaagaccctaaagagattaacagcacacattctacacattgcaagaatagctggctcagtgaacttaacagaccctgaagctacaaaatccaaaagctccaacaatgtctgccttttaacatctttctctatagagtttttaccagggtcagagaaatcaaatgtcacacaacagagactaactttactcacaaagagattcaacttctcagagcttggtacatccttaaacggtaccaaaggctcaataccagcaacaacactagctgggaacacagcagatgacatacgcttccctgagttagatcgaaccggacccgaaccaccaccactagtaccggatctctgaaccggagacgataccggacccgaactcgaacgattcagctctcctgaatcagattttgaagacttcctcggaagtttactcagaaactgcttaaacattctctctttcccaaaaatttcaaaactttcacaaattgggaatcaaagaagctcaaatccacatattagccctaaattctccgacaaagaacatggatctgacattaaaaaaaaacagagaaacgtgtaatgtgggtttagatccgaagaagaagcagagaaaaaaaaaaggttgacacttttataatacccaatacttgaaaaccctaatcattaccttgctttctccttcaaaatcttattctcatgattccagtatccacgaacaaaaacattcctagagagagagagagagagaaaaaaaaaactgaagctagagagtttttcaaaaaaagaaaccaaatctggaagaggaagaacaaaaaacagagtttggattttgagaaattttatgattcgttacggtgttttcttcattgtttttttttagatttctgagaaagaagaaatttgcaggaaaattattttaactttcctaattttaattttgtttttttcctttttgtctcgaaaagacagcgttttcgtttcagttttatttccgataatataaaaattagaaaacatctcgcatgcaaattattaacgtccgtttgatgagacgttgacacgtaaatccaaccgttggatttgtctgagagaggaatcctaagtaatttggttcgctaaggcccatttattattatgagcctattattaaagcccatttatgattttggccttatcacaattcacaagagtatcctccactaatctctagaagaaactgttttcgtcaccgaaccagctgaaatctttttcgcaacaaaacaaactctatccccaaattcagaagctttttagggtttcttcttcctttcgcacatatcttctccgattgattttgcagtgaaattgtgtatctttttgttgttaatcaggtaaacttttcatggtcgccatgtttattttttcgctagatcgagctttttttcttcagtcaatttcggattttatttggtttatgttggtgtatattttttgatttggttgttgttgaatcttcttagaaatgggttttgtttaattttgaattttgattttgtttttcccctaatcggaaatgatgaaaatggagatgtgtgttgatcggagtatgttataggattgaatcaaagtttctgttttttttttctcagagctgttgaagtgaatgtttggatatagctgtggtggtttcgtatcatgtccagtaat

SEQ ID NO: 5531 - DNA, 3000 bp, Unknown
  misc_feature (1)..( 3000): cDNA_ID_2154448_gDNA_ID_1620800_Annot_ID_168615 3000 nt of promoter + ATG
ttatatgacagcttttgcaggtttaaacacacagaaattcacggaatctattttcctcatttttcgcctctgttcaaggacttatttagttgattctaataatagtacccagagagagacatatgagcgcaaaagtacctgcatatagatttatggcatttataattttacataccggtagacaaaataggtccaaactgtgtttagattccatctttttacattgacattaactacaattattttggttgactaacgtaagtttcggtcataattagcatttaaataaggaatgaaacatagcaacatatcattgatacggtaatagataagagagattcatattaatatcgagcaccaagagcagaggttgtaattcatagcttttctcaaaaccacaaaagaaaattcccaaattctcaaactgaaatctttcttaaaaactatacattgtactctcttttcccagagacaaagtggggaaaatgtagaaagagatctcctaacaatatatcatgaacttcatatcatccatttgcaaaagaaacttaagaagaaaaaaacttcacatttttttaaggactgatcaaatcaggaggaggatacgttagcgttgcggatacccgaagatgacgatgcactactcccatcattcttttgtttcgaagactctgtgatgatctcaggtacatcaccaatgtccagtgtgtctggaaggtattcctcagcttcagtactgtaaatctgtagaaaagaaacaccaaacgtcattactatgcttaatgcaggaagactgaagaatgaattacctcgagttgattcagcatttcgatagttgcatcaagatcacaagtgttagccaagtaaacatcattgatagactcttgtgaaagaccagggtatgtagctaatagatactcaatatccatgtccatctccaaatcctcatccttcagctgatgattgtataccatctcagatggtgacttcttaggtgacatttgagttccttgataacttcccattccttgaactccatacccataataaggttgttgctggtggtgctgctgctgcatgtgttgttgtgtgacaggctttgtatcaaccaaagaaccttctcttttcgagagtggtacataagctgctgcgtaaggattcaatgtagaacttcctgacttcattgctaagtgacacaatccaacaaacgaaagaagagttcaaatcggtgactacaaatcagatccctaattgttcaaaaattgattccaataagaagaaacgtgaccttaacctaactaatcaaaattgatgccacaaactcgatgacctaattcttcgtgatgcttttaggtacagatcaaaatcaatcaacgcaatctttaacagaaacgaacaacgaaaccctaaggaatcgattctaagattctaaaagcttcataaacatagttgaatcatgaatctaacggagatagtagataaacatgaatcatgaatctaacggagatagtttcttctcccatgatcgaccaatcaaagcacgattcgcgtatcaaatcaacatagatcgaagaaatcaacagatagaatcgaaagaaacggattcaaaacggaagaacaaaaggcgagatgattgcgattacgtcaacgatcgtcgtaagacgcttaccttagagaagaaaatccaaaagcgtcgttgaagaagaagaagacaatggtgaatatttgcagagagagagagatctaagaaacgctgaaaaagtggggagaggaaagaaaacgactcttttgatcaataatggacttttatatgcaacaaagaagaagaagcgtttacttgaaggtcgtatcattttaggggtctgtttggaaacgtgaattatcttatccctaacctggttattgttatcctaatattcgttttctttataaaaaaaaatctttgatatttttacctggtatgctgacgtgtcttttacaaagtggctacctcttcgttcctaaatttatctctacatttgaaaaatgcgtgactaaacgagatgaaagtgattttttcttatgtcctactaatcatgattatataatttgttaatgtattatttaaaatactaaatcaattagattttctataaccaagaaaaaagaattaggtcaatggaatctgcccaacctaatcacggacgatgttttggttaaacatatcgttaagatttggatgaatcttttatgtcatgtatggccggttccaagtgtgactacaggatttgggcaaattaacaaacacatttataaaacatttataacataatttagattaaacacacaatttaaaaatcaagtcttagttttattgtttggttttgaatctatatatcttaaggtcgattaatggtttcgtagtgcttcaatatgttatatatggtggtgctcctcttttgtaagttatgatcatcagatttggtttagtagacatttcggttaacttaatattaaggttcacaacaaacaaacaaacccccctaaaaactagcatcatcacatactgttttatgagcatcatcatctcagacgctaaagtagtgggacaaattcatttcaaatttgccaagtcaattcaaaataaattataccaaaaatcttaatttacgctaaactagtgggtctttttctccctaaaactaaacgtgttatttacttattcatcgtctcattgtaatagaattgaaaatgaccaagagaaaacattagtttttagacattctcggtcaaagccaatactgtaatgaaaaaacaaacagtttcacataaatctactaaaaatagcgttacaatttttttactctacactcacatctaataataagaatcactacctttcactgctaatctctctctctttacaaatccaaatcttaaagaaaaccaaaaaaataataaagaagaagaagaagaagaaggagagtgattaacaaaaacataaaactccattagagtgtg

SEQ ID NO: 5532 - DNA, 3000 bp, Unknown
  misc_feature (1)..( 3000): cDNA_ID_2154460_gDNA_ID_1620800_Annot_ID_168619 3000 nt of promoter + ATG
ttcttttcaggcttttggatgggcaatctctctttgattgcttcaggtttctgtcactttttgttctacttgcagctgcttgatagtgttacacttttgaaaggtttatctcacagaaagactctgctactgatagttcttggtcgtttgacatgttggtatgcaagaagctcaccacataagatggaagctttaagttcaactacgaaacttgtttttcgttttgttgttcttcttgagatgtcaggatgtttgtcttccaccactgctaccacgtctggccctctcctttggtagtcgtctctgttttgtacataaaaccttaatcagtttgttgtttccttaactagtcttgtaatatttgttatttgctttcttcatctagacgtccttgttttatataaacagtctatgtatgttgtattgtacaatgtttaatatcaataacaacaccttttggcaaaaaaaaaaaaagaggagatattaggaagatactataaaaattggatgggtgtctaaaatctaaatatgttacttttttttaaagacacccaactactccgtcaactcatggatggaggtggtttcagatatatagaaccggtccagacctaaaacctccgtcaattatattttactttaaaaagataccaaatttgagtaaaagtcttgtaatctagtaattagtgtctcatttaatagcgtaatgtcacgagtttgagcattgttccattaaatgttttgataattatacatttcaatttgttaaaaggcaaagaattgtattgggctttaggcatcaaaaatttgggccggtcctgaaaatagatgtggtttaagatagttgaattcacttaggttgtgattgatgttttttgtagagaggataatattttttattattaaatagttataagttataaccatggttagtcctcgggtaaataaggtgaaacattagtctcagactactaaatttatgaggcccatcgacaaatcaacaaaacaatatacacattgtttcatttttagtgatatttaaggattttgccacacaaattggaaaaacattattaaaattttttttttttatctttttaacacaaaaaatcattagctataactaattcaaccaaaataaaaacatactatacaatgtatttagttaaaaaaactattgaatagattttattttttcatagaaaattgaatacaccacttaaaatgaaaaaataaaatctcgaaaacatcacttaaagtaagatgaagagaataatatataaatattgtaagtccccaattttaggtttcggcaacaaaataagtatcaaattcttttttttgccgtctagatttattatttattacaaattatgaaaattgttacataaacgattctaccacggataatttcttccgacctttattagatccacgacagatgatactttttctccttctccatacgtttgatggacaccttttaatatcttctctgcatagaattttggcaaacagctataattatacatcgttgtagatctcatgcacatttgctttcattaatatgcaaatatgctaataaatcgcagtagctgagactcaaaccccaaacctcttgatgtagaagcattaataaacccttgtctaactattggagcttccaaatagatatcagattctttaacttctaaaatttattctcattaaaaaaaaaactgattgaaagaggcctaaaaatgattgtgcctcctacattttattgtcgtcctagttatacgtagttaagtagttttactacaaactggttacaaattttgggacttttgccaaaatcataaggacttttgacaattttgccaaaatcatgaggcctaaaaattgattgggcctcctacattttattgtcgtcctagtattctttaaccatcaagaactttccatgagacagatcatgagacttttgccaatttagtttatgtaataacatactaaaaacatgttgtggccgatcaaacacaaaccaacttctttttttttttttttttttaaacccaaaccaacttcatataaaaatttgcagaaataaacttagtttttttggttttaatttgttttaaacttagaatttgcagaaataaacttagttttaatttgtaatagtgaggatgaaaaaatgcattagacaaactacgaatcccttttacaaaaagaaaatagtactatgcggtggattattattcaccccaaaaagtttatgttagtattttgttgaaccgtcaagattcaagaacagtcattgacaaaaagatcatgatacttctcttaatttacattatctaatatatcatactaagaaacatgtgatgtaattccttcctagggtcaaacccaaaaccaacttaatttataattaccgattataattggcagaaatatcaacttagtttttcctggtttaaaattccattatttgtatttgaataacttatattgtatatagaacgaacaaaacccgttggcacgttagacgacttttgttatctacaaacaattattcgtcctaaaaataaaacaatatagtctgctattgaaaactcaaatatcaagagttaaattgttctaaaaagcaaaagaaaaaaacgaaagaactattgaagttctttattctaaaaagcccaaaaaaagaaaaaacctttttcattaatgttttggttcaatccaaaacgttacgtgtacaaaagctacaaaacgacgccgtagtgcgttgagatatgtgaccgttagcaacaaataaaaatatgaatacagagacaagacaccactacagcgtgagagagcgagtacaaaacataacctccactcgcagcgcgtgagacaaaacacccccttctctcttcttcttcctcctcctctctctatctctctgctgcatttttgttcccttcattatcaatctctctctcccaaacaaaaaaaaagcctcactttttacaaatg

SEQ ID NO: 5533 - DNA, 3000 bp, Unknown
  misc_feature (1)..( 3000): cDNA_ID_3077572_gDNA_ID_1620800_Annot_ID_168627 3000 nt of promoter + ATG
gcgatgaatattatatttgtcaactcatttaacctccttagtcataacatgtttaattttgaatttatatacaaatacaattaagatggtgtgtctacaatcctttgcccactaacctccactttaactaatagtatccctgttgtctttttttttttgttttgctctgctttttcgctcacgagacattcgtggggaagaatgacttctggttttaaatcaataattaaagggaatttcacactggccagttcgtttgctttacatagaaataagataaaaggaagaaaaaacaaagtgatgaataattagtcgtgcttagttttctaatagcaaatggggtagctaataattacccaatctgtctaatgattataagattaagtggggttgtgagaaagaagaaagcaaaggtaggaattctaacatgatgaaagaacttatacatgcttaattgaaactttattactttttagttttaattagcttatgcttatctttttttctcagacagtttatgcttgtctctttgatattcttttatctaatttatttgtcgaatattcttctatattatggaatttgatttgtaaaatacaccggagtgttttacataagttgcaatatactaggttaagaaaacaaaaatttgaaatatactaaaatttatagaaattcaaaatgagctatagaatgtaaaatatatcaaaatatcttcaagtaaactaaccattatctacttaattgaaatgatttaactattcatttttaaactaattaaaataatcaaacaattcctgttaatgcaaagtgtctccagaagtattcttccctcttcactcagagatgaaagctttaatttaggttatgaaaatatcatataaaaaaaaatcgattgttagacatttgaaaccgatatcatagaactagtcgcgatagtgcagtcttgggaagaatggtccattttctccaatcaactaatagtatctggattactccgtgttcaattgtttttttttatatgttatatttctcatttgtgtaatactagaatgaatagttttaaaaaaaaataaattatttaacatatggcaaaatctcaaatcaagacttttgacacatatcacgttttcgtgaattaataactctaaaaagtatactttatataataaaatgtaagtatgatgttttaatcaagtacacaaaactatacggctatactaaaatatatttttgggtattaaattctaattagatatataaataaagaaattttatttgattagattttattaaaaaaattatatcaaatccgtgtgagtcaatcctaagaaaattaaacaccatgcacatgactatctttgtcttttgcataacgaaaatgttcattggcctaatttatagtcattgatactgatggacgtacgttaattctctaatattaaacattggattataatttagttggagtcattagcatagatagtagaagatgatgtgtcaaaacaattaatccttcgtccgcatgtacggctacatatatccacgtaatagtcagcgccttgtcaaatggaaaataaaatataatgtagtgtgatgtcaatgggtatataattaatacattggaaacaaaaagaaataaaaatgaatggatgatggttacatttttggtctttctgcaatttacaaaatattcatatcgttgggtagttggaaggtgaggtttgggttttaagctccgaccaatctactcttgccaaattagagctaagagattatgtattgtgtctatcgtttttatttttgttttagtcgaccaattatgtattgttaagtgggtgactactagatcacacttatcctccatttggaaaccttttctaatatgttgaattcgaaaacgttggtaacaattagtcctcatttgaagaaattgcttgaacaaaaaggagaatacatgttaaatatataaagttcatgaattcaacacatcatcttctaaataagaaggttattgtataacccatatctaaccaaattccactatagaatcagtaacattactaaatcgggtttagaatcgtaaccatgtcaatattaataattttgcttatcaaaattgcttatcaaaatcagttaacaagtagtgcaatggctcatatatcttatgtgttagacatgcatctaaccatctatcacttgggcacacagaagttaatcaatattagttgggtattagtgtctcgtacaaaggtgaaagactaaagtaggcaaaaatataatgggctttaaataccaaaggcttatttagctggacaagcagatgaaaagttgaagtgtcgtcgttttacagtcacatctcattcggttaaaaaatcaaaaagaaaaacaaaaacaatgcggtgagcgtggatcgaacacgcgaccttcagatcttcagtctgacgctctcccaactgagctatccccgcttgttgatatttattactttgtatgttatatgtgccattataggtgcactaaacagcaaaagtgattttttgggggtacaatctattattgtaaaagtcaaatatatgcaatgcaagaaatcgtcttgttcacaatccaagaaggtgttgtgttgtttaaagaattaattgtaatactggttaagataatgcaacgcgtagtcgcatagacatagagtgcatcaagaagagtcgatgcctgtcttacgtgacgttaatgcgaaacttaattgggctggcctgggccttctgaaggccctatagattttatcgaccaaagtagaacaaaatagaaaggataaaaaagaaatatttgtggacagcaaacataaatttctccataaaaaatttgtcgtttattttccttatctcaatttctatggaccctatctcttgagaagtgtaaatacaggtggcgtttcttaatcttgaatctgtgaaattagtaattacatttcgttgcagaaaacatatacttttccgacaaaac

SEQ ID NO: 5534 - DNA, 3000 bp, Unknown
  misc_feature (1)..( 3000): cDNA_ID_3435687_gDNA_ID_1620800_Annot_ID_168621 3000 nt of promoter + ATG
agaaggtgatattgggtttttgatgtcgggccttttgggtataaggcccattgtatttgcaaatcacatctcaaaaaagaaggtaatgttggtttttttatctaatcaaaatatcataagagtttatagccataaataacgaggtatatagtggttacattattcggagcttaatcggaagtgttgagttagccgaatattagcccacaagagagtataaaactaggtttacgtttaggtaacgataaaactatgataagtgacacaactaagtgaggacaaacacacaaataaatattttatggaattcattagggtcaatcgaaaaatgtttcgagcttcagaaattaatgaactaaatattaagaatcccacattaaaagtttgagaagcctataataatgtatatgtaccatataataattcactcagtaccaccaattagttttgaattgtaggccgataattcctaaaatacctttgtatgttcatttcctcaaacttcatgtttagatgtccattctaagcggaaaaggggtattagaatgtttctattcgccatatcagaagttgataggcttctagagtaatgtataagatacataagcgcttttacttattgtcaactggttttaatttagaacctcatgatattaacgttaagattgttgacccatgtaaaatgactcaagtaggatatattgcaagtgagtagaatgaaaattccacattcaaaatgtgattaaaccgtaatatataagtggtatttgggagtctactcactaccaattagtttgggacagtacaaatgttataatgttatcactggaaaagaaaaaaggcaagcatagcgtccgtagttgggatgagagttactatcaaaactatttgaaccaaaatcaacaacattaaatacataggtgttcactcattctccaaccatggattgatgaaacaaaataatatcgaaaataatgatgaaaacgaatgaatattggtgagccataaatgagttggttgttcgttttaatttctctttgtctgaaaagtccacacgaaagttaagattaccagatcccccacactcttttggttttgcttttgaacatattctcgatcgaagtgaaaaaatttcttcggcacatgacactgaagtaccgtcgaaacatgccaacgggcaacgaccgtccatcattattagtagtttgattttgatataattaattgatattttaaaattaagatatcggaaaagaaaaataaatattcaaagaataaagtaaaataattatcatttttaataactttcttacttctaaaacttactctcattataatcctcctatatttaatacacaaattatgttgttatgccatattttgttttcagattaaaatgtttttattgaaaatcttctaattactatatattgttataatgtatctacgttgtaatgtgaatctaagctttttaaaatttgaaaacattaatttttgtacaaaaataaaataagtattactccctatgtttctatatatatgatgtttgggttaaacgcaactatcatttaatactgtagttttaaaaattcaaccaatcacaaaagagatggtataatctaaaaagtcataaaatcaatacatttaaaatttgtattgaaacttgtaaaatagcttatataatgaaacaaaataaaaacactataacatcctatataatgaaacagagaaagtattattaatagctatctaccgcgtttaactatcacactaagcttgatcgatagattgagtcagagtggtactaaaatcctaattatatatattggatgcatgagaagtttctttaaagatgtaatctatttcaaataattatttggaatatggccaattttgttagttcattgaaacgtcaactttttacttgcaaccactttgtaggaccattaactgcaaaataagaattctctaagcttcacaaggggttcgtttggtgctataaaaacattgttttaagaactggtttactggttctataaatctataaatccaaatatgaagtatggcaataataataacatgttagcacaaaaaatactcattaaattcctacccaaaaaaaatctttatatgaaactaaaacttatatacacaataatagtgatacaaagtaggtcttgatattcaactattcgggattttctggtttcgagtaattcgtataaaaggtttaagatctattatgttcactgaaatcttaactttgttttgtttccagttttaactagtagaaattgaaagttttaaaaattgttacttacaataaaatttgaatcaatatccttaatcaaaggatcttaagactagcacaattaaaacatataacgtagaatatctgaaataactcgaaaatatctgaactaagttagtagttttaaaatataatcccggtttggaccgggcagtatgtacttcaatacttgtgggttttgacgattttggatcggattgggcgggccagccagattgatctattacaaatttcacctgtcaacgctaactccgaacttaatcaaagattttgagctaaggaaaactaatcagtgatcacccaaagaaaacattcgtgaataattgtttgctttccatggcagcaaaacaaataggacccaaataggaatgtcaaaaaaaagaaagacacgaaacgaagtagtataacgtaacacacaaaaataaactagagatattaaaaacacatgtccacacatggatacaagagcatttaaggagcagaaggcacgtagtggttagaaggtatgtgatataattaatcggcccaaatagattggtaagtagtagccgtctatatcatccatactcatcataacttcaacctcagctcctttctactaaaacccttttactataaattctacgtacacgtaccacttcttctcctcaaattcatcaaacccatttctattccaactcccaaaaatg

SEQ ID NO: 5535 - DNA, 3000 bp, Unknown
  misc_feature (1)..( 3000): cDNA_ID_2154452_gDNA_ID_1620800_Annot_ID_168616 3000 nt of promoter + ATG
tttgcgctttgaaggtcaaacaaatttaattgtatgattgagaattaggtaactaaataagacattcatgtaatggcatcaaatatttatgatctcagacattttggaaagtttgaaattctttggtgacatctggtcttatagatattttgctgtcaacttagggcctgactggtttaaacgcagcgggtgcggttgcggttgcggaagtttgcggaaacgggcggttgcggtttcaagcgttatcaagtgttttgaacgactggttgagcgtttggtaatgggtgcgtttgcgggagttttatgactggtaaaccagcgggtgcgatagtaattaaataaaaaataaccaaaataaatataatatattactattaaaaaaaaaaatacaatatattattatgataaattgataatatttgaaaaattaaacatacttaataattaaaaccataaataaaactgaaaattcaaaaataaataaattttataagaaaaagcttaatactttatgcatttggtacatcaccaaaattgcatcaagtagtgtgataaactgtaaataacgttgaactcgcgggttttccggattgcctctatacatatgataaagtttcttcaagatatccaaacgatttttaacacatctccaactcaaattttttccaaacgttaatattcttaagaatattttctttttgaacatcacttagaaatctgattttggggtctttggattcttccgtttatttctccacaataacctgttgcagtaacgcaaatgtggtctcgtttgaccaaatgattttctaatcgagaaaacaaatcaaaacatgtattcaatcaaaaaactcaaaaaaaaacaaaaaaaaaataaacaacaatgccatgaaatattccgagaattacactagctaatgaatggatgaaaggatagatcatacttacgtttgattcttgattttgactttgatttttgtcagtttgggtggatgccataattgagagaatagggtttcattgattagggttttctgataagaataagtatagggtttgggtggaagatataattattttaattaattaatttttttttttaacctaaccgctaccgtccgcaaccgcaaatacttgcgggaaggagcttttgaaatctggcaatttcgaacggtatctagcggtttctatgattggtgccaaccgctaataaccgctaccatctgcaaacgctgcgtttgcaggtggcagaaggagaaccaatcaagcccttaaaacatatagatttggttgacgtttcttaacccaaagaaacaatcaaaattcgaagtatgtggaaacatttcctttataagaaacccacacgcatttttttttacttatataaatctcctcacctgcaagagaaaaaaaaaactttcattttattcgtcgtcagtttcatcttgttgcttcggagcgagcgagaattatcgtcggagaatttatcgtctctctctctgaaaattctgatcggtgaagaatcgtcggatcgaaagttcgtttatcttctcgtttacgtttccgtgatttaaatcctttggggtttttttttcttggtaatgtctgtgtttctgaatgtgtggttgatttttgttcgtacactttactttgatcgattaggtttatgtatagttaattgaaattttttggaagatttcagaagaagaagagaagaaacaatccgtaatctagacccttgaattgacctaataataggatacatatgatgactatgaagcagtctttgagtggcagggttcttaggggggtctttggtatctatctgtaggagggcttttaggtgctgtttcgggagattaaagccagattcaaggtgagtctgagagcttggttcttgtatcttcttgtttaccaatgggaatctaggtcactgagaaaccatccttcttgttgatctagtggaaaaaatcgattatttttctatcccaagtagttgctttttctttcttaaccttaacttgtgcaatcttcattctacctaagcatttccccttgataatgaaactctttaatcatctctgatttggccaagagtgttctttttttttgtcatctcatctatggtggattaacagaggttcctcttagttattcttcaagaaggcggcatgaatgctcactttgtttgtagtctgcttatctcagctatggtctccatagtgagtttcccttagagcatatctcgttgttgtccatgatgaagtttttgctccatgcggatcttgtgaacttgctagtagaatttttccgggtaacggcatcagaagatttttattccttcgattatggggttaccatttaggtcaagccaaaacaggtcagctttaaagatgggggtccattaactaggagtacccttcaagcctttgtttccttaaagaaatttctgattcgtatgttgactgaagagatctggtgcaaagtggcagtgggaggtaggtctatcctctttggacacttacccatctctttaaaacccggttatcccaagttttatgtcagtcccaaaccttgtttgatggtgtttgccttgcttttacgataggttggtcatatccggttgaaactggatagatttcccaagattgaaggactgaagtgaacactcaatgtgctaagcttttatttctctatgaaagctccatcaaccaagagggctgtttttagttgtttaacagggtatttgtagatcttcttgttttggtgattgttcctcttggagaaagctgattggagctgtttcaaaaatggattgtcttggtgtggtgcaatgtagatggaagcaacagttcatcgagtttttttgctggattttcaggtgactgataatgtttgcgaaatgaggaatagattttctaaatattttcttacttgcaggtttcataagctttccatcaactagcagtatctgccaatatcacagacagataattcgta

SEQ ID NO: 5536 - DNA, 3000 bp, Unknown
  misc_feature (1)..( 3000): cDNA_ID_2105426_gDNA_ID_1620800_Annot_ID_168614 3000 nt of promoter + ATG
aatggttgcgaagatggtgatatttgactcggaggaggagaaaaacacgaagagccaggactacacttgaaagagtcacaatctacaggtttcgacaaaaacatcttacactccatcatcgatctttggtccctcacgtccttgaagcaattcatcgtataattataattctctagatagcgacacgtggctggttctccggtgaaatagttagacccgtatctaaaatctcttagcttctcaagcgaacatagctcatccggtattaaaccggagagcatgttacgttcaacgttcaacacctcaagattctccatctgacccatcgacttaggtaactctccgaccaaccagttataactaatgtccaaaaccgtaacgttttgaagtaatcccatgtcattaggtatacaagattgtaaaccgttatccataagaatgatctcgtttagagtcttacccattttaccgaaactcggcggtatacatccttcaaaccggtttgaggctagaactagaaccgataccggtgaatttcccatgttaaccgggattttacttctaaaccggttactattcaggaataaagcgtcaagatctttatcgaacaaagattctggtaattcaccttcaaactcgttgtaccggagatcaagatactttaatttcggtaaaccgattaccacttccgggaatttaccagcgaaccggttattactaagatcaagttcgaaaaggagactcaactgcgaaaacccgaccgggagtgtaccacagaaccggtttgagttaacgtgaaacagagcaatatcggttaagaggccaagctcttcagggagatgaccagcgatatctccctggtttagatcaacaccggagacagttttaaccaaagggtcgtcgagagattcggagcatactacaccgttgtagtcgcacacacgtgatccaaaccagttagttgtcagattccacgggtcagagatcatggcacgtttccacgcttgtaacgccacgtaagctctttcgagccgtacgttttcgaatattaggtacggaggtatggttatagggtcgtctcgggtgtacaaaagttgccgggagccaccaggagcgacggcggagatggagagtaagacgacggtggtgaatattaataaggttggttgataaatcctcatcacactctaatggagttttatgtttttgttaatcactctccttcttcttcttcttcttctttattatttttttggttttctttaagatttggatttgtaaagagagagagattagcagtgaaaggtagtgattcttattattagatgtgagtgtagagtaaaaaaattgtaacgctatttttagtagatttatgtgaaactgtttgttttttcattacagtattggctttgaccgagaatgtctaaaaactaatgttttctcttggtcattttcaattctattacaatgagacgatgaataagtaaataacacgtttagttttagggagaaaaagacccactagtttagcgtaaattaagatttttggtataatttattttgaattgacttggcaaatttgaaatgaatttgtcccactactttagcgtctgagatgatgatgctcataaaacagtatgtgatgatgctagtttttaggggggtttgtttgtttgttgtgaaccttaatattaagttaaccgaaatgtctactaaaccaaatctgatgatcataacttacaaaagaggagcaccaccatatataacatattgaagcactacgaaaccattaatcgaccttaagatatatagattcaaaaccaaacaataaaactaagacttgatttttaaattgtgtgtttaatctaaattatgttataaatgttttataaatgtgtttgttaatttgcccaaatcctgtagtcacacttggaaccggccatacatgacataaaagattcatccaaatcttaacgatatgtttaaccaaaacatcgtccgtgattaggttgggcagattccattgacctaattcttttttcttggttatagaaaatctaattgatttagtattttaaataatacattaacaaattatataatcatgattagtaggacataagaaaaaatcactttcatctcgtttagtcacgcatttttcaaatgtagagataaatttaggaacgaagaggtagccactttgtaaaagacacgtcagcataccaggtaaaaatatcaaagatttttttttataaagaaaacgaatattaggataacaataaccaggttagggataagataattcacgtttccaaacagacccctaaaatgatacgaccttcaagtaaacgcttcttcttctttgttgcatataaaagtccattattgatcaaaagagtcgttttctttcctctccccactttttcagcgtttcttagatctctctctctctgcaaatattcaccattgtcttcttcttcttcaacgacgcttttggattttcttctctaaggtaagcgtcttacgacgatcgttgacgtaatcgcaatcatctcgccttttgttcttccgttttgaatccgtttctttcgattctatctgttgatttcttcgatctatgttgatttgatacgcgaatcgtgctttgattggtcgatcatgggagaagaaactatctccgttagattcatgattcatgtttatctactatctccgttagattcatgattcaactatgtttatgaagcttttagaatcttagaatcgattccttagggtttcgttgttcgtttctgttaaagattgcgttgattgattttgatctgtacctaaaagcatcacgaagaattaggtcatcgagtttgtggcatcaattttgattagttaggttaaggtcacgtttcttcttattggaatcaatttttgaacaattagggatctgatttgtagtcaccgatttgaactcttctttcgtttgttggattgtgtcacttagcaatg

SEQ ID NO: 5537 - DNA, 3000 bp, Unknown
  misc_feature (1)..( 3000): cDNA_ID_3077649_gDNA_ID_1620801_Annot_ID_168648 3000 nt of promoter + ATG
catccagtgagtaacaagttcctcacctgcaataatgtcaaaaaagggagaagttgtttatttcagttgaagatgattttttgagagacagggatgattctcatcatgtgtaaatatttacccagctttttccttcaagttgacagtagaaagaggcagatgtgtatccggcaattccagaagtgagagcgtaaatgaccaccaaagcggtaaagagtgctcctcggttgtatgggtagaacactccaacaagagcaagcatgaaaataaatatggtgctgatgacatggaataaaaggaaaagctacagttagttacagtaagaagaaatgcggatatggatgaaagtgtatccagatggaaagtattcgagttatgagagacttacagcgtgaacaattgagtgccactaccgagcgatgcagcaaataaagaattgtgagtagggaaccgaaacacatcgccatgaatgtacttccatccagtttcctcttgatcatcagcagcttcctcatcttgagcataccttttaagcattggaataaggttagatgagatagacaagtgtaaaacagtcgacagtgaggaaacttgaaacttacttcatgaaatcgttcttgaggactcgcatcaagatagttgcaaggaatccagtcaaaagaaggacagtgacacaggagttaataatggagaaccagtggatttccaaatgatgtggaagagaagaagacatagagtacttctccattcttttctcaaaaggagtctcagtttccttccacttcacagtgtacataaactctgcatcaacttccttatcctcagtgagatccacaagcgaatgaggatccattctagcactgatctcgatcacacggtccttattgtatagaatctcaaactgaatgtgcttgtacaagaaatatttgaattcactcggatcagatttgatatccttgtcaacctttccaatgaatccccagataggtagatcatcatagtacatctggaagtagtagtccttctcaacagcttttctgaactgtttgacctcttctttactcaacttcttgttgcagtatacctcagactctttttcatctctgaagttgagcttgtatggagcgctaactagccgatccccgtttagaacctcgccaagagcttccttcttctctttcacaccctctataaaccatattcaataatgggatgatcgaatcaggagatgtcacacaaatcagttgcggcttaaacacaaatcgtgtgattaagctagtaaagatataagcatacctgggatacagaagggaagatcaaaatatcgatacgtctcactgcaatcatcattgaacaaaaccaaaatcagtcatataatagtattcaaatctaagacagatccatcacataaacgaaaaacattccaaatgtagtttcttctttcactctttggttttaacattacgcattttgcagtgtactcagttatcaatgtcgttactcaattcaatagcaacagattcaacaataaacgatcaatttatcatcctcaggcttaagaatgggaaacaacctcagatctgaagctcagatctagaatagatgtttccgtttaccttggattgtgaaatgggccgaccttgttggcgtagagaggaacggtgtctccttccttgtaacggtggtcggaggcgtcggatctgacatagccggcgccggagaagaggatagctccgacaagaaggagaatcgtcgtcggtgtcctcattgcgtattctgctcaaatcgtgagatctgagtaactttttttatttgggagaagagggagaaaaatggaggaaataacgacaatatttatataccaaagacttcaatcaaactcgagtcagctacacaaattttaatatttttattattttctcactttatttcataagaaaaatacataaaaaaactatagtcaataatactttataccatttccaaccataaaaataaatatcaatgtctataaattcataaatatatggcttttgaaaccaagactaattatttataacaaatgtgagtggcatttaacaaaatacaaatcattttcccatatgtaggctaattaaaccaaaaaaagaatatgtaggcagtgagcgaactaattgttctgccaaacctatgtatcttatagtgttttttttccttgggtcgaaaatcttatcgtattaacacttcataaattttgaatagttaaattattacttctttgtattagatgtggagtggagtgactatttttttaatatcttttgtggttatagtatagtgaatatgaagaatgacgaatgatgttacacgagaccaagtttttgaaaaaaaaaatatatgaatctgataatcatttttcctttacgtgcgttatcgtacgtaattgctttgcatgatctcacgtcatgacagcaattatagaaactaaacaatttaaaattctcatttatacacaacgtgcatcgttttgaggcatggataatttaaggttttcgatttatagattgaatcagcaagaaattacaatgtagccacttataccaaaaataaaatcaaacaatttgaacaagatacattgaagtatggatcaaaacaaacaaacaaaagtgacactagttaagtttagagactagagtgagtcggttttgttatttcataatttggttcatgtaaatatatgtacccttcatttgaacagagtagtataatccagtaactacattcatatctagcaaagaaaacagaaacctaatcaaaaacgtattaagatttctcaaattttcgttcaaattagtgatagaaaaccagacgtaaccgaaataaaacaggtcaagccaaaccagactagattcaatcttggttcactcttaaacgaagcagattcggttcggtaaaagcatctttgaccgtaatcactggcaaaacgaaagattgatcgtttgcttctttctaccggagatg

SEQ ID NO: 5538 - DNA, 3000 bp, Unknown
  misc_feature (1)..( 3000): cDNA_ID_2025342_gDNA_ID_1620801_Annot_ID_168649 3000 nt of promoter + ATG
aaataaccagtaaatttttgttttcgaatcttgccagacagttcgtacctgagcataaaaactagtgtatttgcaatgtaagcggccatttccctacaaaagttatagggcaatcataaaaatataatatatacatgtaaagatttcctttgatttgacgaaaaaagaacactgagttgtgaaataccagaagtgatgcagactctggtgactgtcccccttaaaagctgtccttgcaaatgcagcgaaaaacctattacaattatgttatgaacaatggctttttgacacataacaacagaaagaagggataatttaccacgacttacatccccaaaatcatgacagtcaaaattccagaaaccccagcccactcttgagcctgtacatagtagaaatttcttaggtttcctagagatttaagattctccattggggactaagttatgtagaagagaagagcatacagtgtaataggcgaaatagctcgctgaaagtgttacagtgatctgagccaccgtgtcattgaatatgaatttaagccaaaaaactgatgcaattccaaaagctagaccaatgcctacactaaaaaaccagaacaacataagcggagaaaagaagacagcgacatacaatactactaacaaaggaaaataatccatacgctccgaatgagttttggacaagaaatttgattatggaaccccaatcagagttatgccccatcaccatcttgaagaataattgaaaaaccacaaccgataccctgaataatccaaacaactaagcttgatcatatatgacataacatcaccttgatgctaaacataagagtttgacatggttacccatcgttcatgagagattccccatcaattaacgtggtcatcttcttactagcaccaagctcctttagcaaagcaacaacagccacggggtcggtagctcctaaaagtcctccaagcaacaatgatgttttccagtcccagttatatggaaaagtaagctacaagagcataactcgaaaaaattgttaagttaattgaagctcacttaatcacagtcgaaaatgttgaagctagttaaagtacctttataagagctccgagacaaaaggtggaaatcagaactccaggtccagcaagcagaaccatttgtcccatacatctctaccaatgatgtaaaacaatcaataccaggaaccaacacagccaaggaagtagctcaatcaggaaagtaaaaaccttgatctggtgcacatccatggagaatgagctctcgaaaagaagaacagggagaaaaacagccaaaagtaggtcagggttgataccattccctgtaaagttgccattttttagagctcgtaatctaacagtatggagaagagaaaatacagtagcttacagatacgaattccatggccgagcttcccaaggttatgcttagttccatattctacagaagcaaaaaaatccaaaatttaactactttctaaaatcttccacgaaattgaaactgagctataaagcttaatgagcaaacaaataagacctagggatccgagaaaaatgccgatgacgagaagaacgacggtgtacggaactctagtgccgttaaacaaatatctacaagcggtgccgagaaccagcgaagttcccgcgaaaataacagcatcaacaggactcgaatcgttctcagctgaatacgaagaagatgcaattgctttctccggtgatttgtacggcaacgccgcgccgattatactcgtcatctccggtagaaagaagcaaacgatcaatctttcgttttgccagtgattacggtcaaagatgcttttaccgaaccgaatctgcttcgtttaagagtgaaccaagattgaatctagtctggtttggcttgacctgttttatttcggttacgtctggttttctatcactaatttgaacgaaaatttgagaaatcttaatacgtttttgattaggtttctgttttctttgctagatatgaatgtagttactggattatactactctgttcaaatgaagggtacatatatttacatgaaccaaattatgaaataacaaaaccgactcactctagtctctaaacttaactagtgtcacttttgtttgtttgttttgatccatacttcaatgtatcttgttcaaattgtttgattttatttttggtataagtggctacattgtaatttcttgctgattcaatctataaatcgaaaaccttaaattatccatgcctcaaaacgatgcacgttgtgtataaatgagaattttaaattgtttagtttctataattgctgtcatgacgtgagatcatgcaaagcaattacgtacgataacgcacgtaaaggaaaaatgattatcagattcatatattttttttttcaaaaacttggtctcgtgtaacatcattcgtcattcttcatattcactatactataaccacaaaagatattaaaaaaatagtcactccactccacatctaatacaaagaagtaataatttaactattcaaaatttatgaagtgttaatacgataagattttcgacccaaggaaaaaaaacactataagatacataggtttggcagaacaattagttcgctcactgcctacatattctttttttggtttaattagcctacatatgggaaaatgatttgtattttgttaaatgccactcacatttgttataaataattagtcttggtttcaaaagccatatatttatgaatttatagacattgatatttatttttatggttggaaatggtataaagtattattgactatagtttttttatgtatttttcttatgaaataaagtgagaaaataataaaaatattaaaatttgtgtagctgactcgagtttgattgaagtctttggtatataaatattgtcgttatttcctccatttttctccctcttctcccaaataaaaaaagttactcagatctcacgatttgagcagaatacgca

SEQ ID NO: 5539 - DNA, 3000 bp, Unknown
  misc_feature (1)..( 3000): cDNA_ID_3077645_gDNA_ID_1620801_Annot_ID_168655 3000 nt of promoter + ATG
aagtatatccttactggatatgagaaaataaatgcaaatgggttggcctatgttattgggccgatacccatttctctaatgaaaagaaagatctataaaaacaaacttctgcttctcgactaggacattaattctgaggtatgactatgaaggtatcatattattttgtaattcttggccaaaacttgtcacctgtgtgtttgtatgttcttacaaaagagaaaactaatgagcattaacttctgcaacgtttattttacatgtttggtcttattgctgattcagtctagttcgtcgagtattttgaaaacaacttgaggagttaatcaaaagaaacaagcttaatgtggtatatatgttccttacgactatagttcctattagtatgatgtagtcagcaagattgacttatgatgactatagaaacttcactgaatatctctggtggtcctagacagtcacagtgtcctactgtatctttagtttggttcgccaagtctagtatcggaccgtatagatagagagatgtcaattgtgtttatgtgttttttttttctctctgaagcaaattgattgatcgatttgtcagcaattcctttcgagtcaaaagttttgaccaaccagcttcttcgtgaaactctctagctgtattcacacatacacacacacacctaacaaaattattgaaacagtgggtttgatgtaaagcctaaatcattcaaccacctctctctatttcttttttgttctttttttctatgcaacatatgattatatattagatccatgtgatattgcttgagtctttaatttaaggctttataaatagaacaaatataggcctttttaggtcaacacgtgtgtgtggaaatgatgctaatgcttccaaaatgaaacagaataatgtcgtcatgagctactcatttacaagaggattgttttagtgttggattggctaatagacttggatcgatatctataatatagaccatatatataatatgtttagcctaaacaatgatatatatgtcatgtgacacttatgtgttttagcaatcactaaaataatgcaaacattaatacatgtaggtgagttgtgagttcaaataatattagtcaatactcaatagtcactgtaattgatattttgaatggcttatcctatgaaaatttagtactttcatagagagaaaaaaaaaacaaatgttaatctaaagacgacaatttagattttagcagtcgcaccagaactagtaccaggaaacataagataatatatacaggactagctacttcattatctttacgtagtttatgacaaagattgttgtataatcttcatcagctgacttctttatttatgaatgaagtggttagaactcaacttgtcggctaataattcaagcaacccaacacaatgtttgggattatcctgtttctgtcttcttctaaactttctaaagtaaggctgcttgttctgtcagtacgtgtgagatattaacatagttataagacaaacataaatatcagaaattcaatatataatgtcataataattgcttatttgattagtagttgtgtctctcgctctggtggcttcttgctttcctccctgtcggattgctagtggtttgacttcgatgtgagttctttccgatcttattggtgtttccgacgttttccgtttctttggggaagctttgtgagggttcctggttcttttgcgcaattttagtgcttagatcttcgttttcccttaacggttgatcttttttagatatttgtcttttgttttcttcgttggtctaaatagtttctccgttccgttgaggcttagttttcctcttttgggcttagtttttggagacatttagttggtctgccggcgtttgtatttcaaatggtattctaccttgggtttttaataaaattcagacaacaaaaaaaaaaaattagcagttgtggcaagcaataatgaaaggtttggataatgatactaatttttttgctgattaaattaaatatagaaataagattttcaacttattcttaatgaaattagtggagtggagtgacattggccaccaccacttccttgcttttgattagaccaatttggcatatttttcttgtaaaatatacacacatcttctattaattttagcttcactcaaaacaaatactatttctgcatttcatcattcaaaagtgatttacctctttattctcatgattaaaggttcatttcaacgtcgatagtagtatttaaattacaatttttttttttggatgcataagactaattctaaaaaatttggttggtccaaaaggtcgtcatgcaacgtacaaatacgatatacctaaacaattgagtactctataaatacttttatacatctgatcatcaaagaagacaaatcttattctctttattctattgggacgtgttaccaacgctcctctaaaacccacgcgctcccgagaatccgtcactttaattactttattttatcgtattttcatgaagacgaataaatactactaatatcagagaataacaagataaagtaggtgacaaaagaaaattagaaaagagaataacaaaataataaataacattaatgtagtataaatttttaatagtgtaaatatgacaaaaagaagctcagttttattcagactttttttctctccacattcttcttctttctttagtgtttccaacttaaccctctctcttttcttgcaaacttttgctcggaattctatgctttgctgatctattgttttctctctgcaaaagtaatgagaagctttttgctatgttaagctttagatctgctattatttgttcctgtgagtcttttatatcttgtgtggtttctttgagaccttaagcagccattgtcacaagctgagctctctttctttctctctagttcaagattctaactttggagcaagtaagcaagtcagagagaggacaaattagctgaaatg

SEQ ID NO: 5540 - DNA, 3000 bp, Unknown
  misc_feature (1)..( 3000): cDNA_ID_2032139_gDNA_ID_1620801_Annot_ID_168657 3000 nt of promoter + ATG
caaagctcctcatgactttgaaacttaactaggtattcgcagtagttggattaaaaaaacagaggatttagatggctaattaaatcccttagattaggctttatgagtcttttgatgttcttggctcttcgggatggagaatctttagccgttacttgatatttctatttaaggaaagttgggtttttgcgagatggtgacttgaatttaattttatatgtaaagatggtcgctttagtttcttgttttggaaagttatttgatctataacagagacccaaacagagaattttgaaagaaataatctaaactccagttcactaaaagctggaatttctaccaaaactgataacattcaagtaatgttttttgcatttattgcagattttatgtagacaatgttccgatcagagaagtcaaacgtacggcgtcgatgggcggtgacttcccggcgaagccaatgtctttatattcaaccatatgggatggttccaaatgggcgactgatggaggcaagtacggtgtaaattacaaatatgccccttacgtctctcaattcactgatctgatcctccacggctgcgccgttgaccccaccgagaagtttccgagctgcaaagatgaagcggttcagaatctccggctagcatcggagataacggagtctcagaggaacaagatggagattttccgacagaaacacatgacttattcgtattgttacgatcatatgaggtacaaggtggttttgtcggagtgtgttgtgaatccggctgaggctaagcgtctcagggtctatgatccggtcacgttcggtgggattcctcacggccaccgtcgtgggaagcatcggagcaggagccgattagctcgaactgagtcgatatgaatcggtgtatattgttcggctagagggcatttttggcattttctgtcttgtataggaatactatgaattatggactgaataatggaatgacaccgctatattttgatttcctccattttatgaacattatcgttttaacataataataaaatttcatttttctataagtaaacaaaatcgggattataattttagaatattttacgtatgagaaataatagaatgatgagaatactaaagtacattaaaaatataatgtataccgtgcatacaatgattcttttcttgcatcttcttcatctagctatgcatatatatatgttctcattattttggttttcaacaaaattgagtaggtttgtttaccttgtacaaatgttcaaagacgggtccaactccaataaatattgttgacttcaatgggatattttatttgaccatatttacacattaagttcattcacatatacacaatgtgtcaattgataatgtcatttcgaggtacatcgatgatataacttgtgggtccgtttggggtgacttgtgttgcgtgcgaggtacatcatattttatggagtccaatggacacatttgtcaaagagattggtcgatcgtagtcctgaagtgtcgtttatatggtttaccaagtggtgtatccacatagcatcttcttagtgaaggctttttatatagccaaaaaaaaaaatgatgttttgattcatataatttgttttaggacttaccactcatgtaattggccaatgcggcaatgccatacctcttttcttaaaaaactcaataccatacaaaaacttaattagtggtttggttaggattacatcaaaagtatgataacaacggcaaaaatgatctttaagcgtgtcattttagtatttgcggacttgaatatgtatatagttcatattccgaccattaattaatgatatcaatgactttggtaaagaaagaataaaactcgtaattagtgggaggtaaagcttgtagtattagtcaagatcagcttttagtcttttacataattgtttgtcgactactactaatctgaattatctaaagtatcatcaatgaaagtttggaacaacacataaagtcaaatctcatttatttagaaaaaatcaccaaaattcgtattctttttagaaatatgtcgacaaagggaccaaaactttaacaaaatgccgtaacttacaaaatctcatggggccatattagattcatattttatctttatcttaatactatgggccataaggcccatttatcccaaagcaaaaaaagcgacgtgataatcataaattaatcagcatctttaaaaagatgcggaatctcgatttcgtttcaaatctgatatgcataaattagagggacctaatataaacaattttgattagtacagtataaatgtataatgaactaaccgaaatttagcatttgactacagaaaattgtaaaattgcgtaattgtcaaagttggaattattgaaatttttattttttgtgacaatccgaagaattttcatgaagaaaaaaagaagagtgataaagagagtgagaaatgtgaaaataagacatgcgtcttaactaagccaaaaccaaatctctcttattaccctttttacacacacctctctttcctcaaaaaccctagatctctccctctctctctctctctctctccatctcttgtctttgccttttacgaagcttcccttcccttagtttatacattactctcagctctctttatttcactcagcttcacgttgaagacgagtttctctatttgccagatctgttatctttcacatttctggtgattgcttctctaatttcgttctgggttttactgtttccatctgaaatttacctcatttcttcgtgggttttatctgaattccgttaattcccaagttctagtgtatgatctcgttgaaatcgagttaaaaatctgatctttactcttgattctgcagatctgtttgaagaaagctatgacttgtgtttgataaagagagaagcaaaaaaaggaacagtttttatataaagatatttgctttatttgtttgttcttaattgttgccacgaaaatg

SEQ ID NO: 5541 - DNA, 3000 bp, Unknown
  misc_feature (1)..( 3000): cDNA_ID_3077637_gDNA_ID_1620801_Annot_ID_168664 3000 nt of promoter + ATG
cttggtaagacttaagagcgtctcaagtctcaacattccataagattctctgagcaatgtctcgtacagttgcttgtttaatatttaggcataaatcatatctatatattactcttaacttaagccgacatattaacttgattatcagggattattaacaattagttgtcacagtcccaactaaaactttgatgtaagagacccgattaagtgattaaataaaaagatcctccaaactcttactaaaaaaaaaaaaaaaaaaaaaaagagtaactttgtatgaactatgaatgatacatatcatacattacatgaatttgactacttttgtgaatggcctgtgagtgctgacgtatacacttttgtccacgtcagcatcaagtagccggtggacctctctcgatggtgcccactggtaagtaatgtcactgaaacggataaattatttctgcagcgcaattaacggcaatattgacgccgttaataccctttgtggacgaataccactgtctgtcaggtaagtaggtccacatcaattcacgcgtcacataaacaaagcaatttacattatcattgttgtgtatagatttggtaacgaaaacaaaataaacatttgtttcttattgttttttgttagaaaagttaaaaatgataataatttgggaactcacaacaacggtcatcgtcccaacaagtctgctgggagcaaattagcgaagaaaaagagttttctgctaacgtgtgcgtcgtttgatctgagctcatggaatctaatggaagatcccaatgtggaatattcattcacgtgagattttttttttgtttgcatcaaatctcacgttggccaatcgcagccgttcatttcttcatggggattttcctcccatgcatgtgggtacttttttaagtttttgctggatccaacggctacgatccgaaatttggctatgtgcaattaagccaaataaaagaactcgggttaacaagtctaattagtaattagctttaactatcctagcaatgaaaggcgttgggagattcaaaggtaaactagtgtctagtgatatgataattgtatttgtaagctacaaaggccatgcgattacgtaccgttttttgaaaaaaagtaccgtcggaaacaactatggaatgggccttcattttcaaagcctgatacatagtgatatgtaataataagaaaactatatccaaaaattgccatgtcaccgtacatcaactcatatgccatccctctaaatatttgattgtactaaaactcagaataattgacgataatataggttatttcatatatttattatatttgaatgatcgaattcatttgaaaaactatcaaaatacaatttcttgatcagattattcaaagagtttctatacttttgggtcaattttagatgtatcacataaatatttagattagagtcaacgaggataattatactaatactgttgaattgttcaaagtttcagtttgataatattgtggtcaagatagttgaccattaattgacattgtattagtcaaaagacataacaaacaaattctcggtctattgaccaaaaaatttccaagtttgagaaaatctgatatttatataggagcgagccatgcagcgaatcttagtttaactctactttgaaaaataccatggaaaaaattaaagacctaataagcataagcctgtgatttatccactttgttggtggtatataaggtacgtaacatagaatcagcctccatcttcctttgatataagaaaatctatataaaccaaaactaatactcggttagctcagcaagtacaatttatttatgatatttcttgtgtatccaatccttaattagtgtaattagttagtataatcatttttattgtataacataaaaaacgattacatagtttggttgcggataccttccttgcctctcaccctagtctaatccatctttatattttgcaaaagttataaactattattcagccgctctttatgttaaagcgatcaccagccttgtttcttacatctttaactctgccctacctctcaaaatttaagaataaacataacatctttggacgacgtatagtaatggagttatatgtttgatctattcgtacgtgtttgttctccctctttattcaacataaagataaataatttcttacatcaaataattaagattgcaattctagaaaaaggcaatagaaggtagggccaaagtgagttagatatatgagattagaatcaaacgtacaaaaaattccaaaacattgaaagttcaaacccttacacattagctgtcttcgttatagaagcctcttcatttttattccaaacccttacacgtaagctattaattcgttcaccaatatcttaaatcactaattataaagtacgtagtaggaaaaaataccaaattttataattttccaccaattcttaaaaatattttattcccttcagaaaaacaataaaccatcgctttggatacttcaacattttaaaacgtcattttttgggggaaaatagcgacaaattttacattaacaaaaacatataaaaatggcacatttcaattttgtgcagggcattcgaaaattcgaaattgcgaagtttaaagattctaaaccacagttttttccggattgtggtcgaatcaacctttcgggttagatcaattttaacagcattggttagaggtatatactattaattagacatctggcgtacatatacgtacttacgtgtgattctaagtttccatttatatattgtttgtgttgttttcacaaaataatcactttagtataaataacccttttagatatcatccttacccgacagaacaggtgatactcaatctagcacattctcttctcttttgttctctgtatcgcgctctctctctctctcttcattgattgagtcatcatcttcttggacaagaagtggtccgaaccaaaaccaagccagaga

SEQ ID NO: 5542 - DNA, 3000 bp, Unknown
  misc_feature (1)..( 3000): cDNA_ID_2053264_gDNA_ID_1620801_Annot_ID_168673 3000 nt of promoter + ATG
acctctttcagaattcctctgagaacatcagcgttactcaaagataaatcaaactccactttttcctctaaagcagaagcaacaccaacaccgttagcatcgctcatgcttggatcaaacatgaactccaagactctaagagacaggacttcattaatcctcttcccatagtcatcagagtactgataaccaatgttcatcaaatctgaaacaaggaacttcatattaacacttgctctcaaaatacacaaaaaccgtaagaggagtttcgggagttaccgagtaagcagcttagatccttgacaaatttggctacatattcaatacaccataaccattcagctatttgtgcgggtcgagaagaatactcatccatgagatcctcgaggctcaaatcagaaccaccatggtcatccataagagctgcgttacacaaaaatacagaatcaataaaccctaaaccattttctccttaaaaccctcaaatcgatcaattactaaagacaagcctagagatttcaacaatcaatcaaaaactagcaatgtcatacacttagattcaacatcactgatacaaaatcgctatcagacataccatagaaagagaaatgtaagtaagaatatgaaagcgaagcatcaattggctaaaacgtagaaataaggaagatgaattttacaaaccctagaagtgagttagcgcgaaattttccataatgaaaatagaaaaagaaaagcccattgatttcgcgaaactgccgccttaaattttgaaacttttccttaagaaaatttgaaatcgagacattcttctccggtcaccatgttggagtctggttagtggggaacttgggaagacgaaaagacagctgtgtatattgggccgtaaaagggccttactcgtttttctataactgatcagcaccgttgaaatttaaataaaatcatcacgtaggcttattaactaaaaagctggcataatatttacttaggccgacgaaaaagctttattgggcctggtccattaatatgtctattttctatgtctattatttccaaagaaaatagacatattaatacatgaaataaaaatagacatattaatacatgaaataaaaatagacatattaatacatggaaaatagactcgcatttatatgttgtctattttcgttgatccaaacaaaaaacaaacagaaatcaattatttaaaatatgcaatacaccaaccaacaagctacacgagtgttaaaaactatatgattaattagatatatagccagccgtaaaaaaaaaaaaaaaaaaaaaatagatatagagccaaattttaatttaaaacgtgaggcaaaattataattaaggaatgcagttttttcatgggctattttttttaagatagcagaagtaatgtatataaattgtgatcatttgaaaaaaggatttaatgtataatttgactaatcctgcgtactaattaaaccaatgacagtgaaaaagattataagaaataaagtaatagtaataaacaaacaagaaagacgcgttgcgaaagctgcgttcacacggacgctaatgatttaagatcaaatcatcttggagatgtatatctacacactacacttgtttcttgtcgactatatgtgaccctttttataacttacttttttatttgtctgtatcattacctcgaaaagaaacaaccaaacaccaatcgtcactacatatattttacctttaaaccttgacatgtgaatctaaaaacataacttatacgtatttgttccgtttattccgattctgaacaacttattaaaatgctacaaatactcgacatagaagtcaagctatgatatcgagttagagaggatgtaaacaatgcaattttatgttctgatgttgatgtgtatgtgtatttaccgacattgttttgtgttatctttatgcgtatacgcgattttgtagtcacatcagcttaatggtgtatgtgtgaaaacaaaagcaaataagagaaaaagaagaggcaacttctgtgtttcttatgtagatgcttttattatgtaagaaagagacgttagacattgctatccaaaattaactaatcagtcaaacaagtttttgaaataaagtcatgttcatattatctagttttatcacctaaactggaaatttttgatagggttaattagccgtgcggagtactacttccaaagcttaaattttagattgctaattatgataaactaaacgttagtgcgtattaccacttttcatgacaaatggaatgattgaaaattcgaaactaggaacaaaaaaaaagaagctgatttggtataatcagttgttaaattcatgtacaaatcgtatatatggttggagctagctagactgcgatcggtttgatatgtgatcaagtcataaaataagacttttgaaactctagtttcttcttcttcttgagacgcgggttaaattgtcaaagtcacaaatctttttgttttctgttttatggaaatttatatgcaattcttatggccaattttgattgcaacaaacaaaatttaaatgcatcacattcaattaaaccacatcaacgttagttaccatacatgtatggactaaaacatctgtagttgatttatagcgtagacttcctatggcttttagtatctaaaattctaattaatttaatatccaccaaaatcactataatgttttaacctttttaaagcataccgttgcaagtaatctatttacgtgttcctccgacgacttcgtaaacgatgctgttattcgtcgttttcatacttttggaataatccgataatcacagcatcacgttctttctcttcctctgttcaagattaatttatataataagttttttgattaatcatcattacaagcaatcaaccattaattatttatttctatattagtagtatatatacaaatgccttttctcctacaaaagactcgctgcttttactacaagaggaaacagag

SEQ ID NO: 5543 - DNA, 3000 bp, Unknown
  misc_feature (1)..( 3000): cDNA_ID_2053288_gDNA_ID_1620801_Annot_ID_168665 3000 nt of promoter + ATG
gagcaaaggatcattcaaaagcgaaaggactctaatactagtcgggattgcgagtcttactctggccaccagaattgaagaaaatcaaccttacaacaggtaccaaccatattccatcttcatgattctgacttccaatgttcattagaaaagtgttctgagtaggaaaaagattaggaccattacaagaaactgagtattacgcttaaccaaatcaaggactaataatggtctaatacaaacccttatggttcaatgaattggcatttcatgtgggtatcgaatattggattatgtttctcaaaaacactctttactggaaagaaccttccacaatacacaggaatagttcaattttcttcaactgctcacctgatacttgctctttttaactagcatccggaaaaggaacttcaccattcagaacctaagatatagccggcatgaagtggtggcaatggagtggctggttcaagaagtcctcaacttcaaatgcttcacacccacaatcttcaacttcttgtggtaaaacctctctgactatatattttcatgttccaagacacattatccacacagaaagatacatatgactatcatttatacatgtcaggttctacttaaaagctgctcgagccaatccagaagttgaaaggaaagccaaatccttggctgttacctcactatccgaccaaactcaactctgtttttggccctcaactgtagcagctgcactcgtggttctcgcctgcatcgaacacaacaaaatctctgcataccaacgagtcataaaggtatcatcagtcccttcaataacactttaataccttttagtatcgagaatatacaagaatcttcacaatcccaaaacctctctttctctccaggtccatgttagaacaacagataacgagttgcctgaatgcgttaaggtgttttcagtaacactctcattatatacaaatctcatttttaccactaaacgtaaggtaagtgactgttttcacatttttgttccctatacaacagagtctggactggttgcttgggcagtaagcaatcaaaaagaacaaaaaccctaaaaccaggacacagtatactccgataccaacacacaggttatcattactatttacaaaaacaaacacaaggtaagtaataagaactcctctacagatttatatacttaatcgagctggacttaattagctcttagtataccaattattagtgccaccatttgtgtcgctcatacacatttatttcttattttccctaattcattagactctcatattcttaaaaagaatatttccttgtttgatatttcctctttattacgtatgaaaggttttcaatttttctaatcttcactgtttctgatctcaaatatgaaaaagcttatcaaatccagcttaaaaagagagtgtagtcgaatttaactaaagatttaaaaatggtaatgtttttcttcacacacgctataggatgcattctcgacggtaatcaaattaaacagtttgtaaaatggttaaagcaaaacatgcttgtaaactagagatttttttttcgatcaaaaattagagatttatgtatgtaacaattatagaataaatactagcatatatgtatgtacgtacataaaagtcagtctaattctctaataaatatggtaatcttatgtgttataaacttataatcttatgtgttataaaatctcaattttaattttctaacattacggttgggattaaacctttcaacccattcgtttaagtaaccagtacattcatgatacatcaaacaattaaaataaaataaaactatatacgtaaaacttaaagcccaagtagttgaaatgtcagctttacggctatgtgagagtgggagtgtcgttctactgaaggttgatcatgaagaatgtatttcagttaggaatatcatatgaccatgagtccatgatatgatcctagatggatagtgctagtgtgggggtagagaaggaagtgagaaataagaagaaatagagatagtggttatgggccctttagcgtgaatctaatttacgtgagagttgagaccactcgtaagtacgagactaccatagcttagataatgggccttcacttaaaacaatattataaaagaccgtatcttaagtggagcttagttacatttactgaatccattaagaaaatcctaaaccataaattcagtttgtgcaaataaatatacgattatttgcatacaattgcatatcctataattaataacattgttaaaaaaaagtcaacggctgtgtgcgacactgccaaaaatatgccaaatgcttacaaaacaaaggtaagaagaatatgacaagttgggcatcaataatacgttacgtgttgacttttcaaattttaaattatatacttttaatatatattcggacctggtccatttatattcttgaaacgtaaatcacttcacaggattgtattatcgatttagttcttataaatacaattaaacaatatcttaatcagtagcccatcaaatttaggttatttttacttatgtttctatatatctcaataatattatgtaatcatttttctttaaacgtggtaagttcagtcgatgggaatatatgctttgatttgagtacaaagacgagacttatttgtcatcccaaatttcattatgtccgagaaaaaacaaaaacttgtactgtattttaaagcatcgaagcatgacgaaaaaccgcgtctagtgactcgtgtgaacactttgaaccccccaaaaaaaaaaacccgttagatatattattatgctcgaacttgccgaatttttaatgacaaaagtaccctcaaaaatctcacgttattacacttttgccattgagacgaccaaactttttcccaccgttttaccaatctctctctctctctctccgcatcgtaatatccactctccgtctctatctctatctctcattctctctcatccaacgctatg

SEQ ID NO: 5544 - DNA, 3000 bp, Unknown
  misc_feature (1)..( 3000): cDNA_ID_1014438_gDNA_ID_1620801_Annot_ID_168696 3000 nt of promoter + ATG
tttaactcctttagaggtaagcataaatactttagaacctggacattactctacttatccacgattgtggtctatattaagtattagtgttacgagaatattgttgtatattatttatccatggacactgctgtggaataatcagagtagttgtgcaaacccttgagcatgtgagtagattaacttgctgatattggttcaattttcgttcttgtaaacctatcaggtcggtttgatgcttagaggaatgggcttcaacaaaagtacatatatattccttgccgctggcccgatatatagcgcaaatagaactatggccccactactcgagatgttccctaatctacagacaaaggagatgcttgcttctgaggaagacctggctccttttaaggtttctacgattttccactgtttgttcatccaggatgagtcctttctgacttgtaaacttatgtgtctgtgtttagaacttctcctcgagaatggctgcaatagattacacggtgtgtctccacagtgaggtatttgtgacaacacaaggtggaaacttccctcatttcctcatggggcatcggaggtatttgtttggaggacattcaaagacgattcagccagacaagcgaaagttagccgtactctttgacaatcccaagttggggtaagaactctaacctcttccacctacaaacatgcttttttggttaataatatctggttgatccctcaatggttgtttctgatattacggcagatggaaaagttttaaacggcaaatgctaagtatgaggtcccatagtgactccaaggggtttgagctgaaacgatcaagtgactccatttacatattcccttgtcctgattgtatgtgccggaagaacaaaacaacagcatcagccacctgacacattcttttactggattcttcttgtgcattcttttatttacatgtgttgctaattctttcaattctttggccacatccgcatccaaacagagcgagagcgagacagagaggacttcccaagcattcttcttgggggagattttttaacacattgaagctgatgtatctaacacgagaaactgagattagttcccacgtttgtttctgggcggagaggatagcatttggatgttcatttgtgttttgcagtttgaaaagttttttgagttttgtatagttggtggtctagtgttgggtttgcccataaataaatgtagatcataggggagaagagagctgccaaaaaaatttgtacattgattggttcctttttggtttaatcttgtttacatttcattttaaatattatctttcttatggttcttccaagtgaatgtggtgagtccaatgttttttactgtctgtcattttagtttcctacgaaaacaaggcctagaagctagaaccatgtttagtaataagatcttgaataatattcgtcttgttaaaaatggccactctcgctttgtatgcgcttgattaacacatgaacctacatgcttattccacagttggcatgccagattacatagctctataagttctattgaagaagggctatgaattggaatatgattggtacgcaattgagactctttattgtgcaccttgacgcttttgcatgcttttgttctgaaccatatcttattagggaaggagggggactaaatgctaatcaatccttgtttagtatctctcgctacttttgtgtcactgccatcatgctcacatttgaatgagtatacatcttcgtgactctgctagtctgcttacgtaagtggtcattaacctcgccgtcgatggtggttatagacttatagtgtggttaagccttaaccacaactatttcggggttctgaaaaaaacccggtttagtgttacctgttttatgatgagcttgggcctttgcctttaacaattgggcctttgtattgtttttttgttttttttttatttttattgttttttacatctgaacgtttgaagttgtttattatttcaatgtttacttaaaaaagttatatcatccgaatgcatgtgccattattaatttccgaattcaatgtcaaaagatcttacatgagatcatcaataattcagtatcgagatacccctctattattgatcttagtttaacttgaaagaaggacttagtttaattatttcaaatatttaactttgaacatatatttctggtcttagtatatatggttatttcaactttaaaactaattatgatgttgacttataatgtaatgattgagtcctatttaatctaaatatgacatatatatatatatatatatatatattatattgaatgatttttaacattctcaacttacttttttttctaaaatctctttttcgattgatatacgacattactcaattgactaatctttttgaaaaatttgtgtgagtcagcaaatggctggcatctgtttttatattgtataactagtattcgcggttcattaaaaatacaaatttagtgatattgtgagagacaagaatatacgcaattatttttctaagcatgttgaataatccacaatttgatatatggtgtgaaatgattgcattaatattagaatattagctaatcatttctaagggtgtaaatttttccatctaaagggtactagtaaaaaaaattctataacgaatttctaaggatgaaaattataacaatcaacatattaactgattaatttagctaactgaacacatgatcatatagcatatatatatatatcaatacgtgactataattgtttataatatatgaaccgtcaacaatttaaaagccgtataaaaattttggtaatagtttccttgttaacgtagcttggtgttgagcttgtctatataaaggaagggagagatcatagtatttgcatcagaaaacaggaataaaagcactcaaaagtcaaagcgcgcgcgcgcacacacacacaaaaaacaatccaaagctaattgattcatcaatg

SEQ ID NO: 5545 - DNA, 3000 bp, Unknown
  misc_feature (1)..( 3000): cDNA_ID_2034288_gDNA_ID_1620801_Annot_ID_168693 3000 nt of promoter + ATG
taatttgatagttttcagcacaatggatggcatgcaaaatatttgttggtcatttttattataaattcgaacgtcacattttttagtggtaacgttacatctgtatacaaaaaagacaaacaagatttaatccaaactctacagcacatatattttaagtaaaatctgattttgattttatatatgtttaattcttgaaaaagtcatacatatatatctggtttcttgtaatgttgtgacgagtttgtgtatataagcgaagggggatgctttagtttttgtacacctccatagaaaataaacaattggcatttgcataaacactttcaaaaacaagtaatcaaaagtattttagaagcttcatcatggcgacgtcaggtacatacgtgacagaagttcctctgaaagggtcagcgaagaaccactacaagaggtggaagagcgaaaaccaactcttccctgacgccattggccatcatatccaaggtgtcaccgttcacgagggcgactgggactcccacggggccatcaagtcctggaactacacatgcggtcctctatctcattctctatttgtatgaatatgtgtttattactagctagggtttctattaatgaaaggttcatgtaaatatatgaagatgggaagcaagaggtgttcaaggagaagagggagttagacgaccagaagatggcggtgacgtttagagggctggatggtcatgtgatggagcagcttaaggtgtatgacgtcatcttccaattcgtccctaagtctcaggaaggttgcgtctgcaaagtcactatgttttgggagaagcgctacgaagactctccagagcccatcaagtacatgaagttcgtcacgagcttggctgctgacatggatgaccacattctcaagaaccagagcaaggcttaatcatcatagtgaccatacttatgaagataaaaataaataaagaaacatcctaatatatatgtgtgtgtgtcgtttgtgtttgtcttgtacatgatgaaaccgcctccttgtcttgtgtacattttatgctgataataatggcggtacgtcttgtaaacttatgcatgtatcatctctgtctttgatgatttgatgttgttatggtgtagtattggtgttcgtaatatataaagagcacaatattaggatgtatagtctcactgtatatcacataattaatttcataaagaaagagaaaaagtattaaagaaatttgtacgaggtaacaacttgactaacctgcagaatccaaaatatccattaatgaatcaacaaaagcagacatacaaaataaaacttacaaatcttttgcattaactatagaaacaaacaaaccaaaccacatgtatgctcttatactgattaaaagtcatgtaaatcctataacaaaaacatacttctagttaaaataatttacgtattaaaactacataaaacaataaaagaataagaatgttattaaataatcatcttaatttgacatcttatcagatttctttagctaaaaaaagtttgtttaatggttggacttgcaagcaacaccatgaaggtggtataattatagttattttttaaattaatttataattatagctttttatctcaacgaagttgcatcattattccaaataggtcttcgtgcaacaatatgatccatgtagcgcttgcaaatgatgcattactgatttttgtctatcatatattatcacattagtcttgatttttgtaatcacttctcagcttcttctactctaattatgctctgtacaatttattttttcagtaaaaataaccacaatcaaataaatattcaatgaataagagaagatagatttgtagtaattaaaccatagtaatttttctgtatgtaggttcaagtcttttgaatttagaagtctataacttaaaagaaacggaaattaagatatgcatgtgtgataagaaagtactaaatccgaagaaaaaaacgtatgggtgcaaagaatctataaggaggaatagatggacatgaagacacttagtccacacgtgtggagcaccaatatcactatgatgtcgttgatctgcaaattacgcaaaacctcttatgcctaggtttattctctttctcagtcggtatttatccaatgaaatgattaatcatccagtcaataatcggttacctaatacctatgagtctctgactatatatgaataatgacattctaaccgagtcgaaacttaatccagcttttacaaactatcttcacatgtcatcacttaaaatgatatggaggttgtactagatttaacgatatttccaagcgattggatattttagataattcaatttgtagtttatagattaaatatttcctcttatacatatattgaacgtttgagttatggtaaggaaaaactaacttgaattggtcggagactaaaacctaatatgctttaagagacaatggcgtgttcgtataataggttgttagtctatgtttggtttgggatttttgttgttagaatcagagtaatagttcaactttctattaaggtgtttgtttttcaaatattagctttactttttaattttgattttggagtttataaaattcaatctagaaactacagttaaaacaaattagatctagaactagagttaaaatagtcaacaatctagctcaaaaaccggtcgttcagaaagaaactatatatgggtgcacaattttatttctggagtaaaactaagcattcatactcaggatctagtagatggtgaacaaatgattttttttagctctaattaaaagaattaaaccctatatttgaaggagacaattatgtataatgttacatatacatatatatatatagccgttttgctatttgtagtgttgtggtgagtttcgtgtatataaaggaagtgcgacacttgagtatttgcatcaaacaaaacacttgacacatttcaaaagaaaacaatcaatcgagaaatg

SEQ ID NO: 5546 - DNA, 3000 bp, Unknown
  misc_feature (1)..( 3000): cDNA_ID_3077626_gDNA_ID_1620801_Annot_ID_168689 3000 nt of promoter + ATG
tacaacttcaactttgaatggcaaaatataacaacaataaagacatactagacattttgtaactatgtgtaagatgttaaccatcaatattttagtaatcaatatgtgtttatcatttttttttatatgaagtcgtgtactcgtgtgcttttgtgttctttaaacatattttgtgccagaaagattcgaatttgccaaaggaataattaaatcggatggtcaaacaaaacatgatatttatcactcgtgctctaatcttgatttgctgaaatagtaaaatagtaaaacatgtcatgagatccgtatctctcaacttaacactttaggtctaggttctgtgtaatgtgtatataagcttaacacttgatttttaggttccataacaaactcatttagagatatgtgcattcattcacatttcacacataacaataatgtttggaagatctatgaatataatttcatggttaatttgtgtaatttattcgttatgcatccaaatcgccttcgcaattcgaagtacaaatgagtactccaaactaacttaacatgaaacatttatttgttataagtaattgtgaacttctttttttttatgacaaattgacaagtaattgtagacattaattaatcagataattaatttttaacttgtaaaaagcatatagcaaaatataaagccggcaaatctggaactggactgacactaaggtgtcgtgcgatgtccttggggtgggggaatatgaagacataatggtgtgaggccatacgcacgtgtccctacatcgaatatcacatgtactcttgcttcgattttatttttatctgttcatattattaacaagattcatgaatctctctctccatagactccgacgaaacactgcccatgtgaagttcacatttgcatcctgatatcaaactttagaattgcggctgacttgcaaaatgaaaaaaataacatattaattctacgatttctagttttctattagccgtaatatggttataaaatcatttgtttgacaaattagatagttctattagactttgttttacaatcattttgttgtttgttcgtaacgttttcacagttattgtttgtaattttctagctttttttttttgctgaatttacattttattacttcttataaaatcttttacgtagataaatcacataaatatataatataatcacgtaaaacatactctagtagcgaatgaattaatcaccgtatatatagactgagtattcatgatattatcttctcgattcacgtaaccatcggagggagcgaggagaggtacgacatttgcttttgttggcggctgatcacgtgatgaataagaaagaggtgtccttgtttttattccacttacccattcaataacgtggaaacaaaacgtatagtacttaagcattttgttcttataacctacttgacagaatcaaagatacatcatacgtccctaaataatactatattccaattgtatatctccgagtaaaatgctaaaagtagcttaaagtaccatgaaaatgaatgttaacacacccaaaaacaagtcttatgcggataagaaaggaacgatgttaaccagcaacaattatcatcgttaacttggtcgtatcatcaaaacatgatagtttcatatattttaccattgcgtggacagtggacactggacgctacgtgcaggactagccgagttgggatcaaaagacacatgaatttgatgggctagatgattgatgtgggaatcatttgcactatagtacaggcttattttaaactactaaagaattgggcttgatccatactaaataaacaacccaattcgtaaaatgtagggagaataaggtggtgacaagtgataacagatttgtgctgattcggtaaagttgcattcattgtgatctgccattcaaatctgtacgaataatatgacaacccaatgaaaaaacattggacgagaatttgttgacaactacatacattttgtaacgaattcatacaactagcaaaatgaagataaactaacattcagtcgaccaatcgaaaatgtcaaatgagagtattgatacaactagagctgcacctataactctatgactatgtttctgtcccccaccagcattggtgtggtgatgcttttccacaacttctttagtagaaaaaaaggacccataaaggaatgcttttggaaaaagacaaccccactttcattatgataacacaaaaacggaatacataaaaaatgatatagtcaagtaaaattacaaaatcagtgactacaaaatttgattcgtatagttaaaaaatcacaatctaatcaaagttatatattggacgctagataacatttagccacaaaaggttaatccacaaattataaattttagtataagtcatgagatgtacacacacatggctctgaatgacgagttgctgacacaacataagaacaatgaaagggtccgtggattcgattcagaatcgagtcaaataatagtctcactcttatgtatttgcagcgacatgctttgcgtctaaattaatttaagaatcacttttttttcttcttctcatcattatttaaagaaaatcattgactcatacgtctaagtaccaagatgaataatcgtaacttttataagaatgttacacttatctgctttaactaaaaaaagttacacttgatcttagccaaaaacaaaataaaagtgaaaaccgacaaaaaagaatgatgaagaagtaaaaaaaagaggataaaaagagagttaaaaatgaataaaaagagtaaatacaaatcaaaaagcaattagtcgcgaattaaggaaagaaatataagaatgagacgaatccaaatctgcgtctcatttgttttcttcctctttcttctcagtctctgcgtttctttctcggggaaaaataatatctgagaagaagattcgagagagagagatctgaacggtttttcgcttagtctccaatg

SEQ ID NO: 5547 - DNA, 3000 bp, Unknown
  misc_feature (1)..( 3000): cDNA_ID_1376639_gDNA_ID_1620801_Annot_ID_168688 3000 nt of promoter + ATG
tggaacagttgccagctttacaacagcttctgcatcgtctcattggttgtaaggtgcttctttgatgtcatttcccgagtcgtgcactatgttttgtaaatcccgtattattttctattaagttggagaagcttttcctgacgtatgaactgactttgctctttcgactttttcagccagaaggtgctgctaagcacaatcatatcattcaatatgcactctccctggtacattaaactaaactcgggggcataatttacatatatccgctagttcttagtgttgtgtcaaatatatactatctggaaagaacagcttgatttaagctctgagatcttattgtaaattgtgtatgcaggtattgaaggagagttttaaagtgtattgtgccatcaatgaaggaattatcaatctagtagagaaggtaggccagttttttcttttcccccagagttactctctcccttcatgtgttttttgatttcttactgttttatacatgcatatattgcagttctttgaaatgccaagacatgaggccatcaaggcccttgaaatatacaagcgtgcgggtttgcaggtaatgttgttgggttattttctctgttagatcaatttagatttcacttaacaagggttagtttatcaatgcaggctggcaacctttctgccttctatgaagtatgcaaaggattagaacttgcaaggaatttccagtttcctgttttaagagaggtatcagataataacttgtttgttacatttaaatttgtgatggcaggtactttatcaatactaaataagtctatttttgtttttttcaagcctccacaatcttttcttacaacaatggaggaatatatgagagacgcacctcagatggtcgacgtcacatctgggccactggtacatatatactctcattgtggtcctactcctacagaaaccatgatttttcttttataacttatttctaaaaactttgtcaacatacagcttctgacctatacgcctgatgatggtcttacttctgaagatgttggaccttcacatgaagaacatgaaacatcatcgccttcagatagtgccgttgttccctctgaagaaacgcaactttcttcccagtctcctccttcagtagaaactccacagaacttcattgatactgatgatctattggtaaattatgcttattacatatggtcttgatttctttattctgtcattgttatccttttgtctctgattctctcagtattacacacagggtctgcatgatgatacacctgatccgttagcaatcctggaccaaaatgcactagctttggccttagtttccaatgatggtgagcttcttggtctatgtactggagctctaagtttgcctttcttgcttgtctttagtcgcaattctggttatgtttctgtttccagttgattcttcgccgtttagttttgggcaagcaagagatttggatccgtcaggatgggagcttgcgttggtcacaacacctagcaatgatatatctgcagccacagagagacagctggtaagatgtattcttgtattagtgataatgggatgcatcaattacgtaccattgtcctgttaacgtatgtcacctctggggaattgattttgtggcttctgaatcattaacatttttttctgcaacaaatgcaaggcgggtggattagacacgctcaccctgaacagtctatatgacgatggagccttgagagcagcccaacagcctgcctatggcgtcccagcttccaatccgtttgaggtccaagacctgtttgcattttcagacagtgtttcaccgccttcagccgtaaacaacccattcggtctctatgagccaacctatcatcaacaagagcagcagccacagctacaggttgcacccagccctgcaaatccttttggtgattttggggagtttccaatagttccggtttcagaaccacaaagcaccaccagttttggggcatttccagtaccggtttcagagccgtcaaacaccaccggctttggggagattccagtagtcccggttacagaaccgccaaacaccaccgcgtttggggaatttccagtggtgccggtttcagaaccacaaaacatcactgggtttggggcattaccagtaaccccggcttcagaaccatcaaacaccaccggttttggggaatttccagtagtgtcggtttcagcaccacaaaacaccactgggtttggggcattaccagtaatcccggtatcagaaccgtcaaagaccaccggtttgggggaatttccagtagtcccggtttcagaaccgcaaaacaccacgggttttggggagttcccggtaaacgcaggtgctcatgagcaacataacagcaacaaccccttcggcagcacgggcttcttgtgatcccatcttcgtatatttctcaaaatgctttatttgtctcatatgattctattgtttgtgagtagtaataaaatcacatcatcttctagtcttgcaaatcttgttctgctaatagagaaagactcctcgggattgattatataaatgaattttcattggtggaaaaaaaatgaaagatatatataactcattgtgttacattaacaaaataatttgaaatatgattagcaaaaacgctacgtagtatgtcgttttctgttctagtaatccagctaggctgaaccaatggccattcgttgaataaaaaaggaagattggaggagaattaggtaatttaagggtaatagtcagcagaagtcattcccatatgtccacgtcagtaatcctgctcgagaaagctgctataaactcagagccgttggatcaacccgtaagtttgaaaaccccaaccgtcagatcaacactacaagttaatatgagaataatgagaaaaccactttcccaaattgctttttaaaatccctcctcacacagattccttccttcatcacctcacacactctctacgcttgacatg

SEQ ID NO: 5548 - DNA, 3000 bp, Unknown
  misc_feature (1)..( 3000): cDNA_ID_3610622_gDNA_ID_1620801_Annot_ID_168685 3000 nt of promoter + ATG
cctcagttgcaatatcgaccacgaaaggatcgtacggtgaatactatgatgggactcaccaagttatggatggagtatgtggagattcgcctacaatcaataattctgctaaataaaagtaaattatccgagaagaaaatatctgcacgcgtgattattaacattgtactaatagttttctcaaaatgctccaactcattgaataacaatgtcttttttttcctctttctaaatagacaccttttttagattttactcatttttagtgttgaatctgttatatcaagattcaagagacaaatatatgactcgaattgtttgaatttttgaacttactttgtagaactaggaaccctagagagtatcaatataatttggaattttattagaaaaattgtagcgttctgatctaatgctatatatgaaagagaagaaaatgatgacatgatcgttttagtaaacgatccacaccatgcttcttaagaagaaaagtccacttaaaatgccacttttagaaaaaaatgagtgtgtactatatagtttatagactatagtggggaggtagccgactaaatatattattatttattacatacataggatttgattagtaacgtttaaaccattctcattcatgttatgtgttaacatatattatatgcttggttagtaataaaaatcaatattagtaatattcatatatgattaccaaatatgtatatgattgaatttgaagccttcatatcttagtaaattttttaactatgcattaatcattataatagaatttttcacttcaaatattaatattaatcatatcaaaacaagaattttctgtaaattccaaaactttttggttaccagaaaaagacaatgaaaagaagaagaaaaactatttggttgtttttttccaacgaaatatttgttaaattcctcgaatcatacctataatgaagcccgtaaaacttataataggcctatttctctaaggcccatcagcatcaacacttggtttggagcaaaggctttctctctcagctcaatcccagttttagctatgcgagtattcaaatgacacgaaatttttcgataacacatctttaatttcttttactacaactagtatttttattttattacagttatactcataaacgagtgcctcttaagctctttttatttcttctcttattaaagggcagatatttcaaaatatagtaaacaaaacaagaaaatgaaacaagttcaaatattatcaaataaagaaaatcttatatttatatggtggcttttactgatttcaaattttgttattctccaactttgtataattagtaatgtatattaattacaagaaaatgaaactatatatcattatgcaattacactgtttactttcgacgattaatttaatcaaactacatatcaatgtaatttccacgtcagaacgaatcggaaccttcatatattgcctgaatgctatggacgacttcaccaaattgtcccagtcaacacgaaaaagcaaagaggactaatgagctaacatgtaatatatggtccatgtttaagatacagaccaaagatggcctataacattaatgaacgttataagacgacttttaataaaactgaaaataatatcctccttatatatattatcactaggcatttacattttaaaaatttattttccttttgtgggggtgaagaattgacagagtgactgtgagtgatggaagttgaaggcgatgcatggcggcaaacctcaagctgacggcaaatggtcgattggtttctgcgattgctccaactacaatttattcttcattttcaataaacttggaattgtatagatcttttcaacgttaagaacttcatgactacaatgtatatgtgatccatcatccatagtatctcacttagactttttagttttatgctataattttcagtatgtgatccatatatagtatctcttaattgatttcaaagctttgagagctatcaagatgccatatatagtatctcacatagggcttcattattcaataactggcttggttaactctattcctcgagacgttcgttttaatataaaaactaatttatcagggtggagcagaaacgttgaacgccaaaatgacggcgttgcaatgattagataaattttaatattgtatgtgcaaagtagaacactataatttgcaaaatgattggcgcgcgggacgtggaacccttataattaaactaagaatcaaaatgtctttcgaaaagatatttggtcaatcatatgaatagtcacttgcgtgctactattagacatctttctgtaggatttggtcatcgctcgtcactcgtcgctcgtcactcgtcgctcgtcactcgtcgcttgtcactcgtcgctcgtcactcgtcgctcgtcactcgtctctgtaattaaagatacaattgtccatttaattttcatcaaacctgctaagcccgcaggcttaaacggactaacccatttgaatccgtttacattatatcctaaataaatgggggaagacaaaaataaacttttcttataagttaaagtgtgtagtagtgtgataaaactgataaattaaaaaaaaaaacttttttccaatatgtttataaatctctccatgaaatatctgcatgaaaatctttactaaatgaaaatccatatgttatttcgatttatcaaacattatccattacaaactaaaatagatttcttaagaaaaacaaaaaaaactagaaagacttggttatatactccttaaagcaaatatttagtaaatggtgatggctactttcaagataaaacaaaaacttgagactttttttttatgatttttaaaagtcgaggttccgacgagttcaaaaataatggaattaatattcttataaatacaagcatcattcttcgtttatgtcacaaaaccttaaacacattgctttctatttaaaaacctctttatttttctctccatg

SEQ ID NO: 5549 - DNA, 3000 bp, Unknown
  misc_feature (1)..( 3000): cDNA_ID_4370936_gDNA_ID_1620801_Annot_ID_168683 3000 nt of promoter + ATG
aatacaaaataatgtctttgttttaaaacataacaaaaaaatgatttttaaaaatatacagaaaataaaaattatatatattttaaattgtattaggcctattactctaaggcccattagtgtcaacacttggtttggactttggactggagcaaaggctttctttctcagctccatcccaattttagtgatgttttttttttttttcgacaacacatctttattctctcttacaagtacaacaactagtatttttgtttttcttaaacatacagttgtactcgtaattgaatgcatcataagctctcttttatttattctcttagtaaataagattacgcattttaataagaagcatctcatcttcataatgaagtttgaaattgtactttggtaatctcttatagtgagtttcacatatgatcattatattgtgcgttagaatccttgtaagtcatggtccaattcactttaatgagccatatttgttaacagggtgtgttaataaagtgatactaacttcgaacatatacagaaaaaaatatacatttgggcctttaaacctatatggccggtgagattaataaagcatctacggcagctcaacaagtacacccactagccttgcactattaagaagatcaaaacaagaaaaaaacaagttgaaattatcaaataaagaaaaatcttacatctatatagcggctcttacacatttcaaattttgtcagtctttaagtgtttatgattagtgatgtatatataagaaaatgaaactattattatgcacgtacactgtttattttccactattaatttaattcaaactattctacatatcgatttaatttccacgtcagaacgaatcggaaccttcgtattgttctgaatgttgtggacggcttcaccaaattctcccagtcaacacgcaaaggccaaaaggcaaagtggaccaatgagctaagatattggtacatgttgtaataatttacagagacaaaagatggccatatggtaatgatgatagttagttagctacatacatccatccgacgaattcttcgattgaaaaaactccacttgcttcttttatcgtgtgtgtgtaattaactaattcgtctacgatccatttcatcatttgtctgatattcacatgacaccctttttttttgttagtgcatattcatacaaaaatacaaagaagtaaccctaaaaaatagatacaacctattttactattttggataccagctccagatacacataaacttattgtagaataaaactgtttttgaagttataacgaatttttaataaaactaaaaataatgtgttccttataaatattctcactaggcatatttcacaatctctctcaagttctgtttttttctttaatttctctttgatagtaatgttgtcttgaacatagtggcaattagatattgtgtgcgaaatataagtgtcaattttttgatataagtgattcttcatgcatttgtgactttgctcgaggatttctacttattaagttaaaaagtagtagttaaatatggtttgatatattggtggaagttcttaaccaagtttaatttgaaaattagtatgtgttcatttcaaagttaatttaccgggtgaacaagtcgccaagtcgggaaaattgttttaattaggcgaaactaattttctaggccaaatattcaagtattttgaaattattaaccttcttaactatctttacacgtccagttatctaatattgcaaaattgattagtttatatatatatacacatgttttgctatttagaacactaatttgtaaaatgattggagagtataagtctttaaaaatatttggtcaataatatgcggcatatgccttggaaatagtcacttgcttgccattagtcatccattagacatcttctatagatatgtttaaaaaaatatttggtcaaatgatatgccaatggaaagatacaaatgataccgtcgacttgaattatttattctttattttaatactttaaattattattagttttcttaatataaattattttcatattaaattattttctcagttacaagttacaatatatattcagaccaattctttgcaaattgtaatagttatacttctcatcgatttggactgaatttttgaacgcaaatattcactaaacttcccacaacataaaaacaaagaacaaaaagacgacaaaaaaacaaagaataaaactaaaaaagagatttataaccatttgagaaactttaatttctagagtcacatatgtagatttttgaagtatgaatttttatttagtaaaactaataatttggatatatcatggagatatttataataatttaagaaaaatatactaaatttatttttagaaaaatactattagttttatcactctaaattagtaaaacaaatatgtatatatatttcaatattggggcattaatatttttttagaaaagaatgttttctgtaatggtattgactgctcagatgaaagacttgtttcaaaacgaagcttttctattaattgattgtttatataaaatatctaaatattctaacaaaaataacgactagttttaaaagagctagtaatagttatcattgtagcgtgcatttgtaagtccatgtaagtgctaaaaaaaaaagtatgtttttctttcgtgaaaaatgatggaaaaacagttatatatatgtgcaatttctcatatttcaaacattatccattagaaggacttggtaaaagtcacgcaaatatttagttaatggtgatggctattttcaaaatcaaacaaaaccgtgtgacgaatttcatggttttaaaaaatttaggttctgacgagttaaaaaaataatggaataatgtccttataaatacaagcatcattcttcctttatgttacaaaaccttacattgctttccatttaaaactctcttcttcttttttgttctctctctctcttcatg

SEQ ID NO: 5550 - DNA, 3000 bp, Unknown
  misc_feature (1)..( 3000): cDNA_ID_2053237_gDNA_ID_1620801_Annot_ID_168681 3000 nt of promoter + ATG
agctgttgggttctttttttcttttttaacttatcatgaaattcaaaataacaaatatatgcagttaagaaaacagaattaagttgtataatagtcttgtgaatatgattttctgtaaattctctttattagtttcatttagatcatagattcatttgaagatgaggagagatgcaaagagaggaaacgttattgtacagttttttgtttgcactctttgcttctgtcttcttcctcccatcctaagcagttgcggatacatcatgacaacaattacaaaacctttttgttaaaccaaaccgaaatccaaacaaatctcggccaagttcacacctaaagtttcactgtacatacttttcctgcagcagtagagtagactcttcatggaaaggcaggcgtaagatgttatatacaaagtgatcaagaacacgtctgattgttttttttttgatcagtagatagagatcagtggaaggttctcgtcttcttccataggcttcaatgatagtaaagaaagcctttggaccaaaacatctaacgcttccttcatccaccaatctctacaagcgtctcttgcttcatcaactttcatccaaattctttgacgaagatgttgttcaggccaaagctcaagctcttctttcacaagcattgggaacatgaatccttcatagaatgttcctttgcttttgcttaagaaatcccattttccaagttgtctctgcaccaaatatcaaattactttacaaattttggagaaagatataagtaaaacaatcccaaaacgtaatcatgtgttcagtttcaaatttacctcaacgtttccaacaactccagcttcttctagagattctcttgacgcagcttcttctacagattcatcaagctcccaaccaccctggcattattaaaatcaattacagggtaaattagttaaaacctagaagactaatattataaacgaatagttatgatttattagttgttcttgttaggagtcaaagttagtatacctttgggaacatcagagcgtgacccttttgtgatgaaataacaagaacctcaaattcgtcgctaattgtgccatcactcgaaatcttgagtctgtatggaatacacctgcaaattttaaactcacacaaagtcaactcttagaatggtgattagtggaaaaagatatagatgaaacatacccgacgacttgacgccgtcccttgttgtatctttgggattgacgacccgtacgggagaccaaacacaccatgctactagaaaaacagagttcttgaagaatctgaatctaatttttgactgtataaaagaagagagatcgatgacggttttgctttggcggctaaagggaaggaggatctgaagagtgtaatgaatgtttttgcaggttagagatcgaagttaagaattgtttgataatagttataagcaaagattggataggagttatgaagttatgatggggtgagtgaacaaaagatttgagataagacaaaaagcgttgtcttttgcctccttgcggcttatcctttttatagaaaaacgacatacattttctaaactcttttttgctctttatatttttattttttcctatcaacttttgaaaataaatcattaatagcggttaatttaaaatctaaaaaaaaaaaaacaattagtgacaccataagggtgaattttaacaaaaaagaatacaaattgttaatttaaccttttaccaaaaacaacaaaaaacatgtaactataatattttagaaccgaagtcgatatccatacgcggcaggttaatgtttacacttgagggacgacgacgtcatgtgcgtcaaccccaccattaggacgtgtggttactggtctgtgagtccatggaaaagagatggaacattaatggtttcactaaaccacgaaaagtgaattatgtcagttttttaatataaaaaacttcaataaatgattaatacaactattactaaacctaacggatataattaaacaatcaaatgttgaattttgaaattgcatatagaatataaaaacatacacgttcatttgtatgtgattacacctagatgcatgcatcaaggtcatatacttatatgatttgttatcaaatgtgaaaattgtttataaggtggtaagacagggttattacaaattctcattattgttggtttttacttttcagctagccactcttttagaaaaattcatccaaaaccaaaactattcaccagcccacaagtttatacaaggtcttgagtcataagttttctctctacatacgacaaattcaagaaaaatttaacatatgagattttaccatatgctgaaacgcagttaatgtgtatgacaaattaagagtaaaatgattttaagtttagactctaaactgtacatgtttttaaaataatccagtgtgccaatgagtagaagaaaatgataaatgtacttaatatttattttattaaaaaataagtaatttcttatatatttttattaaaataatatcatttctataaatataataattaccaaatttataactataatcttacaatcaatttgaaaatattttgttttcgaatttttaaaaaaatttaaaaataatttgaaacgaattaacccgacccggggaaggcaacaacaaagttcgacccgacttgtttagccggaaaggaaaggcaaattagcattttccgagagaaaccctgtcccgtccgtattaaacccttgcgactatctcttttactgtgtccaggcagacaccttttgttttccttctccctcacttcttcttctccaatcggaattttgaacttctctttcttattcccgctctcttggttttgcgagggagccaaaatcgatttagggttttggttttctcgctcccaagaacttcactagggttctctgtttaaaaatccgcgtattttattgtggttttggattcgttccagtgttgtttattcttccaataagatg

SEQ ID NO: 5551 - DNA, 3000 bp, Unknown
  misc_feature (1)..( 3000): cDNA_ID_2053243_gDNA_ID_1620801_Annot_ID_168680 3000 nt of promoter + ATG
cagaacgggcaagtactggatggtgattctagtgatgataccaacttagcaaatgcagcaaatgaaatggccatggaggtctcctcggaacttaaaagtgtaacacagttgtataatgagtatgctgtcccatttgagctctgggaggtgagtcttaaaatcataaactatcatctttatatatatattctcgttaatcaatgtatttttggaccatgtttctgggtaactggttttctagaagtaaccatagaaaaaggagagccactattcctctatagctgtaacttagctgatattctggaaattcgtaggttctattcatgctaaacgtaacttaaagtcgataatgactgttttaggtcatgctgagaattgttgcaccagtatcctagtttaaaattggaaaatcataagattaaactattgaattggaaagattcagtgctagtatagtcgactctctgtgtatgcttacattgcttgtttgctgttctggcttcactctgtgcagatctgtctggaaatgctttactttgccaactattctggtgatgctgattcaagtataataagggaaacatgggctagactcattgaccaagctctttcacaaggcggaatacgtgaggcctgtgcagttcttaagagagtcggatctcatatataccctggcgatggagttgttttaccgctggatgttttatgccttcaccttgagagagctgcacttgtaagcccatccttctagtagagttgttgactcatttcattgggttatgaactgaatttgagtgcatcttgtggaaaattttacaggagagatcagaaaggattgaaaatgttagggatgaagacatagctaaagctcttctagccgcttgcaaaggcgcagctgaacctgtgctcaacgcttatgaccgattattatccaatgcagctgttgtgccatccccaaatctaagaatccgcctccttcgttcagttctagtggtactccgtgaatgggcaatgtctgtattgtcagacagaatggggtcgagtccaaccaggtcttctctgatactaggcggctcgtttgcgctagagaacaaagctgctcttaaccaaggggcacgtgataagattgcaaacgctgcaaacaggcaagtttgtctctgtcattttgtttcgatttggtctgcttttcttgcccacccctaatttttaagtatactttaaaatcaagaatctctgaaaacacgaagatatgtctttttacgaacaggtatatgacagaggttaggagactagctctgccaccgaacaagacggatggtgtatacgcaggttttaaagaacttgacgagtctctcttaagtccattctccttctgatccatcacttttttctttctttcttaatatgcatccaatttcacttaatagggtttagcggctttcttgtaactttaaattgctctttggggaaatttccccttcaaagagaatcaaaaatacgaaaagagaaaataattctgtagttccctcttatattcggggccttgtctgtcaattctatctgtattatgtaatttcttcatcgaggtgttgttgttggctaaatacttcttgttttcctttagtttttcctttaaacttagttaacttattgtatttgcatgctaaattcttacaaacttgaaaatgatgtatcagaagtttttgaaagaaaatcttggttaaaagttatacagttgcacaattgggagttttgactttgactgatcttgctctcgacgttggattccattccaaattttcgtagaaccaaagtagaattttctggcagcttttgtttccccttttttggttgatctttatcctccactcgaggaaaaaaacaacacaatagaaaaattagcaacaaattattaggtaggaataggatagattagtgtgtttacgtcaaacttaggaatgatattcacgagtatgtaaagttttggttgtttctgcatgtaaactttatgtagatttctaccgtctatcaggaaatagttaaatttgtttagatgaataatgtaaaagacggtagaaaacaaaagaaacgtaactacgtaaatgaaatgtgtttagatgaataacgtaatacaatgaaagtatgaaactaagatataatataatgtaaagaaacagctcaaaatttgagattagttggtttgaccgtggtccggacttagggacatgttcggctcattaaagctcaaagattcttgtctcctcttacattgatttcttcactatatactactagtatcttcaagaaatgaatacagtatcaaattcaacgaaaattaatctatacaaatatattatgcgtgatgataaaaaaaaaaaaaggggaaaataacatgaatgtacaccaaagttaaatctgaaatttgattgagaaaaaaaaaaccagaatagaagttgtgtcattttagttagaatcatgagacatggtgtctagtgattttacatttgtcgtacatgtttggacaaaatgggatggtccctaataatttgacaacacatacaaaataaatacagatggtccctaatcccttcaatgtaaattaaccatatttctacgaaacaccagtgttatgataatttcttttggacaagaatgtactacttcattgctaattacccaatttctccttatgaaactagttaataaaatcaaagaggagcacacaattaaacagtaattaacagtgacgctaatcagtctctatcgttgtcactctttaacaaccatacccttaaacctcatttaaatctctctatctctctgcaaaacaaaacaaaacaaaaacaagaagtgttctcttcttctcttaagcccaagcatttgatgagctttgtagtgttgtcctcttcgtttgttttctgatatataccgatctaatttacaactttagcattttggttcaattttgaattgtggtgaggattgagatcggaagtaatg

SEQ ID NO: 5552 - DNA, 3000 bp, Unknown
  misc_feature (1)..( 3000): cDNA_ID_2025142_gDNA_ID_1620801_Annot_ID_168679 3000 nt of promoter + ATG
gacatgcctccaattgaagctattcttgcccctttagaagctgaactgaaactttcgagacaagaagtattttccttcctttgaaccagaattacctttgtatagctcgattcaacaacttacgggacatttaacagctttctcatatgggtttacatgttttgattggtagattgctaaacttcaagacgacaataaatcattggaccgcctaaccaaatcaaaggaagcagctttgcttgacgctgaaaggacagttcagtctgcattggcaaaggcttcaatggttgatgatctccagaataagaaccaagaattgatgaaacagattgaaatttgtcaggtatgtctatatcatttcttttacatattggaacaccagaatagggtatctcttccttttcttaccactgtggtggccttatttgttgatacattggttaaaataggaagagaatagaattatagacaagatgcacagacagaaggttgcagaagttgaaaagcttatgcagagtgttcgggaattagaagaagctgttcttgctggtggtgcagccgcaaacgcagtgagagattaccaaaggaaattccaagaaatgaatgtatatttcatatgcttctatagtacctcaataacttactgtttttcttgttagtgttttggtctcgtactgatcgtaattgtggtgttttgtgttttccttaggaagagaggaaaatccttgaacgggaattggcccgtgcgaaggtaaatgcaaacagagttgctactgttgtagctaacgaatggaaagattctaatgacaaagtgatgcctgtaaggcagtggcttgaagaacgtagatttttgcaggtcattgctgatacatattaatatttaaattctcttgctgcttcaaattgtgattcatattcacggagattaacttatactattgccaccaccgttatgtttggacagggagaaatgcaacaactacgcgacaaacttgccatagctgaccgagctgcaaaatctgaagctcagctgaaggtagaatcatagctgcgggacaccatcttattttttttaatctcctaactgaggaattgctgcttttacttatttttaggagaaatttttactgcggcttagagtgttagaagagagtttaaaggggcctacgagcagcagcagcagaggcacatctgttggtagaagttcgagcaacgggcctactcgaagacaatcccttggtggagctgaaacaagtccaaaaattacatcaaatggctcgctgattaagagaacaccaagttctcagttgagatcattgactgctagtgcaagcactgtattgaagcatgcgaaaggaacatcaagatcatttgatgggggcaccagatcattggatagaagcaaagtgctaataaatggaccgagatcgaattttcctttgaaccacaagtcttctgaaggaactagcagaggcgaatcgcctagctcaataaaaggggaagaagaatcagctgacaaggcaacaaataatgatagcgtcccaggtgtcttgtacgatctgctgcagaaagaggtcataacattaagaaaagcggcgcatgaaaaagatcagagcctgagagacaaggacgaagcgattgaggtttgctagtgtttggccttttttcctgttctttgccgcctttatatgaaatgttgtataatataagtctaaagatatgggttgtgtatatttagatgttggccaagaaggttgaaacattaacaaaggcgatggacgttgaggcaaagaagatgcgaagagaagtagctgtaatggggaaagaagttgctgcaatgcgtgttgttgataaaggacaacaagatagtaagaccagacgtctctcggtctcaaagggaaacacagctcagctactttctggaaggtattaatgtattatcatatcaactacaataagctttattattacctttagatgtcattattgtttatgtattttatcatttggtagagtgtctggacgaatcgggatgacgaggagcacacagtgacaaactgattcgatcaatcactggttggtctctgtggcttgccttaaggttcttgtaccaaattgagagaagggattcaaaagccgaaagagataatcgtgtaaagtacctgattgattcgatgtgtgtttctctaaagcattccaacattcaaggtaaagggagacattgacttcacttagctgatatatttcttactctgttgcgttatgtatagtagtactgcagtagtagaggtagggttgttttgttcaacattttaagcttttttactctcttgttttgtgtgtgtcactctctcctcttagttaattttcttattaacctcgattatattggtagcctaattttttatctttaaaagaactcttcttggtgttcaaaaaaagaactggtaaaacccaaaaaagctatatacaaaaagagagagagatagagttaatgaacaccacatgagttataagaacaccatcattgagatttgagaaggatatttacaacatttgtagtcagactttattgggaaaaaagtacatttgtaatgtaatcaggtcttaatgataattagtagttttgacttttgagtaaaaaagaaagaaaaaaagaacataaccacatgaattgaaccggttccgtatcattgaccggtacgcgtttagcgacgtgggatttgatatattttcactttcggtccaaaagtattatatatttgagcaagtagtcctacttttttggtttgaaattgtttttcccattaccgttctctgctccattgggttctttcctcttttctcccagattcatcaatccctcctgctaccgcgagagagtaacaactcaccggacgtttcaaatccatcctccgataactatattcgtttcgttagatctagatctgagcgtcggtgagagattttctggatctgtgatacgttccaggaaacatg

SEQ ID NO: 5553 - DNA, 3000 bp, Unknown
  misc_feature (1)..( 3000): cDNA_ID_1377914_gDNA_ID_1620801_Annot_ID_168677 3000 nt of promoter + ATG
tagatatgtttggagttctaacttccagtctacacaaacatacacgcgactactcatgttttcttgggtcgctaatttctatcacaactttcccacttttttttggtgtgtatcttcgattcttgaatactggtttttagaacagttaagacatattttgaagtcgcactctttacattagacaaaaaggaagctaatctttgatttttattcaattggtctccacttgtgccattactgtatttggatccagttcaagtttaaaaacaaatagatgacaaagaagctaatctttcttgaaaatttaatgtacatctcatgtagatagaacaacttattaacctaaaggacttttcttctgtcacaaacaataaaaatcgttagaactgaatttccaatgctcaattaagaacaagcagctaaatgtataaccgttaacaaagcctgtttcacatggttgatcagaaaaatgattaaaagaactttaagtaagccttaagattcgggatttaggagttaaaaagcaatgtaatcatcacagctgttttaaatcgtcaaagtagtagaaacaaaagtcaaagagagagcttcaacttccagctgcccattaattgcagcgagttggggaaaggcttattgagttatttctatccacttaccgtagagacaagtacccaatactttgtctgtttcttcttcctgtggcttctgggtctttgtcaacatcaaagctctttactttttcaacttactttatcgtgcgtctgtacggaccacaaaaggctctctctttatttctctgtgagatttttttaggatctgagagagccaaagatcatggaggaaagccaagaacttgccttgacccagttgagaaaatcggtcgagaaactctcttcttctactgaggtaatctaattcgacgctttagtttcattacagtttacaaagcttgcatcttttggccgtttcatgagtttcactgacaatgtctcgttagaaaatgagaaatatctgtcatttgattttgatgggttttatatgggctacactgttaaaactctgtctccattctcgtcatagtggtttgtctgattaggtttgagcctcccatcagaaaccctaacagtagagacagtttagtaaaagtgaatccataatcagaaaatctcatcaatggtttttgttgttgttgtttcctctgaaaagggatatgacaaaccaacattgatgaggttcctggtggcaagatcaatggacccagtcaaggcagcaaagatgtttgtagattggcaaaaatggagagcctccatggttcctccaactggattcatccctgagtcagaagtgcaggatgaattggaattcagaaaggtctgtcttcagggtccgaccaaatccggacacccattggtgcttgtcataacctctaagcattttgcttctaaggatccagctaacttcaagagtaatcacctctcacttgcttctgacctttactttcgttggaaataatctgtcccttgactttcagtgacttttgtattcatagaactgatcagcttctttcctggttctctaattattgagtagtttcatttgacttcaaatgaatgaagttttttgagtccatctatgtgttttccttgagttgattcttgcgataattatctatgaactaatcttttatctgtttgatgttgcagagtttgttgtttatgcgctagacaaaacaatcgcaaggtgtttacacattattgaaaccaaaacacttcaataatcttccggttagttggttgtgagacaagctttttggtttttatgtttcagtggcaacaatggcaaagaagttggaggtgagaaattagtagccgttattgatctggcaaacattacatacaagaaccttgatgctcgtggattgatcactggctttcaattcttacaagtaagcatctcccttcttcctgaaacaatatagttatcacacaaaaagaagtcctgtctattaaatttggaaaatgtttctctagtcttactacccggaacgccttgcaaaatgctacattttgcatatgcccggattcttcgtgaccgtttggaaattcgtctgccgttttctagagaaagcaactcaggaaaaggtttgatctttaatctcctcttgatgtatctatctctaatggttcttgagcaacgaatcacataaattatgattttgctgttgcatagattgtgatagttacggatggagaagaacagagaaaattcgaggaggagatcggagcagatgctttaccggaagagtacggtggccgagctaagctcacagcaatccaagatgttcttcttcctcaggctgctccagtaactctaacaaacaataatgtttagctctttatttttggaagcattaacctgaatatttgtaatggtcagaacataactagtggtacatctctaaatttccaaaagaagcaatgaaaacatgagaaagtaatgcgaatatattcaatctggtgactgagtgctcgctcttgcttatcttttcttattcacatcataagtaagctgtaaagcaggattgatcaacagaccagactaacttctagaaacttaatgtcctcttgttgtacgtgtaagattccaaagttagctatagatgtctttgagctaaaaaccagaatcacgagctcttaaatatgatccctaagccttgttatatgacaaaagacttttcaacaacttaatatttccaaaagaagaaatgatgaaacacatgagaaagttgtgtgaatatactcaatctggtgaatgagcagtttcaaacatcatgctgtttctgtatcttaaattaaacaatcttgctgttttgaattttgaagatgttggtcaattcactaacacactttaaagtcccaagcttttttctatcagccgcctccaaaatctctctatctctctgtctctcacttcttcttcctcacggcggcgacaatg

SEQ ID NO: 5554 - DNA, 3000 bp, Unknown
  misc_feature (1)..( 3000): cDNA_ID_2053260_gDNA_ID_1620801_Annot_ID_168674 3000 nt of promoter + ATG
gaaaaatacggaaagctccatggggcatgttgggggatggattgcacccctcattttagctcggcccaaatcaagaataaactaatcaacatcaagcccaaaaagcccataaaagttggtccatgatcctatcaccagcttagtttttctataaatagagaggcatctcaaggaaaaaaggacgaagaaatccatattaaaacgtcttcaagctcctcagctcgttctctagctcctctgctcgtcctcaagcttatcagctcgccctcaagctcctcagctcgtcctcaagctcctctgctcgtcctcaagctcctttgctcgtcctcaagctcctcagctcgtcctcaagctcctcagctcgtcctcaagcatgaccgagtaaattgtatcaccagagctaagatgggcacgaaaggttgcggcgacatcatcccatagtgataagtagacaataacagaccttaaaataaaaagacggaagtatcagttcaattttaaagttttgttcattatttttttttggtttggaagtgctagcttacgaatcaatccggtatcgcaaaaccaaacgttgagtagaagttggatcattcaagtttgacccttggacgaaagtgatttggcctacaacatctagatcatttcaaaggtgttataatcatagttcatgtttaaaaaatgtaagaatcatgaagaatattaccaggaagttcaatgttggtgttagcaagagcttgaaggttgtcaaagttacgtagcataaatttttccctctcaattgtagggccaacatctgaaacttcaataatcgttgtggcagggagaaaacggaggagaaaaggatggtcagtgatcttgtagagtttcgtgcaacgtcccacttcaaacccactaacattgaagattatgccttcacgcaaaacttggcggaaatgtgaagcaagagctgctgggataaaagcatggattacggagcactattaatgaaacaaattaagtgttagttggccatcaattacatatgaaacaaaaaaaacattaaacatctaagatgatttactttttcatcaagtaacaggaggactatgcccatgaattggccatctttcttgatgttgcgagcatcccaaaaacgaagtaggcgaccaacaacctgttgagtagagcgaccaagacgtaaagcatcaaaagctacatagtttgctttagaaggaattgcaacaacatcaacttcagccattttcagagtgtgtaatattttctggtggaaattgataattgtgtttgggggtgatgggagatgatgattttatagtagtttaaaggaagatctataggaggtttttgcttttctccagttacagtttcgatttgagatattaaaagtatgaattaaattgcaagtagtggaattttgtaggaattaagccatgtatttaagtaccttttagtaaataactgttgatgtttgagcttctggggaagaaaaatacggaaagctccatggggcatgttggagatggattgcacccctcattttagctcggcccaaatcaagaataaactaatcaacatcaagcccaaaaagcccataaaagttggtccatgatcctatcaccagcttagtttttctataaatagagaggcatctcaaggaaaaaaggaggaaaaaatccatattaaaacgtcttcaagctcctcagctcgttctctagctcctctgctcgccctcaagctcctcagctcgtcctcaagctccttagctcgttctcaagctcctctgctcgtcctctagctcctctgctcgtcctcaagcttctcagctcgtcctcaagctcctcagctcgtcctcaagttccccagctcgtcctcaagctcctgagctcgtcctcaagctcctcagctcgtctttaagctctccagctcgtcttcaagctccacatcactcaacgaccatctcctcgcctagctataaaactaataaactatgtttatcgcaagaacgacctaactcccgaccttcaacgcgatgagaatgtttttcccttatcaaagaacttagaaatatactttgttgaaattcgtgcatcaacagggcagtgactgaaacactctttttctctttcgtcgtcctctgaattgcgtcgatcgaataggagaaaatgaaatcaagggtttgcaattttaactgggttttcttaggtcatttcggttcataggttttttgactaaatcttggcccgataaacatcactaagtctatttggttctttggctcatgggctttttgaccaaatcgtggccccataaacattactaaatctatttcacgcataaaaaaaaatgtgaaggcgagtaaaaacatgtgggctccacattaaaaagatgtagtgacgtggacacttttagaagagagaaaactctgctattatatatatgatttgtttattttccatcaatatacgaatatctctacttccttttttaaagactctttaaatcttaatcaatcgttcataatatatctccagttgcattcattatccttctaaatcctctcttattagtctttaatcataaataaaaaataatacatcaatgagagttctttccaccgtccgatcaaactctggtatattgacgtcagcaatcggacgtaaacatgtcgaagttaacttgctacgcgaaacagaggattaatctctcagccaataagagacctgagaagacgagaagaaaaaagaagactttggtccttggacttgggtctttctttctctttttctttcgataattattgtacttggttctttgttctcagtgtaaatgaaagtgagaatccaaaggctatcatcggaaactgagggaacagagatcattcatcgccgcggtaagttatctgtcatcgtatatctttaagccctctgtttcttcttgtttgagtagtgatcttagattcttcaaaaaatattgtttaggttgatatagagaaagatg

SEQ ID NO: 5555 - DNA, 3000 bp, Unknown
  misc_feature (1)..( 3000): cDNA_ID_1027367_gDNA_ID_1620801_Annot_ID_168658 3000 nt of promoter + ATG
ggcaatttttggatatagttttcttattattacatatcactatgtatcaggctttgaaaatgaaggcccattccatagttgtttccgacggtactttttttcaaaaaacggtacgtaatcgcatggcctttgtagcttacaaatacaattatcatatcactagacactagtttacctttgaatctcccaacgcctttcattgctaggatagttaaagctaattactaattagacttgttaacccgagttcttttatttggcttaattgcacatagccaaatttcggatcgtagccgttggatccagcaaaaacttaaaaaagtacccacatgcatgggaggaaaatccccatgaagaaatgaacggctgcgattggccaacgtgagatttgatgcaaacaaaaaaaaaatctcacgtgaatgaatattccacattgggatcttccattagattccatgagctcagatcaaacgacgcacacgttagcagaaaactctttttcttcgctaatttgctcccagcagacttgttgggacgatgaccgttgttgtgagttcccaaattattatcatttttaacttttctaacaaaaaacaataagaaacaaatgtttattttgttttcgttaccaaatctatacacaacaatgataatgtaaattgctttgtttatgtgacgcgtgaattgatgtggacctacttacctgacagacagtggtattcgtccacaaagggtattaacggcgtcaatattgccgttaattgcgctgcagaaataatttatccgtttcagtgacattacttaccagtgggcaccatcgagagaggtccaccggctacttgatgctgacgtggacaaaagtgtatacgtcagcactcacaggccattcacaaaagtagtcaaattcatgtaatgtatgatatgtatcattcatagttcatacaaagttactctttttttttttttttttttttttagtaagagtttggaggatctttttatttaatcacttaatcgggtctcttacatcaaagttttagttgggactgtgacaactaattgttaataatccctgataatcaagttaatatgtcggcttaagttaagagtaatatatagatatgatttatgcctaaatattaaacaagcaactgtacgagacattgctcagagaatcttatggaatgttgagacttgagacgctcttaagtcttaccaagagacaagaataagctcgtgaattttgattgaataacctaaatttttaatatgaatccattaatgatattttgtgcagtaattgtcctgacagactacagacaaaatttcatgatatttcaacgaaaaataaaagagtcttcatgctacgttaaatagtacgaaattgtaaaatcatgaatatatatgctttaaatacctccagttcaccgactcacttgttgtagcttttgcagggattaggtgttcatagttactttattaaagttgcattacattaagtcattaacgttacgagttacgactccgttttgtcaactggccggcacctatcgggcattcattgacacatctacgtggtgtcaaacgttacagcctaagtcctaaccactcgttcgatgatgctaccctcaccgcctcacgtgtcggagcaacgtttaaatctttgttggtgatgggtttcttctgcacgtgaatctagttttatcgcgggtcatttgtttagtaaaggcaaatccctgaattatgatttatgatcacttgatgacaataagatttgagaaatgtatcatcaaaatgtcacggcaaatggagcaggtaacggctacatcacttttattttcttttttaattttattttaatatttcctctacatataaagcttcgacacaacttgttgttgtttttcatactcaatgatttcactttttcttaaaatgtacccgtgtgtccccaactcaccatatctatccacacttgcatatgtaaataaatttcttcgatttagatatgtattttgatcagctaaaacaattttgttttatgattcttttataagaatacttcaattgataagattttttttttcttttttccttttacaatttcaaacggatttgaatcaatttttttaaaaatccctacatgaaatgttacaatgattgaaacttattttgttttaaagagcttgtaaacttatatctgtatagatagtagtttttttttctttttgtctgaaaagaaaaaagattgtagtgttagtgactctacctgtgactatttgtcgggacacatgtgtaagcagcaaagcaccctatgctttattgctactcttgtttttttctcccctgtctttaatatctttaagaaaaaaaaagatctgatcgtccaaatataaaaggaccccttttcccactaataaagatctgatccttagtagaaaaaaaaaaaaaagatctgatccttcaatgcggtaaattttgtagtatatgctaacaaaattgtaataaccttagctatcagtcgatatgccatggttttcttttaaaacatgtaaaatggaaaaagaatccaagtttaagatattccatcagtctaattgcaaattagtatatctttaaaacatgtaaaatagaataataatcctagtttaagattccatcagtctaattgcaaattagaatctcttgaaaaaaaagttacagcatagccttttgatcttttactggtccaatgcaataaataaataaaagtaattatggaaaaaacaaactgacatatttatgaagattaaaagtataaaccaaccatagccagaagtactctgcctcatattcatactcatactatttctttcactatcctctctctctctctctctctctttcaatacagctccaaaactcgtcctcaagacgctatttatccatttaagtctcttctcttttcgtcctcataatactcttatacacagaaacgtttttcattcataacaaaaaatg

SEQ ID NO: 5556 - DNA, 3000 bp, Unknown
  misc_feature (1)..( 3000): cDNA_ID_3593429_gDNA_ID_1620801_Annot_ID_168656 3000 nt of promoter + ATG
ctaaaattaatagaagatgtgtgtatattttacaagaaaaatatgccaaattggtctaatcaaaagcaaggaagtggtggtggccaatgtcactccactccactaatttcattaagaataagttgaaaatcttatttctatatttaatttaatcagcaaaaaaattagtatcattatccaaacctttcattattgcttgccacaactgctaattttttttttttgttgtctgaattttattaaaaacccaaggtagaataccatttgaaatacaaacgccggcagaccaactaaatgtctccaaaaactaagcccaaaagaggaaaactaagcctcaacggaacggagaaactatttagaccaacgaagaaaacaaaagacaaatatctaaaaaagatcaaccgttaagggaaaacgaagatctaagcactaaaattgcgcaaaagaaccaggaaccctcacaaagcttccccaaagaaacggaaaacgtcggaaacaccaataagatcggaaagaactcacatcgaagtcaaaccactagcaatccgacagggaggaaagcaagaagccaccagagcgagagacacaactactaatcaaataagcaattattatgacattatatattgaatttctgatatttatgtttgtcttataactatgttaatatctcacacgtactgacagaacaagcagccttactttagaaagtttagaagaagacagaaacaggataatcccaaacattgtgttgggttgcttgaattattagccgacaagttgagttctaaccacttcattcataaataaagaagtcagctgatgaagattatacaacaatctttgtcataaactacgtaaagataatgaagtagctagtcctgtatatattatcttatgtttcctggtactagttctggtgcgactgctaaaatctaaattgtcgtctttagattaacatttgttttttttttctctctatgaaagtactaaattttcataggataagccattcaaaatatcaattacagtgactattgagtattgactaatattatttgaactcacaactcacctacatgtattaatgtttgcattattttagtgattgctaaaacacataagtgtcacatgacatatatatcattgtttaggctaaacatattatatatatggtctatattatagatatcgatccaagtctattagccaatccaacactaaaacaatcctcttgtaaatgagtagctcatgacgacattattctgtttcattttggaagcattagcatcatttccacacacacgtgttgacctaaaaaggcctatatttgttctatttataaagccttaaattaaagactcaagcaatatcacatggatctaatatataatcatatgttgcatagaaaaaaagaacaaaaaagaaatagagagaggtggttgaatgatttaggctttacatcaaacccactgtttcaataattttgttaggtgtgtgtgtgtatgtgtgaatacagctagagagtttcacgaagaagctggttggtcaaaacttttgactcgaaaggaattgctgacaaatcgatcaatcaatttgcttcagagagaaaaaaaaaacacataaacacaattgacatctctctatctatacggtccgatactagacttggcgaaccaaactaaagatacagtaggacactgtgactgtctaggaccaccagagatattcagtgaagtttctatagtcatcataagtcaatcttgctgactacatcatactaataggaactatagtcgtaaggaacatatataccacattaagcttgtttcttttgattaactcctcaagttgttttcaaaatactcgacgaactagactgaatcagcaataagaccaaacatgtaaaataaacgttgcagaagttaatgctcattagttttctcttttgtaagaacatacaaacacacaggtgacaagttttggccaagaattacaaaataatatgataccttcatagtcatacctcagaattaatgtcctagtcgagaagcagaagtttgtttttatagatctttcttttcattagagaaatgggtatcggcccaataacataggccaacccatttgcatttattttctcatatccagtaaggatatactttcaaatttttgtataaatgggattttgatttttctttaatatgttgaacgaatttagtaaactattcacattattttatgttcagaactatactgtaaaataactaacggtcaacaataattgagagaatttggaagttttcgttagactcacatcaataatgtgactcaaagctaataattgcaatttccgacaaatttgtggcatgggcgtttatgctgtcttctactcttcttgtatgacaacgcacatacccgagcttcgtaaattttatttctatttttttcaagtatattttgtttttaaaatgcgattttagaaagaatttgtgtgatcagaattcacggtgtaataatagtttgtatgcatactgttgtttgatgtgtcataatccaaatttagataatatgtttatgtataatgttagaaataaaaatgtagtagaaatttacgtatattttcactgataatagaaattttcaaatatccttaaactgtcaatatccaatttctttatgtttaaaatatttcaacagctaattttcaaccgctatttattttatttaaatttatcttgtcattatatttcgttattgataaatatctgaaaaagtgggtgacaaaaaaattaccgattcaaattattgtaataaaattgacaaatcaaaagattgaaatagaaaacaaaaatggactacatttctcaaaatggcaaataatttttattcatatttatcaacctcgaaatgacctacatatatagagacacaaagatcacaacaaaatcaaccattcctttccttatcttcttcctcttttgcttttctaatctctca

SEQ ID NO: 5557 - DNA, 3000 bp, Unknown
  misc_feature (1)..( 3000): cDNA_ID_1828853_gDNA_ID_1620803_Annot_ID_50505 3000 nt of promoter + ATG
atatcctttaataaagatgaataagagtaaccttatcagaatgcatggcagtagttgcagtgcccttgtgacgcggtactgcattctttgtcgagggagctgattctggacaattaggtaagaaattaacgaactccataagcagatcttcatgacccttgaataacatagtaacctacaccaacagatgatatcagagaaatacactaaaaactgtgactctaacaaataaaatgtgaagcagaaaatcagaagaattaacactctgtgcagtaataaaaaaacatacctcttcgtagacctcagagatggactttttctcctttctatacaagttcaagatgtctagaaaccgtttatacgcatgttcatcatctccaaacctcgtctgcaaaagtagaaaccccagtaaaccttaactgatataaatcatcattaccttagtatgccatttagtaccatattacatccataccttaatcttggtgacgaaaccgatagcgtctttgaaatccacccggatcttaggcttctcttcctctggcagaagggttattttataccctttgggcaagaaagtattaaaacccaaaagtaggtccctgtaacccttgaacaacactttaatcctttctatgacaccattagtgtcgattctgcaaccaagataagacaccatgagtatacgcagttcacaatgtgacatccacaatacaacacataagaaaggcaaaatgaaactaaacaagaagagaagcgaagtaaaaatacgtctgagctttgaactccttcatgagctccaggaatgactcatatttctctttattgtcgtgaaaaatatccttcacagctttgagatacgttagggcatcgatggttcgaggtagcttgtttctgcatagcacaaacacatgtaactttcaaatactcttacacatttcaattgcatcaaactacattgaagaatataacttgtggactaccgaacaaatgtaaaattgaaaagaacaaacaataaaaaattgggtttatcgagtaagagagttacgtttctcctcgagacgaaacttcaggctttcgcttttgagtgtcagtgtgaacatcttctctagctctcttcatcttcagtcttcttccactttctcccgcagactgatttctggaagaacaaaaaaaagaggcttttaagaagccaaaccaaactaagaaccgtggaaatagtccaagccaagagaaatagctcggaatcgttgtcccaagtaatagatctctcatcggaaaatcttaagagaaatcacaaaaaacgaggaaaaattctgagcaagagattttgatttaaaacctttgtagaccggatcacgttactcaaacggtgaagagagcttcttcgttcctttgttagaagatgaaactcggaaagaagtcggaggatcggtggaaacgttggccgccggagttttaaagtagagagatttagacggaaacttggcaaaatgaaaagcaaaagaagcttccttttggtagaaaatagatgattcaatggtgagattgcttctgattaggagcaatctctctgtctctctatgtgtctccctctctcgctgattttggaagcggaggagggaagagggtaaggcaacggaacgaggaagaagaagaaaaagagaggagcttgttttgcttatatacccaaagaaatcttcatgtctgtatgtaatcagaaccttcggagctaaatggaaggttacgtacgaaattggtttatttttcaattccaaatcaaacttaccggtttaatattatgtaaatcaaaaaccaagtaaaaagcagagttagggttttttttctttcaactttcattacctatgcgtaagtgaggatttgatttaaggttataaaaacgaaacataatattccagtctattcaaactaaatctggtttattaatattcgtttgtagtaagtaaagtataatatcctaattttacctaaaaagctcggtcacattttcttacaagtgggaagaatatgcaagggaaaaatgtttggtctatgaattttcatactgtgttagatgataaactttaattaggtttgatttgcatcaatttaatagcaaaattaatggttcaaaatgttttctaaatataaatatgtattgtcagagctatcatcaatgggcgtttggtctagtggtatgattctcgcttagggtgcgagaggtcccgagttcaattctcggaacgccccttcttttatttttgttaccatgggccgctctaccagattctccaggcccatttgttcgacgaggaacttgcctcatagtcgacgatcatgtcaacattaaaaacttaaaagcaaatttgtcaaatctaaaacataatatgaaaacattagttgactaattataattaccggatgagaggaggagatgatttgtccatatatacttatcgtttagacaagttcaaatgacaatagctctgctccaactacccacgtgtaacggttcacaattcaaatccgatccggtttggtctcaattctctcttttttttttcatttttttttttgataatttgaccgaaaacaactagaattaagttgaaaacaccaacgaatttaacagaagaaaaaacaactaaaactcaaaattttattttgaaccaaagaaaaaaaacaatcataagttttataacaattggcgagactaataaaattaacacaaaaccgaaccttaaccgggtcataaaacatttatactttgtctatttggacacgacccacttttagtctttaaaaaaaaaaaacgaatatccattttttctcagccaggtgagagagagagacatcgaactatcgaagaccagagaagctaggaggatttgatctctccgattcggatatcttagctctggccgatagattctccggcgattcatcttctttatccgccgtaattttcgtatataggatcggtggtggcttttcaagatg

SEQ ID NO: 5558 - DNA, 3000 bp, Unknown
  misc_feature (1)..( 3000): cDNA_ID_1828849_gDNA_ID_1620803_Annot_ID_50506 3000 nt of promoter + ATG
catacatagttcaaagagctgaacaataagatgtcataaaaaattccaaacgtttgtgctctttgtaattgtatcttaagtagagacaagacactgagacccaggaaggactcataactcttccaactaagtccacactaaggcctttagcagagaacaagaaggttacctcctgtatccgatccaagcttcggatattatcaagagtatccagagaaggtgaaagccctccatgcaaacagaaaacctacaaaatttgatgaagtcaaaaagctgtacttagaaaaagatgtatcaaacaccaactgagaaagaacagctctaacctgactctctatgagggcggtaagaggaagataatcgaaaaggtctgtaaaatacttccagacgttagcatttccgtacttcctcaagcattcgtcataaaaaccatagctgaaacagagaagcaaaacatgcatcaaaacaggatagtactttgctgatcagccagaaaccaatgaagaaaagtacgattcgctcaaatataagcttatttcaaaacaaaagcttacacttgagtaatctgccgactctcgtgattccctcgtaagattgtaagtctatccctgtatcgcacttttagtgccaccaatagagaaactgtctctactgaatagtagccacgatctgcaaagaacaaagcaagacaatgagaaaccaacaacactccttttaaactaaatctagctgtcaccatcttatggtacaccaacgaatggttaaagttccaaggatctaaagactagaattcaagggaagtgcaataatgaaagtgagcatcaacaagtctctatattgggaagtttcagtacctaccattccaaaaaaaaacagaacccacaagtaactcactctagataaataaaaaggtggatacttttccaagaattcaccattttggaatgatccaaaaacacagatctaaaatgagaaaaaaaagtaaaaaccccaaaaataaaatcgaaagaagaagaaagacagacctacatagtctcccatgaagaggtagttagtatcaggagcgttgccaccgatacgaaagagctcaataaggtcataaaactggccgtgaatatcgccgcaaacggtaacaggacacttcaccggctgaacattatattcctcgacaaggatcgctctcgcttgatcgcaaagcgtcctcacatccgcctccgataacggtttacactccatcagctgctcgatctgacggtccagatctccgttcgacggcatcttgaaaagccaccaccgatcctatatacgaaaattacggcggataaagaagatgaatcgccggagaatctatcggccagagctaagatatccgaatcggagagatcaaatcctcctagcttctctggtcttcgatagttcgatgtctctctctctcacctggctgagaaaaaatggatattcgttttttttttttaaagactaaaagtgggtcgtgtccaaatagacaaagtataaatgttttatgacccggttaaggttcggttttgtgttaattttattagtctcgccaattgttataaaacttatgattgttttttttctttggttcaaaataaaattttgagttttagttgttttttcttctgttaaattcgttggtgttttcaacttaattctagttgttttcggtcaaattatcaaaaaaaaaaatgaaaaaaaaaagagagaattgagaccaaaccggatcggatttgaattgtgaaccgttacacgtgggtagttggagcagagctattgtcatttgaacttgtctaaacgataagtatatatggacaaatcatctcctcctctcatccggtaattataattagtcaactaatgttttcatattatgttttagatttgacaaatttgcttttaagtttttaatgttgacatgatcgtcgactatgaggcaagttcctcgtcgaacaaatgggcctggagaatctggtagagcggcccatggtaacaaaaataaaagaaggggcgttccgagaattgaactcgggacctctcgcaccctaagcgagaatcataccactagaccaaacgcccattgatgatagctctgacaatacatatttatatttagaaaacattttgaaccattaattttgctattaaattgatgcaaatcaaacctaattaaagtttatcatctaacacagtatgaaaattcatagaccaaacatttttcccttgcatattcttcccacttgtaagaaaatgtgaccgagctttttaggtaaaattaggatattatactttacttactacaaacgaatattaataaaccagatttagtttgaatagactggaatattatgtttcgtttttataaccttaaatcaaatcctcacttacgcataggtaatgaaagttgaaagaaaaaaaaccctaactctgctttttacttggtttttgatttacataatattaaaccggtaagtttgatttggaattgaaaaataaaccaatttcgtacgtaaccttccatttagctccgaaggttctgattacatacagacatgaagatttctttgggtatataagcaaaacaagctcctctctttttcttcttcttcctcgttccgttgccttaccctcttccctcctccgcttccaaaatcagcgagagagggagacacatagagagacagagagattgctcctaatcagaagcaatctcaccattgaatcatctattttctaccaaaaggaagcttcttttgcttttcattttgccaagtttccgtctaaatctctctactttaaaactccggcggccaacgtttccaccgatcctccgacttctttccgagtttcatcttctaacaaaggaacgaagaagctctcttcaccgtttgagtaacgtgatccggtctacaaaggttttaaatcaaaatctcttgctcagaatttttcctcgttttttgtgatttctcttaagattttccg

SEQ ID NO: 5559 - DNA, 3000 bp, Unknown
  misc_feature (1)..( 3000): cDNA_ID_1828833_gDNA_ID_1620803_Annot_ID_50511 3000 nt of promoter + ATG
agaaaattctcgatcatcatcgtcatccgatacaaaataaagtcaggtagaggatcgagcatttataaattatggaataacaataaatcgtactatggaagcaaatcattttcttgttccttagtttgctgaccgtacatatactagttgacaaggttaatccataaatctctttgtatcattgtgtgctgtgtttttttttttttttttttaatactgtgtgccgtgttggtgcatttgcgtaattgatggaggcaacattttgaacataatcactttcttgttgcttaattagtgtatatggccatgggtacgttcttcctattggtacatatgcatgtatttatattacaaggtgagtattcgttacaagttgtgtacatatgttcttacacgtgcaattcgtacacgcctcaatttgatttatagtcaaatttcaaaaaatttgttagaaatttcatctcaaaagttataatatgatctaacgtgagactaaaaaacatatgtgaatttgaatgatataaacttgatgtttttttttaataacctatatacttattgtaggtacaatccaacgattttatgaatgttgtattttttttgtatacactgtaaagacgattttatgtcatggctattaatataagaatatacattttaaaaataagattttaaactgatgtctcttaccaatctcaagacgagtacttgtgattcttcggagacaatgagaagagtttgtaaattctgaatactccttaaacgaacagaataagtgaatttagtggtggatataactagcttgactttagatcttattctttcaaatagatttggtgtaagattgattcgacatttcccattaaatctccaaacaaatatgtgcatcaattcgtaactgtacagctttaaaaatacatataataaatggagtcggcaggtttgtatattaaattaatttgcgtgattggaatgataagcttaagatccatcatccagtgttggaggtccctttaatttttgtctacacatgtcacttccgacaccaacggaactccatttgcttatgtgtgtattggatgcttatcccatttaattaaaaaaaaaaatgtttttaaaaggtattattcctttattgtccaattcgtatgtttcctaattttggtaaatatgtttttgttaagtttgaaacatcgttccttgcattacgtatgagtaaatcatacacgagcgtatgaccgagttggaatttacgtaatgacagataaatttgtacatttacgacatataaaaatatgaaatcaacctacatatctcttttttcctttactattctgaaaattctaggtttttgacggaagaagtgaaggctataatcacagaatggaggactctgtcacgcattgtgttctagtatgccatatttaacacttgtcaatatggcttcgaaaaccgataattttccctaactaaaaataaaataaatctaagtggccacctaaatgtgtttagttattatcatacatgcatgcaacattttatcatggcatgtgaaatgtaatcataatggaggatagactgcttactacttaaaacaataaaccactaattatcagttttgaaatgatttatttttgtttaaagaagagataatgttatataatgttgtgggagacaaagatagatccaagccaggtaaggttagcttgttgatctaaattgattaaagcatttgttgaacaagacttcgccatctgtaccacccattcttctttcaattatggattataatttagtaaatatcatatatatgcctccattataacttttattattgacattattgctttcttaaaagcaagtttatttatcaaaaactattgattggtcattgtgaaacgttatatttgaccgtcaataaaactatacataacgcaatacatacattattatatcaggtaaagactaagttatattagtatcttataaaatgacaataacatgttctacgtaaaaaaaaaggacaaggattatcggttactttaatagtttgaatgattcttgatctaataattaaaacattggcgttagatgtaagtttttgaaatttaaattgattttaaatgaatcagttgatctagacaattaatttggtagaacaccgatcagagacccttcttccagaaactgtgattataaaacgtgtactaagagacaagtaaaaatcttcgtttttcttaatttaatgcatagttggctatttgcgtgcatcattatttgcacaatagtaaatattcgattcacgtcgtgtgcaggaacccattcttttatcacttccagtaacttatgacgttttaggatatgaaacatatttcaccgttgatcttgttttcttgttgttgtttaatatcattcaccgttgatcttgttattgagtttttctttgcttttcaattcggttttatgtaaccgctaaaaattaatggagaagaaacccgtcttatacctacaaaccgggaaatgtgaagaagaaacaaaccggtcggttattgaattttagggttttaaggttttgaccgatggttgacttagggcgcgcttctctgctttggtacacacacacacacatcaagctgcttcttttacctctcttctcgcttcactcaccatcctcaggttcgttctctgtcacaaacattacttccgacgaaagaattaattttacagttaggaattgtaatcagtgcgagtaagtacaggaatcgaagccggttttgtgtttcttttgcttgatttttctccgtttattctcaactttgagacttttgcttcattggttaccctataaagcttgaaactttattcgaattgagatgttccattagatattttcaaacaagttcctgcctttttactctacattaagctaaaacctgtgtttgattgaatttttgatttcggcttaattaaggttaggcaaaaccaataactggtgtgaga

SEQ ID NO: 5560 - DNA, 3000 bp, Unknown
  misc_feature (1)..( 3000): cDNA_ID_3100778_gDNA_ID_1620803_Annot_ID_50512 3000 nt of promoter + ATG
tggcacacgatatacatcgaaagagacatgaggaaagtttgtacccgtaaagacttgttaccctcaagccctttagctaaagcattggcacccaaagcaccaccgtaatttccactgaaacagattatccataaatcggtatgtcagggatatgaactatacagacaaaataaaaaaagcacgcccaaaagatatatccatctatagtcctaaactcacttgagatgtaaattgcgtattgtattattctcaagaagagctccagcaagacttgtgaatccctacctccatttcaaaaaaagaagggaagaagacgcaacagatttaattcataaacttggtatgtcaatctgaaatataactgtacaacacatgaacagaaaaaacttacagaatagtcaatcatgttattattcagctcaataatcctcaaggtcgaatttctcttcaacaattctgcgatttcctttgcaccctgcgcaagaacattggaactacttaacgtatgaaaacaatttgaaggattgtgactaacttaggagcttgaaaagcatgtaaatcaaagcatctgctcaaacaaacctcatctcctatatcagtactgttcagctgaagtatctcaatgctagaattttccatcagtgtagcgcataaagtctgccataaccagaaaaaatgaagcgaaaccattctcagccagaaacgtatacatagagaataagttccatgtgattttagagctaaagatataagcagaaatcgatatgatctcttctcttgatggaactgaggaatttctaccattggacacccggaagttaaatttaaaactagtatatcatatttccactaaccttagctccttcatcaccgatagggtttccagaaagattaagaatttttaacataatatttgattgaagaacaccatcaaaggctttaactcctgcagctgtaattccatttgcagaaaaactgacttcctctacagtctgaaacacaaacatgggtatggttagtcaatcaacataagaatatcaggactctaatgagttggtagatagcagatgtgaaagaaggagagaactataacctgattatacccaaggctttcagcaagaaagaataatccttcatctccaaagttgcatcctgcaagataaaatatacaggtgagctatatttgcgtatattaagacaaaaggaagatggcactacagatcacatttaattctaatgtaaatcagtaataagtaatgtcataacagttaaaatcattcaatgcacctgacatgtcaacacttctgaaggacctaagttcttttgcaaattcattaagcctctgcttggcctctctatcaaccttagcagcaaatccttgtaacaaattagtaccggccccgatcgaccatttcactccctgtgtagaagagttgttttctccagcagaagtctttggagacttaggcgacatgaacttcccaaccactttccacaaaactgtcagctgaaaacacaaattagtatagaagatttgagagaaaagacgaaacttttatcattactattctcgtatagatagcaatcaccgaattacatgacaagcaaactaatttccgctctattacttccacatgaaagaagaaaacacagtaatactagtccaagttttgagaagtgacggataaacaaaactagctctcctagcaatgctcgtaccgaaagtgacgacagcaaatgatcccaagggcaagacggaagacgcaatctgctgcactttagcattaggaaaaccactagccgcttgtgactccttataaaccctactacgcttcgagcctccatctgagttatacgccgctttgatcgccggaagtctcggacttcggtgatgaatcaccacaggagaaacaaacaatcggttcctagaaacggagctacccaacaattcgtaccggaacccactcttccattggcccaacccagaagaagccttcaaaattcacagagaaagaaaccgaatttagaagctacaagaattgggaaaaaaaaacaaaggatgaacagtagaattaccttggggagagagtggagattgagggagctggtggaagaagaagccattaaggagctgcttaattacgcatagacgcttgaaactctcgctgtgtgaaaaccaaccactgaagaattaggaaagtgtaagagactaaaagagacgaattggagtagaagagaagagacgatgatgaagatgaagtttgtttccttcgcgctatgtgtgtgtgtattcctttaggtacgggtgtgacccgactatccaccgggtcgaaatcgggtttaaatttatgacccgatagattcgaaagagaacgactttattagggttcataacaaaaataatcaatcacctacctgaaaacaaataacatgtggacttaaaaaattgttatgcaaaaagatttgtttttttcattggtcttcttctactacacgcatttgaatcagcagagagattaattcctcagctcggcgattcaattctcagaagattatggctttcgctactggaatcacgacgtcttcaaatccaacttttcttggtctaaagatctccaacacaagtctacgttctgtggtttcatgtaattcgatttcgtttccttctttgtcatatgtgaatctcaacctcaatcggagaaaccgcctttctgttcgatccgcttcggttccaggttcgaattgattcacaaaattgctctgctttattttcctatgagagtcctttttattttttctgggttgtttttgttgttattgccattctggttttaaaattagaaactttctattgaaattgataactttcgttggtgatgtctgagaattcttaaaaagatggtaatagctgttacttagatatgtgtagtgaggttctgctcttgaattcaaaaagtgtagtgacttgtgctcttgaatatctcagctgcacctgcaatg

SEQ ID NO: 5561 - DNA, 3000 bp, Unknown
  misc_feature (1)..( 3000): cDNA_ID_1828829_gDNA_ID_1620803_Annot_ID_50513 3000 nt of promoter + ATG
atctcgttgacttcaatctggttagattcactctctgagagtcacttattttagggaaatatgtactatagtcagatatgtaatctgcttaaataactacacaatcataagattctggtacagactcagacaaataatactaaccgcatgttcaagcttgatactctgtcttttcgtttggtttggtaactatttttactttgttatcttttcaaaggtttatgacatctgcaaaactctagctcatcattattttcaagagaagctcccagtctcgctgtcgtatgttcaagcttctgtactcctgtgtttgggcttgcaggagtcagatttctcgagcatcgaggtataacatatctactctttaaaataaatcgatgatctggaccagctgaattatgtttcaccacacatgtggagataaatttcttgacacatctggttgttctaaattggatcatgacgttgacttacagagacaaatgcagttggagaggggccaaatatactctcttctattgaaggttggaaagaagttatacaaatatttgaatggaatcgcaacaaaagagctcgaatccaccttacctcggttgaaagatgtaagttcagatgggaaaacttacataacatttccatgttcttttgctcagtcataatattccctcatttttgaaaattaacaaccctaagccctaaatacatacacgaatatcgagctgactgaaatgattcatggttgcttttggttgcagagagtgcttgaacctcacaaagtatcagtagacgaagatctcagggagggagcaaaagaagttgaggtaatcgcttctgtttccgtgcatgcgtatattttgttttggtttccatgtaaaatcgaaacaccactcacactctcaatgcttgggtttaaaggaacaaatgagggcaaggatagaagaattgttggaccctgagctacttgaccaatttgctattggggacaaagaagctgaggctttgcaaaagtcgaagatctcttcaagtggtcttatcagtatagagtccaccaaaactgataacaagaaagagaagccaagtggttttgataaatcagccaaaaagagaggcaatgataagcattcctccacatccaacaaaaagagaagagcctgagatggaggttgatgtcaacaattgtttttttgtaacagtgaccagaaaattttgatctttggtctttttacgaatttttgtaaccaggttgaataatttattaaaattatggtttgatcatacaatttttttaaaaaaacttacagattctgtttgagcattctacaaccataatacaaagttttctattaactataactatattgtttatctactgcaatgtgtgaaactggttcacatctcggcagcaaaagacttcccacatccacaggtttgtgtagcgttagggttcgagaaagagaagcctccaccaatcaaagcatcgctgtaatcaagctgcattccaaaaagaaagagcatgctctttggatcacaaactgcaaaagaagtgagtacaaattaaaaacctgagccttcaattcacagatgtaaaaatactttactgcagaagacaacaagagactgcaaaagacaacaagagactagaagtctcagttcaagaatcggcagctaagtagtatataattcaagctgcacatcaaaaagaatcaactgaccatctacttgacaataaaactttagcctatttgatcgaacaatctcagccttttttttatttggatgcatacttgaacacagaaactgacattcatattgtaagtatggcaagtctacatcatcaagaaactagctgatcttactctcagaccttattatctcagattagaagagttgatcctacatagtgatggaatagtttttacctatagtgaatccctggtattcgatagtggaatcatctggtcttgcatttgctctgttttcaaagtccatcgtgtaggacatacccgagcatcctccttgtttgactccaattctcaagcacaaatcttccccacgttctgatctcatcttactcagatgcttaagtgcattttctgacagagatatcgccggcttcagtccctccattgcaggtgcagctgagatattcaagagcacaagtcactacactttttgaattcaagagcagaacctcactacacatatctaagtaacagctattaccatctttttaagaattctcagacatcaccaacgaaagttatcaatttcaatagaaagtttctaattttaaaaccagaatggcaataacaacaaaaacaacccagaaaaaataaaaaggactctcataggaaaataaagcagagcaattttgtgaatcaattcgaacctggaaccgaagcggatcgaacagaaaggcggtttctccgattgaggttgagattcacatatgacaaagaaggaaacgaaatcgaattacatgaaaccacagaacgtagacttgtgttggagatctttagaccaagaaaagttggatttgaagacgtcgtgattccagtagcgaaagccataatcttctgagaattgaatcgccgagctgaggaattaatctctctgctgattcaaatgcgtgtagtagaagaagaccaatgaaaaaaacaaatctttttgcataacaattttttaagtccacatgttatttgttttcaggtaggtgattgattatttttgttatgaaccctaataaagtcgttctctttcgaatctatcgggtcataaatttaaacccgatttcgacccggtggatagtcgggtcacacccgtacctaaaggaatacacacacacatagcgcgaaggaaacaaacttcatcttcatcatcgtctcttctcttctactccaattcgtctcttttagtctcttacactttcctaattcttcagtggttggttttcacacagcgagagtttcaagcgtctatgcgtaattaagcagctcctta

SEQ ID NO: 5562 - DNA, 3000 bp, Unknown
  misc_feature (1)..( 3000): cDNA_ID_3077660_gDNA_ID_1620803_Annot_ID_168744 3000 nt of promoter + ATG
ataactctagaactcagatattaatactcaccgtagatccgtgacctcaacacgtgtcatgtttctgaaacatcttcattaaaactacccttatatttttttatatatttaagattgaccttataactttgactaatactgattacaccctctattctccgaatcggttatcaaaaccaatttcactggaccgtgatatcagaaaccggttcactgaggtgggcgagattttttgttgtcactctcctctcctcgttcttcgatgctcatccattagaggaggagccgatgtttctgcttccatggtaacgctctcgtctccatctccctcgctctcttgcgtagagaacgtgacatgtaaatcttctcacgtttctcgggttctaatctccggtaccgataatattaatcacggtgaatcgtcggaagccaaaatactgagagatgttcatatcgtaagaactttgagatttttctttgaatctcagttctctgtgatttggtacgttcaattacggatatctaatttgagttaatcgttgttgtgtttgtgcttcttagtcagaaaggttattggaggatttcactgagcttgcaagagagaacactgagaaggacctcgagacttgtgggactctcgctgcctttcttgtaagattgttttgctttcttcgcattcaagttgattactttgggtgataagagaatctgggtggtgagaaaatcaaggaaaatgttagaaagtttcagactttattgttcctaattacaacttctaacagagatctttgcaaatttgaatttttagtgaaactcgatctatgctattgtttaaagtttacaccttgttttgacttttgtggtcatgattcatggttgttttgcttctgttccagggttcttcgtttttcgagtttcatgaacctgatggtaattacatttctatttctgttcatgctgtaggaaagaggaattttttatgtaaccactctgataatacctaagcaagaatcaacttctaattctgtgagttatcttagaaagattatctcgatcattttgtggtattcaaaatgaggtgcttactcaggtgctaaaattggcagtgtcaggctatgaatgaagtggaagtgttttccattcaaaacgaaagagaactctatcccgtaggatggattcatgtatatctctctcttctagctccctccatgtttagtgatctgtttatctactttgtcttgacttactataacgaggttatgcatattttccagactcatccttctcagggttgtttcatgtcatctgtagatctgcatacacattattcgtatcaggtacatctctgctgtttccaaattgcatatatactaggtttgagacaattctgatctcagtttcccatcatgtcattcttaggtaatggtgccagaggcttttgcaatcgtcgtagctccaactgatagctctaagtatgttcttccaaagctatggagtcaattatacagtcaacatatttccttgatagactctcaaactgatctttttggcaggagttacgggatatttaagctaacggaccctggaggaatggaggtactgagaggctgctcagagactggattccacccgcacaaagaaccagaagatgggaacccagtttatgagcattgctcaaacgtctacaagaactcgaaccttaggttcgagatttttgatctacgttaaggtaacgacttctgtggacttatcagtaaaaaggttcaaactttatccactgtgggctaaggatgtcaataataaccgtcatcataaccaccaccctaaccagaactgtatacttggtctgagaaggctgtctgattcgggttatgaacacaaggtaccttctattaagcttagcaatgttaataaattgtcatgtccttagatttggatcaattggttccattatggaagaacaacaatgaccatagacataagacattgtattggcgtatgcaattgttatatatctgtacaaatgtatacattggcatctatttctccatataacactacattaatattatcaccatatttcgccattttatacctcttaacttgccagtgatgactgatgaaaatggttgagcttttaaaaaggacgggaaaattttaaacttgagctttgacttgttaaaaaattattcattttgacagttttcgtctgattcaagtttcattcttttcatttctcatttgattgattaattagatacaaaatagccataaattagctgtaataataatttaaaaggtatctttgagctcttttttggtaaagacatattccaaatacctctcttcacatgaaacaagagtacaaaccccaaaaacagaaccaaaggtccaaacttttcttttgaaagtaataaagctatcaaagctctttccttgttaaagtaaatagtacagaggatgggttttatcagaaaaaaaaaagctagctcatttcatattgttgagtgttgctatcaaaacccatacagatacagtactttgttttgcttcaaatccctttatggccgttttcaagcacatgatagctttcttcgtacagtcaagagtaaaacctctctttttcttaccctatcttctctctctacagatgtcacagtcacctctgtcacggatttgggtacagagactcgcagacgattcactcttctttctttctctctctctgggttttaattcaaaaagtgaagttggttaccattgtcttgtacgatcgtatattcccgatatgatttgttttgacagagcaactgctttgtatatatatgccaaatatctctctctctctccctctctccttgcatcaatttataagtaagaccaaaagagatcaccaaaactcaggcttcttgtttggcttttcttattgttgattgagagagtgagagtaagagagagagagagagagagagagtgagagagagagagagagagagtgag

SEQ ID NO: 5563 - DNA, 3000 bp, Unknown
  misc_feature (1)..( 3000): cDNA_ID_3077668_gDNA_ID_1620803_Annot_ID_168742 3000 nt of promoter + ATG
gctgcttgttgttgtcaaggcacacatgtttattctttatttttgtcaaatatttgaatcaagatcagctactattctaagaaactggctatttctaaaataacactcacgaattagccattatttataaaatggtaacggtatattcgagattccagtccatacatgttattaataaagaaagattggatctccatataaaaaatagctgtctcttacattgtagcactagctaaagatctttcaatactacgtacctagtcatacaattctttgaatatggttttaaattgtatgtgaatattattaagtgagaatagtatcgacataacaagtatgaaatcttttatttctatatattttatttaacaacctataacaaacatttcacttcaaattctcactatatgtagtccatcatcaactactttcttttcgcatatctttgaagtttttggttttactaaactaactctatcataaaaggagaaagctttaaatttaaccagaaatgaagatgcccgtggttgtacaattcttcataatctctcttctcctcacatcttcattttatgtactttcaagcgctgattcatgtaagtgtatacttaatctagttagttattttttaggttatttatcattttgaaactagttgtctgaaattctaagatttgatttgtgatggtgataaatgaattagcagcatgcggtggaaagtgcagtgtgagatgctcaaaggcagatcgaacacatgaggagtgccttgaggactgcgatatatgttgccagaagtgtaattgtgttccttcggggacttatggaaacaaagatgaatgtccttgctaccgtgatatgaaaaactccaaaggcggatccaagtgtccttgaacattctttgaagatcctcatcacatacatactatctacgtactatatgtatggaaattacatctatatatgtttgatgtatgaaataagttctgtgagcttaatgaaaattttgttatcttcaatccgattcctaaacacatcaagaataaatcatgtcgaggtttatatttctcagcttcaatttcactaaacgaataacttgggatactatgatggaatgcagaattgagaatttactctctcaattgtcttaaattcataatccaagatctacaaggggtaagtattaggactaaccgattaagggtttaataattatgtaattcagagactctaacgctttgcatcgaccaaatactacattgtaacataacacaaactcattggatgtgaaagtacaaagtagtatgtctttataataatttgtttccaaggaaaaaagacgagaacaaaaactaaaacaagagaaagatcatcccatgatatttaaatagagaatcaatctacaaaaagacggcaacctgattttcaaaacaagaacagtagatcagaggcaagccggatagtacataaaaaagactcaaacccaaaccaaagaggctttctccaactagaacgtaagtctttttttgagtcgctctgttttcgtttgtggaggaaccatatcaagtttcgacgctcacaagctcatactcgatcagcgaaagattgttatcatccttcacggtgatgtctgtgggctcctctgcaacttcaacacgtccccatctatcaactgcaagcctcatagaacccttgtacatgtcgatcttcgcattacgcagagtcactacactgccttctttcatcatatccactggataaaaatgaataatagcatcagtcataaatctataaaaagtacatgagaaatactcaaattatgcaaacaactaactatttccataaagcaatccactctcctgctattatctgtttcacagattcacaaccagtatagactataaagatgccaacttagaacagaaacttgccattaaagaagctaactgagaagagaagcagtctcttaaaagaccatcacaaaagcatttattctctcaccttggtcatttcttgcagtaaagattatgattccagtctcatcaccaactaagcattcggcaatccgcatctgacgtgactgaggacccatgggacgacctcctcctctctgcatcaccatcttcgtgttgacaactttcacattcagagagtggccattggttcctggtctcaactcattaacctttgtgaacacaggcttcctcaaagcagacgttgcctcagccatttttataacaaccctacaaaaattagccataaacaacaacatctgctgtgatcagcacctaacaacaatttcaatatctgattagacaatcaaaacctcaaatgcgatcaaacaggtttaagctatcctcatttctcacataagaaacgttttaacaattcaacaaaacaatttcattctccatacacaacaaattcaataaaacgcagcaacatagataatgaaagctaaattacacaaaagatcatatactttgatcccagaaattcacggaatctcagatcggagaaatgaaattgacgtgaagaaaagtgtagtaacgttaggaagatggaattgaaacaagaaaaaagctagctagggtttttggaaactcacgtactttttgattttgagagaagagacgacgacgatgactttagcgattagatctgtggaggcgatatacacaaagacgcggcggtcttctttataactctagaactcagatattaatactcaccgtagatccgtgacctcaacacgtgtcatgtttctgaaacatcttcattaaaactacccttatatttttttatatatttaagattgaccttataactttgactaatactgattacaccctctattctccgaatcggttatcaaaaccaatttcactggaccgtgatatcagaaaccggttcactgaggtgggcgagattttttgttgtcactctcctctcctcgttcttcgatgctcatccattagaggaggagccgatgtttctgcttcc

SEQ ID NO: 5564 - DNA, 3000 bp, Unknown
  misc_feature (1)..( 3000): cDNA_ID_3041922_gDNA_ID_1620803_Annot_ID_168741 3000 nt of promoter + ATG
tgggttttgatagcaacactcaacaatatgaaatgagctagcttttttttttctgataaaacccatcctctgtactatttactttaacaaggaaagagctttgatagctttattactttcaaaagaaaagtttggacctttggttctgtttttggggtttgtactcttgtttcatgtgaagagaggtatttggaatatgtctttaccaaaaaagagctcaaagataccttttaaattattattacagctaatttatggctattttgtatctaattaatcaatcaaatgagaaatgaaaagaatgaaacttgaatcagacgaaaactgtcaaaatgaataattttttaacaagtcaaagctcaagtttaaaattttcccgtcctttttaaaagctcaaccattttcatcagtcatcactggcaagttaagaggtataaaatggcgaaatatggtgataatattaatgtagtgttatatggagaaatagatgccaatgtatacatttgtacagatatataacaattgcatacgccaatacaatgtcttatgtctatggtcattgttgttcttccataatggaaccaattgatccaaatctaaggacatgacaatttattaacattgctaagcttaatagaaggtaccttgtgttcataacccgaatcagacagccttctcagaccaagtatacagttctggttagggtggtggttatgatgacggttattattgacatccttagcccacagtggataaagtttgaacctttttactgataagtccacagaagtcgttaccttaacgtagatcaaaaatctcgaacctaaggttcgagttcttgtagacgtttgagcaatgctcataaactgggttcccatcttctggttctttgtgcgggtggaatccagtctctgagcagcctctcagtacctccattcctccagggtccgttagcttaaatatcccgtaactcctgccaaaaagatcagtttgagagtctatcaaggaaatatgttgactgtataattgactccatagctttggaagaacatacttagagctatcagttggagctacgacgattgcaaaagcctctggcaccattacctaagaatgacatgatgggaaactgagatcagaattgtctcaaacctagtatatatgcaatttggaaacagcagagatgtacctgatacgaataatgtgtatgcagatctacagatgacatgaaacaaccctgagaaggatgagtctggaaaatatgcataacctcgttatagtaagtcaagacaaagtagataaacagatcactaaacatggagggagctagaagagagagatatacatgaatccatcctacgggatagagttctctttcgttttgaatggaaaacacttccacttcattcatagcctgacactgccaattttagcacctgagtaagcacctcattttgaataccacaaaatgatcgagataatctttctaagataactcacagaattagaagttgattcttgcttaggtattatcagagtggttacataaaaaattcctctttcctacagcatgaacagaaatagaaatgtaattaccatcaggttcatgaaactcgaaaaacgaagaaccctggaacagaagcaaaacaaccatgaatcatgaccacaaaagtcaaaacaaggtgtaaactttaaacaatagcatagatcgagtttcactaaaaattcaaatttgcaaagatctctgttagaagttgtaattaggaacaataaagtctgaaactttctaacattttccttgattttctcaccacccagattctcttatcacccaaagtaatcaacttgaatgcgaagaaagcaaaacaatcttacaagaaaggcagcgagagtcccacaagtctcgaggtccttctcagtgttctctcttgcaagctcagtgaaatcctccaataacctttctgactaagaagcacaaacacaacaacgattaactcaaattagatatccgtaattgaacgtaccaaatcacagagaactgagattcaaagaaaaatctcaaagttcttacgatatgaacatctctcagtattttggcttccgacgattcaccgtgattaatattatcggtaccggagattagaacccgagaaacgtgagaagatttacatgtcacgttctctacgcaagagagcgagggagatggagacgagagcgttaccatggaagcagaaacatcggctcctcctctaatggatgagcatcgaagaacgaggagaggagagtgacaacaaaaaatctcgcccacctcagtgaaccggtttctgatatcacggtccagtgaaattggttttgataaccgattcggagaatagagggtgtaatcagtattagtcaaagttataaggtcaatcttaaatatataaaaaaatataagggtagttttaatgaagatgtttcagaaacatgacacgtgttgaggtcacggatctacggtgagtattaatatctgagttctagagttataaagaagaccgccgcgtctttgtgtatatcgcctccacagatctaatcgctaaagtcatcgtcgtcgtctcttctctcaaaatcaaaaagtacgtgagtttccaaaaaccctagctagcttttttcttgtttcaattccatcttcctaacgttactacacttttcttcacgtcaatttcatttctccgatctgagattccgtgaatttctgggatcaaagtatatgatcttttgtgtaatttagctttcattatctatgttgctgcgttttattgaatttgttgtgtatggagaatgaaattgttttgttgaattgttaaaacgtttcttatgtgagaaatgaggatagcttaaacctgtttgatcgcatttgaggttttgattgtctaatcagatattgaaattgttgttaggtgctgatcacagcagatgttgttgtttatggctaatttttgtagggttgttataaaaatg

SEQ ID NO: 5565 - DNA, 3000 bp, Unknown
  misc_feature (1)..( 3000): cDNA_ID_2053370_gDNA_ID_1620803_Annot_ID_168740 3000 nt of promoter + ATG
tgaaaatatgagattgattatttgtataacacggaaaatatgagattgattctttatattacaatgaaaatgaatgattcaaaactaaagatcatagtgtaatatagtttagcttagaaaataattaaaacgattttatttatttatttagttttctaaattttagtttagattcagaaaataattgtttaatttccttagaagatgataaacatatatggaagatttgaatctctatatattttaaaaatcaatcaataatgtcaatataattaaaggatagattagaaaaaagtttcttgaatgctaaataattaatttgttatttataaacaaaatattaaatgctgtaaaaacgaaatattaaataaatatggaaagaaaattctaccttaaaatattttgtactattaaaaccgattttttttttgcagcaaattaaaaccgaaaattaataaatacttaagagagattttaggaatgatttttttgaagtaatgttagactttttttgaagtaatggtggatttaatatagagacattttaggcaatatttttgttaggtaaatatttgatttaaaatgtcgattgaaaaaaataaattcagtggcattgagtcgtaaataagttctaagtccaggatttatttgttaaaatgactgcaaaaatgtatatatagatatgaatcatttgttttaactctacactacatataatggtcctagctggcttgtactaaatactgagaaccctagctaaatgctgcactttgattgatctggttcaaatcaagatgattatcccttgatcagttctttgattgatctggttaaaatcaagatgtccataggattttcgcaacatagcccttgcctaagcgtctaggcgcttagacaaaaccaacacatacattacatctacgaaaaattatgtactctgtatatataaacaataaaatacatgtagagagagagagacggaccctacgagtgggagaaacatgagaagagagtatggagaagagatgtttcatgcgcattcgtcgttctttctctctgaggtttcgttgttcccgtaatgacgatgcgcttccttctcctatttctctcgctctttccattcttcttcttttccttttttaggttactatgtttaattccctctttccaaatccatctctccctctataaatataaagagatagagagaaagagccgcgtaattttagatgaaaatgatgtttttcaaagaaagtcatggcttttctggttgcgtccatgagcttacacactacttaatttatacatatatatgcttcttttactttgtaagttccactcttagagatactaaacatgtccaatatgttttttacttacttggtaaggttttgttggacacatttctagaacctagatagtgttacgctaggttttgttctagtgaagcttgtagaaaatgtgcttatcaaaatcatttcagcagaacatagtaattaaattagtcggattatatgtgatgaattcttcacataagtaccatgtttggatcgacaaaaacaacaagggaatttttttgttataccatgataattatgttgatcatttgtaataggctagataaaattaaagatacctttaaatgataatgtaacaattccatgtttaattaataggtgtccatatttattatccgaattacactatacaggtcacatatgctaagacaatttggtgtcaaaaacgaagaatctaagattattcaacaagctatcattattccttaccgatataaaagactttgaactattttttggccgtaaagctgacatatttcaccggagatgtcgttcaattatacacttgaccaagtcttattctaataacaaaaataataattatacacgtgaccaattctagattgaactttctaaccaattctacatgaatcgttcaccgaataaaaacaaaaacataaaattaaacctcgcaaaattgagtcttggagcctttgctaatttcttgaatactaaaagcagatcactgttgatctacatataattatttatttctgttgttcgttatttatccataaccaaaccatgattagaactaaatcagttctgtggatgcggtaaaacaatctcttcgtcgaatgaccccaaccaaatattcaaatgtacacttgctaaaacccggttcattggtagtccggtttggttcgtagtatttgagtcaatttcatatccctagatgttatgcagaattttgccacctagaccgaacagagcgttttcaaaacttggaaaggaaaaaacacaaagcatttagaacatgatggaacacatgttagccgcaaagaagtaaaagaagaaaaccttcattttgtcttctttccttgttttgcaaaatcgtccaaaggaataacttgtgtatatttatctgtttttgggtataaaagatatatatatatatatcgcctagtcgtcgctgcttgttgttgtcaaggcacacatgtttattctttatttttgtcaaatatttgaatcaagatcagctactattctaagaaactggctatttctaaaataacactcacgaattagccattatttataaaatggtaacggtatattcgagattccagtccatacatgttattaataaagaaagattggatctccatataaaaaatagctgtctcttacattgtagcactagctaaagatctttcaatactacgtacctagtcatacaattctttgaatatggttttaaattgtatgtgaatattattaagtgagaatagtatcgacataacaagtatgaaatcttttatttctatatattttatttaacaacctataacaaacatttcacttcaaattctcactatatgtagtccatcatcaactactttcttttcgcatatctttgaagtttttggttttactaaactaactctatcataaaaggagaaagctttaaatttaaccagaa

SEQ ID NO: 5566 - DNA, 3000 bp, Unknown
  misc_feature (1)..( 3000): cDNA_ID_3077679_gDNA_ID_1620803_Annot_ID_168736 3000 nt of promoter + ATG
atccacttttggagtttttcatattgcgatagcaaggacattcatctttgttttctcctaaaatcacacatggttagattttgtatgtgaatatagttaactaaaacttaaaaaacatgtatatatacacgacataactagtaaacaaatctttttttctaaatgtcttatataaattggacagtatatatagatcgataacaaaaatttcgctacaaattttctaactataagtaatcatccttttctagccacagaattagttacaagtaattataggcttaacattttaaaattgggctaatctgtatttctagtcacggattttcaatggctatgaattatgatagttaccaaatgactattctcttcttgtacgaattcaaatatttgaagaaggaaaaaaagaataacatgtggaaaatgcaataaggatataattgtcccttactcagtttctaagcaagtggtcaagcagcgagacgatatatacacagtgttagtatcatattgcggctccttttactttttatgtcagtttgctcagtggcaaagttatgaccaacatctacctggagtactccaagactcaacaaaactaggcatgtttaattttctgtctttgtattcacctccggtgaacgtttagacgatcggtccatgtagatcccctatccggtgaacgatgtcggccatacggccaaagagagttgagggcctttaataatttatgtaaggaatgccgaatgtgttgtgtccttttcttctatgataatgatagcttgttgaataatcttaggttatggcgccttatgatactttcctcggataatgaatacgtgcaccaaattaattgaacatgatgatactatttgatttagtggtcccgattctatcagtatacaaaacaattttccttttctatttgttgatagaaacatatatagtactgttgtaaggaattcatttttgtctaccgtggctgttgactattttacgccattgaaatgatttttgataataattttctccaaacctactgtaaatcacaggacttaaactcatggttagtaatctgaaagaagaagaatcatatctctgaacgttaggaatctcatctcacacggtaagcatgatgctatctaaactatgtctttgaacgttagaaatcttacatcgaaattatgatgcgtcctagtaatgtgtcaacccaccaacaaatctaattttttttttaatgataaacaacatatctaattgttttgaaacttttgtatctttaagaacgtggaaattccgaagtaaatagtaaaatttacttggtaggaaagatgcatgcatcttattaatttagtgtgtaagctcacggacgcaatcacaaaagccatgactttcttccaaaacatccctttcatctaaatcacgtagctctttctctcaaagttgagatttgtgactctgtatctcccggccctctctatctctttaactgtatataaagagagatggatttgaaaagagaaacttgtacataaaagcttaaaagaaaacaaaaagaatggggagagcaagagaaataggagaaggaaactcatcgtcgttaagggaacaacgaaacctcagagagaaggatcgaaggatgcgcatgaaacatctcttctctatactttcttctcatgtttctcccactcgcaaggtccgttttttctctctaactctccctctctctctttctctctctatatatatcttatattaaattgtagatgtgttttatgcgtatatacaacaatacaaacattatctacataattactgtaagatgtacgttttattctaaagagataatattttgattaattgaataggcagttgtccctctatgaccgtccatattagctctcttttaagtacggtgtctaattgacaaataaatgattcacgtagctagggtttttacggtttatttatatatattgaatataaccacattcatgtaaaagattaatgaaagtaattatcttggggttttttttgggatctaaacagttaccagtgcctcaccttatagatcaagcgacatcatacatgatccaattgaaagagaatgtaaattatttgaaagagaagaaaaggacattgttacaaggagaactcgggaatctctacgaagggtcgtttcttctacccaaactcagtattcgttcgcgggattcgaccatagaaatgaatctgatcatggatctaaacatgaaaagagtaatgttacacgagcttgtgagtatttttgaagaagaaggagctcaagtaatgagtgctaatcttcagaacttgaatgataggaccacttacacaatcatagcccaggtaccacatccacacgcatatgtttgtataatacacacgtatatgcatgtgtcatgtctttcgtataaatttttattacatatatttgcaggctatcattagtcggattggcattgatccatcaaggatagaagagagagtacggaaaatcatctatggatatatatattttgaagcatgaaatcccaaatgataagtctacgctaacgctagtgtgttttttcacacatgtgttagttctttaaatatgagatgagtaattgcttttgagttcgattatgataaatatgttgaccgtcaacataagaaaccttaaaacgttgtcgtttcgtttttattcatcccggtttaattcagtttggcttggcgtgattttagattggtccagatttgcataattttaaccaccgagtaagacagtgggatgtaaatgtcaataaaatacactattggggtaaatgtgaaaagaaaaaaatagtaagaggctatatttgaaaatctaaatatcgcacaaattgcaacccttattttagatttaggaattttgaaacccttgtcgaagagaaaagaggcaaaatctcagtataaagtttctcaaacacttgtggtaagagagcaaaatcgtgagagatg

SEQ ID NO: 5567 - DNA, 3000 bp, Unknown
  misc_feature (1)..( 3000): cDNA_ID_2053385_gDNA_ID_1620803_Annot_ID_168735 3000 nt of promoter + ATG
tcgtcggatcttgacatttccgactgtggaaccatccgaatcaatctccatagtcaccctattggactcactgattcaactcgccggcgacattctcacattcaagtcgaaacacttctctaccaataaacaaagcttcagagaaactctcaggcggatccaaaacctacttgttgtcttcgaagagattcggatccggatcagaaattcgagacgctacttccatgactctgccgccgcgtcgagcctcaaggagatccacgtcggcttccaaaagctcaagttccttctagaagactgcacgagagacggagctagactatgcatgatgatgaactcggatcaagtctcggatcatctccgggtcctgactcgatccatttccaccagtcttagtgcgtttcctgtcgcctccgttgacttaacgaccgaagtcaacgagctaattgatttagtggtgcggcaagctcgtaagtacggagtccaacctgaaacaaatgataaacgggccgtgagctccattaataggatccttgctctgtttgtgaacagagtcgtcccggatccggatgaaattaacaggatcttggatcacgtagggatcagaaaatggggagattgcgttaaagagataaactttctcggagaagagatagatgcagaacggttagatgagaagaagaagaagagtagcgatcaagtcgagcttctcagtagtttaatgggattcatatgttattgcagatgcattatacttggacggatcgagagagatgatcatcataatcatcatgaagatggtataaagaaagatcatgacttgatccgaggattgaaagttgaggatctcctttgtccaatttcactagagattatgacggatcctgtggttatagaaacaggccacacttatgatcggagctccatcactaaatggttcggatccgggaacatcacgtgccctataaccggaaagattctgactagtaccgagttggttgataacgtatccgtgaggcaagtgattcgaaagcactgcaaaacaaacggcatcgttttggcggggattagtcggagaagaaagagtcacgatgacgtggtcccggagagtttggctgcaaagggagctgggaaactcatcgcaaagtttctcacttcagagttaatcaatggcggtgaagagatgatttacagagccgtgagagagattcgtgttcagaccaagacaagcagttttaataggtcttgtctggttaaagctggtgctgtgactccacttttaaagcttcttagctccgtagatatcaggattcaagaaaacgcaatggctgggatcttgaatctttccaagcacgttaccggaaaatctaagattgcgggagaagggttaaagatacttgtagagattctcaacgaaggagctaaaacagagacgagactatactctgcttctgctctgttttatctctcttccgttgaagattacagcagattgatcggagaaaatccagatgcgattccgggattgatgaatatcgttaaaggagatgattacggcgattccgccaaacgtagcgcgttgcttgcggttatgggtttgttaatgcaatccgataaccattggcgtgttctcgccgccggagctgttccgattcttcttgatctgttgagatcgggggagattagcggcggactcacggcggattgtttagcgacgttggcgaagctggcggagtatcctgatgggacgattggggtgattcgtcgtggcggtttgaaactcgcggtgaagattttgtcttcgtcggaggattctccggtggcggtgaagcagcattgtgttggtctgattttgaacttgtgtcttaacggaggacgtgacgtcgttggggttctggtgaagaattcgttggtcatggggtcgctttacacggtgttaagtaacggcgaatatggaggaagcaagaaggctagtgcgctgatcagaatgatccatgagttccaggagaggaaaaccggttcggttgaaccgaatcttcaaagaggacggttcgttcacgcctggtgattttggtacacagtaactcttgagtattttaaagagttatttaccataaagaaaactaaataattttggttaagggtgaaattcttttattaatttttatgtaaagggtttagtgtttgtatatttagctcgggttttattttcataaaccaaagagctactgggatggcaataagcttcagtttttttaagaagctgtgtccatattccataatgtaattataactgaatcaataaaaactattacaattaaaaaaaaatacctaacttttttgttttgcatgtttcctaaaactaacattacaaatttcttggtccaaactaaagacaagaaaagtacctagctttctttgaggtaagtcctattcactcacatgatgcactaggttggaaacgcaaaatggtgtttgaagcagtggaactcgtttgtttgcaataacagggataaggttgtttaatctagttgaagtcgcaaaatgttgtttgagatctttagaattagcatctagaaatctcatatttcgtgtgacttacataaaaacttattttatgtatataagtttaatcaaaactacgtcgttttaatctttttaagacaataaacaatgttacaaaatttgtttgttaacatttcaaaattttaatataaaatgccaattgagtttatgctataaaattaattcgatcgtttttatgttcgattgattttgaattggaagcatgctattagtctacatataaacttttcaaatgtagttgttaattaatttgaatttgaaagcccacaattcaattcgaatttagttagttttgagttggaagcccactatatcgcaattatattacaatttaatgtaaaaaaagcgatgaaaaaccagaaagatttcagaccgaaacctaaataatattgagtaagtttattcgaagaagag

SEQ ID NO: 5568 - DNA, 3000 bp, Unknown
  misc_feature (1)..( 3000): cDNA_ID_3077683_gDNA_ID_1620803_Annot_ID_168730 3000 nt of promoter + ATG
aaatcctccggtaataaaaatctacactgttctgttttgaacatattgtttcctcggttgttcatttttttaatgatcaagccagagtttctttctgtatattatccacaaaacttatatatatgtatgtgaatatttatatataatatcgacatatttgcaggagctgggttggtgtcaaagaacaagtatcactatggtttcttcagtgcaagactcaagcttcccgctggatttgcctctggtgttgtggttgctttctatgtacgtataatatgtttcataatctcctgaatccaaacctcaatattctctagacatatagcttagtaatgaatataggagttattttgaagatatactaatgcataataatttcgatatgcagttatcaaacgcagagacttatccgaaaagccacgacgagatagacatagaattgttgggtagaagtaggagagatgattggacgatccagacgaatgtatatgcaaatggaagtactagaacgggaagagaagagaagttttatttttggttcgatccaacgcaagcctttcacgactataccctcatttggaactcccaccatactgtgtaagtcacactcttgactattatcatcttcttcttatttttcttacgaattagtatcatttattatccattcaatttaaggaaaaggaaaagttatgggccaagaaaagtcaaaacaaacaaaaacattagatataagttcatgaatcctaaaggcaatgcttcatatagataactagaatgactttttctgtataattttttgaatttgaaatataacaatagattaatcatcataatgagcatttgtcatctactaaagttacaaactaataaagtccacctaatgcatgttgacaaacaaaaacaaagatacaagttgatattcttagattaatacaatatatttagggattggttttagactttcagtacttaataaatattttagttaaacaattggacataaagaaactcaatatttcttttaaatactaactgtgatcgttattcaggattttaaaatgctttttcaattattggatttacagatttttggtagacaacattccggttaggcagtttccaaaccggggagccttcacaagcgcgtacccgtctaaaccgatgtctctatacgtcaccgtttgggacggttcagagtgggccactaaaggtggtaagtaccccgtcaactacaagtacgcccctttcgtggtttccgttgctgacgtggagttaagtggctgttccgttaacaacggctcctctaccgggtccgggccatgtaccaagtcgggcgggtcgatttcgagtctggaccctgttgatggtcaggattttgccacgttgtcgaagaatcagatcaatgccatggattgggctaggagaaagctgatgttctattcttattgcagtgataagccaagatacaaagtcatgcctgctgagtgcaactgatttttttttttgttaaaacacacattgttactttctattgttttatgatataattttacgtaggatattagaggtttaaagtatgtttcaaacttcgccaaaaaaaaaaagaagtaatgtttcaaattttcaatttttcttcttcttacagtattttgctctacagttgttctaatattttcttacacctatgttatatataataaagttgactgtccatcagattttcgtgataaatgagtcgtgaaaatcatataaatcatatgaaagagagcattgataaagtaaagtttttcattcaaaaaaaaaaaaaagtttttcttacaaaatgattaaaacacttgtccaagtttggatataagttagggtaacaacattgaatttttcaattattattgttaaaagggcttgcaattaaatttacgaaaataaaaagtacaggcccagcccgggcagctttttctgggaaagacccaatacgacaatacatatcatatttattaataaaagcccaatagaataatacccaaatatgaaataaccaaatgagaattgggatcagatcagaccatgggatctcatatattttactcttaaccattttatttgtatccacaagaaaaatgcttatattgctaatgtaccgctaattcgataataaggtgcccaatcagtatcgaagaaaaacaccagggaaaaagaaagaaatctaatgttttaaaaaatcatcccatgaaatgggctaattccagaaataaataaataatgttaccgctaattcgatataggtgcccaatcactcggcagaatctacttgactcattgttattttaagcatttttgacagaaacgtgaagtaagagaaatagtgtgaagacttatctaacttggttttaccttttgaacttattcataaatgatacgaaagttgagaaacttatttacgaaaactttttgcacttatttactacatttctacttttgcagtcaataatctttttctttttttgttttcatagaatcatttagttgactggtagttattttacttgattacaccattaaataacttaaactactagtctcacgctcttccacaaattcaatgcaaagctttaatttggttttgtcattggcctcttttttgtttcctcaagtaggattctttcttctcaaagtcgtaacgtaaacttacaaaactctttctttttccataaaacgttccttacatttattctctgccaacactcttttttctttttcttttttggttttttcctctatcattgtcatcttctactatcactttcagttttctgaagctttccagtttccaaattttctaaacttttttcctactattttgattttcacctctcttttgtggttttgttgaagatccacacaaaaaagcttccaccatttttttttctgagcttccatttttaagctattttcttgattttttgggtttcactggaagaagaaggataagaaaaaatg

SEQ ID NO: 5569 - DNA, 3000 bp, Unknown
  misc_feature (1)..( 3000): cDNA_ID_2053402_gDNA_ID_1620803_Annot_ID_168728 3000 nt of promoter + ATG
acaaaccacccgatttgaacagaaatatcactgagatatttggaaagttaattaacatatatagaggtacaatctctggtgtttgtattctagactactcgcttatagtaagtaagtaacaatactctttcttttttttcaaaagctttgggtgaagatagacggtcctttagctattacaaagctatccccgtcattgaaaagttccccactaggattgaaagcgttgatcagctcaaacacctccctggaatcggaaaggcaatgagagatcatgtaagttgagaaatgcttcaaatgttttgtctaggttctgtgtgtgggtgtcaaaactgcaaacacttacccttttcctagtgcatacctataacctttgttttgatgtatttctgtgagaacaaagtcttattcttctacctgaatttggcagattcaagagattgtgacaacagggaagttgtccaagcttgaacattttgaaacagatgagaaggtaattttgaagtccttggttatagttattttgctatctcccattttcaattagatacaagctcacatgtagaggccatttgcttttctcttgttcctttttctctttaaagaaaaatactgtcaatgaccgaactggagctagagatgtctgatatgttttgtttaccactataaatgtttcattactatggttgaaggttcgtacaatcagtttgttcggggaagtttggggtgtcggtcctgcaactgcactcaagctatatgagaaaggacatcgcacactagaagacttgaagaatgaggattcactaacgcatgcacagaagttggggttgaaatattttgatgatatcaaaacacgaattccacgtcaggaggtgcgattcttaaacttcaacgtgaattttgtttgtctttattatccttcttgtaattttctcctcatatttcttcactttctgtattgtaggtgcaagagatggaacaacttttacagagagtcggcgaggaaactttgcctggcgtatgaactattcagtttatcggtctgctccatatttgggtgataaaagtttagtgaaatcctaaccaacatctttactgcaggtgaatattgtatgtggaggatcatatagacgtgggaaagctacttgtggagatctggatatcgttgtcacccatcctgatggacaaaggtacctacaatcttctttcctcatcttcctgcgttagtttcctgtaacaaagtttacttaaactgttttttcttattgtcctgaccagtcacaagggatttttgacaaagtttgtaaagcgtttaaaagaaatgaactttttaagggaggatctcatcttcagcacccacagtgaagaggtaagatgatctgataaaattatttaagagaggatctcatcttcattgaaaacacattacttcagttgtttcagtatcttataaaatgatctcttttagcattagataaagctttgttctctcagagttgcatgtgtaacaaaaattcttgttcaatcacagctcctcaatgatttcccttattgtgcagggtactgattcaggcgttgacacgtattttggtttgtgcacttatcctggtcaggagctacggcgccgtatcgattttaaggtaacacctgaaaactcctaatgtcacacaatgcagaaaagaactaagtgggttagtcaaagataaaaaggacaataccatgattgattcagctatgtctaggttgatctcttcccggaagatcattcaataaatagtcttttttcataggtctatccaagggatatctattcgtttggactcatagcctggacagggaacgacgtgttgaacagaaggtatggatatgatttcatttgtatacatgtctcactaaacacatttgttggtagataaagaacacagcatatgtatatatatatgcgatgataactgcaggctgagattgctagcagaatcgaaaggatatcgacttgacgacactggactattcccagctactcacagttctagtggtaaccgggtaagtaagggagaaaagtgaattaacttgatgtgaattcttgggttttaaagtgaaagaatgattatgttgaagctgtgataatgtttgtctctcagggtgctagaggaactgcaagtctgaaactctcaacggagaaacaagtttttgatttcttaggatttccttggctcgagccacacgagaggaatctctaaggcatcacaggcacacagcctttggtactaaattttttttttttctttttgaataggttctgtatgtaagtaatcggttcctttttgtaattgcatatccatggacaactgatttagatgttacatataatgcaatgcaatgtacttgtattagaaaccattgcatatctttaaggtaaactaagaaaacctatggtactgaggaaacttgggatctcaatttttttttaaaatacaattcctttactaaataattaattacacgtgtcataagatagttggattaagtgtggaaataagagtgtcaaatgtcccacatcgaaaagccagcagaaaaccaatttgtatatataaggacacaaaagatagatggtcacgaccttacttgaacaggatctgttctataggctcgtacctctgtttccttgatttctaaggagacaggccctaaaccctggttgatgaaccatgaccgtgcggtcagagcgtgattgatggctacgatcgtcttcggacgcatccggtgctgtagaggatcgttactcggcttggtcttccttgccggggtggtcgcacggcggtctgacaggttctttttattttaccctcggtttttttttttttttttttttttttttttcaccctcaaaactttcaatttcttacattttcaccctttaattgaaacctcgctaaaaccctcagctgttttattgcagaaaacaagagataaggttgaagagtgaagcaaagcttagta

SEQ ID NO: 5570 - DNA, 3000 bp, Unknown
  misc_feature (1)..( 3000): cDNA_ID_3077687_gDNA_ID_1620803_Annot_ID_168727 3000 nt of promoter + ATG
atggtgttcttcaatcaaatattatgttaaaaattcttaatctttctggaaaccctatcggtgatgaaggagctaaggttagtggaaatatgatatactagttttaaatttaacttccgggtgtccaatggtagaaattcctcagttccatcaagagaagagatcatatcgatttctgcttatatctttagctctaaaatcacatggaacttattctctatgtatacgtttctggctgagaatggtttcgcttcattttttctggttatggcagactttatgcgctacactgatggaaaattctagcattgagatacttcagctgaacagtactgatataggagatgaggtttgtttgagcagatgctttgatttacatgcttttcaagctcctaagttagtcacaatccttcaaattgttttcatacgttaagtagttccaatgttcttgcgcagggtgcaaaggaaatcgcagaattgttgaagagaaattcgaccttgaggattattgagctgaataataacatgattgactattctgtaagttttttctgttcatgtgttgtacagttatatttcagattgacataccaagtttatgaattaaatctgttgcgtcttcttcccttctttttttgaaatggaggtagggattcacaagtcttgctggagctcttcttgagaataatacaatacgcaatttacatctcaagtgagtttaggactatagatggatatatcttttgggcgtgctttttttattttgtctgtatagttcatatccctgacataccgatttatggataatctgtttcagtggaaattacggtggtgctttgggtgccaatgctttagctaaagggcttgagggtaacaagtctttacgggtacaaactttcctcatgtctctttcgatgtatatcgtgtgccatttctatattaaaagagacatttcatagttagatctgttatcttatatgatgcattaaaggtgatttctgatgtcatcagagacaaccaatgaataaaggtcatcaacagttgatttattcccttggcctttccacctgcaggaacttcatttgcatggaaactctattggagacgaagggactcgtgctttgatggctggtctatcttcccacaaaggttttccaatagaacacttgtcatacgtctatattaactcttccgtacctctactgtagaattcagtagttataccgagatgcattttcgtgtgcagggaaagtggctttgctagatctcggcaacaactccatttccgcaaagggtgccttctatgtagctgaatacatcaagagaagcaagagcttggtttggctgaacctgtacatgaatgatataggtgatgaggtacatatatatccaatttataacaataatctggattgtgtctgtgcttctctaatatcggaaaaccttgtctctttttgctctgttgtctatcttaaagattttcaatggtttcagggagctgaaaagattgcagattctctgaagcaaaaccgttcaattgcaaccattgacctggtgagaagtgaccatcttctccagcctccctaagttttccttgcgtccatatcgagctatttgttctgctaacacgtttttggtaaaatagggtggaaataacatccacgcggagggagttaatgctatagctcaagctctgaaagataatgcaattattacgacggtcagtgccaaaaacccttctcatctttgattccttgtttacgtataactagtatgataatgacactaccactctcaatatttcctcagttagaggttggttataatcccataggaccagacggagctaaagcattatctgaaattctcaagttccatggaaatgtaaagacgctcaaacttggttggtgtcaggtaaagcctgtccataactctttatctaggaacaaaagtatttcttcacagttacttatttcgttttgtcatggttcctttcatttcttattcctgcagatagctgccaagggtgctgaacatgttgcagacatgttgagatataacaatacaatctcggttttggacttgcgggcaaatggacttagagatgaggttcctgcagacagattttatgagtatcagatttgtacttctaatatagctacgaactatatgttttcataatgtatgtggtacgttatttgcagggagcttcctgcttagctcgaagcttgaaagtagttaatgaagctctgacatctgtggatctaggattcaatgaaatacgggtaaaaaaaaagcgctacttcgtttatcaatactgtgtcttcttttaagacttgtaagcaggtcaatcttattattttgcctcatttgtaggatgatggagcattcgccattgctcaagcattgaaggccaatgaagatgtcacagttacatcgataaaccttgggaacaacttcatcaccaagtttggacaggtaagaaacatatggtgcaatggagataatcaaatctttcgctcgacattgctgagaaatttcccttttgtgttatccagagtgcgctcacggatgctagagatcatgttcttgagatgactgaaaaggaagtagaaattttcttctaggagagacattgaagtgaagaagactttgtcactctgtaattttgcaccattagttgttgtttcattatttatgacgttgaaatgattcaagcgagagataaaacatttgttgttccttacggtgagatttaattttaattcaaggaagttttcatgaaaaatggtgttgactaacaaaagagaggcattttaagtcaaagttggtcgttgaatgaggaaaaaattcattcggtttagaacaggttatttcggtttggttccgattcggttcgttgaaacgagcgtaattgcctaattggggtattcctgctttgaaagacatatactagtttggtggacaaaactcgagtgagttacgagtaaagcgagaaaa

SEQ ID NO: 5571 - DNA, 3000 bp, Unknown; identical to SEQ ID NO: 5561
  misc_feature (1)..( 3000): cDNA_ID_3077691_gDNA_ID_1620803_Annot_ID_168726 3000 nt of promoter + ATG

SEQ ID NO: 5572 - DNA, 3000 bp, Unknown
  misc_feature (1)..( 3000): cDNA_ID_3077695_gDNA_ID_1620803_Annot_ID_168725 3000 nt of promoter + ATG
atcacctatatcattcatgtacaggttcagccaaaccaagctcttgcttctcttgatgtattcagctacatagaaggcaccctttgcggaaatggagttgttgccgagatctagcaaagccactttccctgcacacgaaaatgcatctcggtataactactgaattctacagtagaggtacggaagagttaatatagacgtatgacaagtgttctattggaaaacctttgtgggaagatagaccagccatcaaagcacgagtcccttcgtctccaatagagtttccatgcaaatgaagttcctgcaggtggaaaggccaagggaataaatcaactgttgatgacctttattcattggttgtctctgatgacatcagaaatcacctttaatgcatcatataagataacagatctaactatgaaatgtctcttttaatatagaaatggcacacgatatacatcgaaagagacatgaggaaagtttgtacccgtaaagacttgttaccctcaagccctttagctaaagcattggcacccaaagcaccaccgtaatttccactgaaacagattatccataaatcggtatgtcagggatatgaactatacagacaaaataaaaaaagcacgcccaaaagatatatccatctatagtcctaaactcacttgagatgtaaattgcgtattgtattattctcaagaagagctccagcaagacttgtgaatccctacctccatttcaaaaaaagaagggaagaagacgcaacagatttaattcataaacttggtatgtcaatctgaaatataactgtacaacacatgaacagaaaaaacttacagaatagtcaatcatgttattattcagctcaataatcctcaaggtcgaatttctcttcaacaattctgcgatttcctttgcaccctgcgcaagaacattggaactacttaacgtatgaaaacaatttgaaggattgtgactaacttaggagcttgaaaagcatgtaaatcaaagcatctgctcaaacaaacctcatctcctatatcagtactgttcagctgaagtatctcaatgctagaattttccatcagtgtagcgcataaagtctgccataaccagaaaaaatgaagcgaaaccattctcagccagaaacgtatacatagagaataagttccatgtgattttagagctaaagatataagcagaaatcgatatgatctcttctcttgatggaactgaggaatttctaccattggacacccggaagttaaatttaaaactagtatatcatatttccactaaccttagctccttcatcaccgatagggtttccagaaagattaagaatttttaacataatatttgattgaagaacaccatcaaaggctttaactcctgcagctgtaattccatttgcagaaaaactgacttcctctacagtctgaaacacaaacatgggtatggttagtcaatcaacataagaatatcaggactctaatgagttggtagatagcagatgtgaaagaaggagagaactataacctgattatacccaaggctttcagcaagaaagaataatccttcatctccaaagttgcatcctgcaagataaaatatacaggtgagctatatttgcgtatattaagacaaaaggaagatggcactacagatcacatttaattctaatgtaaatcagtaataagtaatgtcataacagttaaaatcattcaatgcacctgacatgtcaacacttctgaaggacctaagttcttttgcaaattcattaagcctctgcttggcctctctatcaaccttagcagcaaatccttgtaacaaattagtaccggccccgatcgaccatttcactccctgtgtagaagagttgttttctccagcagaagtctttggagacttaggcgacatgaacttcccaaccactttccacaaaactgtcagctgaaaacacaaattagtatagaagatttgagagaaaagacgaaacttttatcattactattctcgtatagatagcaatcaccgaattacatgacaagcaaactaatttccgctctattacttccacatgaaagaagaaaacacagtaatactagtccaagttttgagaagtgacggataaacaaaactagctctcctagcaatgctcgtaccgaaagtgacgacagcaaatgatcccaagggcaagacggaagacgcaatctgctgcactttagcattaggaaaaccactagccgcttgtgactccttataaaccctactacgcttcgagcctccatctgagttatacgccgctttgatcgccggaagtctcggacttcggtgatgaatcaccacaggagaaacaaacaatcggttcctagaaacggagctacccaacaattcgtaccggaacccactcttccattggcccaacccagaagaagccttcaaaattcacagagaaagaaaccgaatttagaagctacaagaattgggaaaaaaaaacaaaggatgaacagtagaattaccttggggagagagtggagattgagggagctggtggaagaagaagccattaaggagctgcttaattacgcatagacgcttgaaactctcgctgtgtgaaaaccaaccactgaagaattaggaaagtgtaagagactaaaagagacgaattggagtagaagagaagagacgatgatgaagatgaagtttgtttccttcgcgctatgtgtgtgtgtattcctttaggtacgggtgtgacccgactatccaccgggtcgaaatcgggtttaaatttatgacccgatagattcgaaagagaacgactttattagggttcataacaaaaataatcaatcacctacctgaaaacaaataacatgtggacttaaaaaattgttatgcaaaaagatttgtttttttcattggtcttcttctactacacgcatttgaatcagcagagagattaattcctcagctcggcgattcaattctcagaagattatg

SEQ ID NO: 5573 - DNA, 3000 bp, Unknown; identical to SEQ ID NO: 5559
  misc_feature (1)..( 3000): cDNA_ID_3077699_gDNA_ID_1620803_Annot_ID_168724 3000 nt of promoter + ATG

SEQ ID NO: 5574 - DNA, 3000 bp, Unknown
  misc_feature (1)..( 3000): cDNA_ID_3077714_gDNA_ID_1620803_Annot_ID_168715 3000 nt of promoter + ATG
agaacaagaaggttacctcctgtatccgatccaagcttcggatattatcaagagtatccagagaaggtgaaagccctccatgcaaacagaaaacctacaaaatttgatgaagtcaaaaagctgtacttagaaaaagatgtatcaaacaccaactgagaaagaacagctctaacctgactctctatgagggcggtaagaggaagataatcgaaaaggtctgtaaaatacttccagacgttagcatttccgtacttcctcaagcattcgtcataaaaaccatagctgaaacagagaagcaaaacatgcatcaaaacaggatagtactttgctgatcagccagaaaccaatgaagaaaagtacgattcgctcaaatataagcttatttcaaaacaaaagcttacacttgagtaatctgccgactctcgtgattccctcgtaagattgtaagtctatccctgtatcgcacttttagtgccaccaatagagaaactgtctctactgaatagtagccacgatctgcaaagaacaaagcaagacaatgagaaaccaacaacactccttttaaactaaatctagctgtcaccatcttatggtacaccaacgaatggttaaagttccaaggatctaaagactagaattcaagggaagtgcaataatgaaagtgagcatcaacaagtctctatattgggaagtttcagtacctaccattccaaaaaaaaacagaacccacaagtaactcactctagataaataaaaaggtggatacttttccaagaattcaccattttggaatgatccaaaaacacagatctaaaatgagaaaaaaaagtaaaaaccccaaaaataaaatcgaaagaagaagaaagacagacctacatagtctcccatgaagaggtagttagtatcaggagcgttgccaccgatacgaaagagctcaataaggtcataaaactggccgtgaatatcgccgcaaacggtaacaggacacttcaccggctgaacattatattcctcgacaaggatcgctctcgcttgatcgcaaagcgtcctcacatccgcctccgataacggtttacactccatcagctgctcgatctgacggtccagatctccgttcgacggcatcttgaaaagccaccaccgatcctatatacgaaaattacggcggataaagaagatgaatcgccggagaatctatcggccagagctaagatatccgaatcggagagatcaaatcctcctagcttctctggtcttcgatagttcgatgtctctctctctcacctggctgagaaaaaatggatattcgttttttttttttaaagactaaaagtgggtcgtgtccaaatagacaaagtataaatgttttatgacccggttaaggttcggttttgtgttaattttattagtctcgccaattgttataaaacttatgattgttttttttctttggttcaaaataaaattttgagttttagttgttttttcttctgttaaattcgttggtgttttcaacttaattctagttgttttcggtcaaattatcaaaaaaaaaaatgaaaaaaaaaagagagaattgagaccaaaccggatcggatttgaattgtgaaccgttacacgtgggtagttggagcagagctattgtcatttgaacttgtctaaacgataagtatatatggacaaatcatctcctcctctcatccggtaattataattagtcaactaatgttttcatattatgttttagatttgacaaatttgcttttaagtttttaatgttgacatgatcgtcgactatgaggcaagttcctcgtcgaacaaatgggcctggagaatctggtagagcggcccatggtaacaaaaataaaagaaggggcgttccgagaattgaactcgggacctctcgcaccctaagcgagaatcataccactagaccaaacgcccattgatgatagctctgacaatacatatttatatttagaaaacattttgaaccattaattttgctattaaattgatgcaaatcaaacctaattaaagtttatcatctaacacagtatgaaaattcatagaccaaacatttttcccttgcatattcttcccacttgtaagaaaatgtgaccgagctttttaggtaaaattaggatattatactttacttactacaaacgaatattaataaaccagatttagtttgaatagactggaatattatgtttcgtttttataaccttaaatcaaatcctcacttacgcataggtaatgaaagttgaaagaaaaaaaaccctaactctgctttttacttggtttttgatttacataatattaaaccggtaagtttgatttggaattgaaaaataaaccaatttcgtacgtaaccttccatttagctccgaaggttctgattacatacagacatgaagatttctttgggtatataagcaaaacaagctcctctctttttcttcttcttcctcgttccgttgccttaccctcttccctcctccgcttccaaaatcagcgagagagggagacacatagagagacagagagattgctcctaatcagaagcaatctcaccattgaatcatctattttctaccaaaaggaagcttcttttgcttttcattttgccaagtttccgtctaaatctctctactttaaaactccggcggccaacgtttccaccgatcctccgacttctttccgagtttcatcttctaacaaaggaacgaagaagctctcttcaccgtttgagtaacgtgatccggtctacaaaggttttaaatcaaaatctcttgctcagaatttttcctcgttttttgtgatttctcttaagattttccgatgagagatctattacttgggacaacgattccgagctatttctcttggcttggactatttccacggttcttagtttggtttggcttcttaaaagcctcttttttttgttcttccagaaatcagtctgcgggagaaagtggaagaagactgaag

SEQ ID NO: 5575 - DNA, 3000 bp, Unknown; identical to SEQ ID NO: 5557
  misc_feature (1)..( 3000): cDNA_ID_1828853_gDNA_ID_1620803_Annot_ID_168713 3000 nt of promoter + ATG

SEQ ID NO: 5576 - DNA, 3000 bp, Unknown; identical to SEQ ID NO: 5570
  misc_feature (1)..( 3000): cDNA_ID_1828825_gDNA_ID_1620803_Annot_ID_50514 3000 nt of promoter + ATG

SEQ ID NO: 5577 - DNA, 3000 bp, Unknown; identical to SEQ ID NO: 5569
  misc_feature (1)..( 3000): cDNA_ID_2053402_gDNA_ID_1620803_Annot_ID_50515 3000 nt of promoter + ATG

SEQ ID NO: 5578 - DNA, 3000 bp, Unknown; identical to SEQ ID NO: 5568
  misc_feature (1)..( 3000): cDNA_ID_1828817_gDNA_ID_1620803_Annot_ID_50517 3000 nt of promoter + ATG

SEQ ID NO: 5579 - DNA, 3000 bp, Unknown; identical to SEQ ID NO: 5567
  misc_feature (1)..( 3000): cDNA_ID_1828805_gDNA_ID_1620803_Annot_ID_50521 3000 nt of promoter + ATG

SEQ ID NO: 5580 - DNA, 3000 bp, Unknown
  misc_feature (1)..( 3000): cDNA_ID_1828789_gDNA_ID_1620803_Annot_ID_50525 3000 nt of promoter + ATG
gccataaagggatttgaagcaaaacaaagtactgtatctgtatgggttttgatagcaacactcaacaatatgaaatgagctagcttttttttttctgataaaacccatcctctgtactatttactttaacaaggaaagagctttgatagctttattactttcaaaagaaaagtttggacctttggttctgtttttggggtttgtactcttgtttcatgtgaagagaggtatttggaatatgtctttaccaaaaaagagctcaaagataccttttaaattattattacagctaatttatggctattttgtatctaattaatcaatcaaatgagaaatgaaaagaatgaaacttgaatcagacgaaaactgtcaaaatgaataattttttaacaagtcaaagctcaagtttaaaattttcccgtcctttttaaaagctcaaccattttcatcagtcatcactggcaagttaagaggtataaaatggcgaaatatggtgataatattaatgtagtgttatatggagaaatagatgccaatgtatacatttgtacagatatataacaattgcatacgccaatacaatgtcttatgtctatggtcattgttgttcttccataatggaaccaattgatccaaatctaaggacatgacaatttattaacattgctaagcttaatagaaggtaccttgtgttcataacccgaatcagacagccttctcagaccaagtatacagttctggttagggtggtggttatgatgacggttattattgacatccttagcccacagtggataaagtttgaacctttttactgataagtccacagaagtcgttaccttaacgtagatcaaaaatctcgaacctaaggttcgagttcttgtagacgtttgagcaatgctcataaactgggttcccatcttctggttctttgtgcgggtggaatccagtctctgagcagcctctcagtacctccattcctccagggtccgttagcttaaatatcccgtaactcctgccaaaaagatcagtttgagagtctatcaaggaaatatgttgactgtataattgactccatagctttggaagaacatacttagagctatcagttggagctacgacgattgcaaaagcctctggcaccattacctaagaatgacatgatgggaaactgagatcagaattgtctcaaacctagtatatatgcaatttggaaacagcagagatgtacctgatacgaataatgtgtatgcagatctacagatgacatgaaacaaccctgagaaggatgagtctggaaaatatgcataacctcgttatagtaagtcaagacaaagtagataaacagatcactaaacatggagggagctagaagagagagatatacatgaatccatcctacgggatagagttctctttcgttttgaatggaaaacacttccacttcattcatagcctgacactgccaattttagcacctgagtaagcacctcattttgaataccacaaaatgatcgagataatctttctaagataactcacagaattagaagttgattcttgcttaggtattatcagagtggttacataaaaaattcctctttcctacagcatgaacagaaatagaaatgtaattaccatcaggttcatgaaactcgaaaaacgaagaaccctggaacagaagcaaaacaaccatgaatcatgaccacaaaagtcaaaacaaggtgtaaactttaaacaatagcatagatcgagtttcactaaaaattcaaatttgcaaagatctctgttagaagttgtaattaggaacaataaagtctgaaactttctaacattttccttgattttctcaccacccagattctcttatcacccaaagtaatcaacttgaatgcgaagaaagcaaaacaatcttacaagaaaggcagcgagagtcccacaagtctcgaggtccttctcagtgttctctcttgcaagctcagtgaaatcctccaataacctttctgactaagaagcacaaacacaacaacgattaactcaaattagatatccgtaattgaacgtaccaaatcacagagaactgagattcaaagaaaaatctcaaagttcttacgatatgaacatctctcagtattttggcttccgacgattcaccgtgattaatattatcggtaccggagattagaacccgagaaacgtgagaagatttacatgtcacgttctctacgcaagagagcgagggagatggagacgagagcgttaccatggaagcagaaacatcggctcctcctctaatggatgagcatcgaagaacgaggagaggagagtgacaacaaaaaatctcgcccacctcagtgaaccggtttctgatatcacggtccagtgaaattggttttgataaccgattcggagaatagagggtgtaatcagtattagtcaaagttataaggtcaatcttaaatatataaaaaaatataagggtagttttaatgaagatgtttcagaaacatgacacgtgttgaggtcacggatctacggtgagtattaatatctgagttctagagttataaagaagaccgccgcgtctttgtgtatatcgcctccacagatctaatcgctaaagtcatcgtcgtcgtctcttctctcaaaatcaaaaagtacgtgagtttccaaaaaccctagctagcttttttcttgtttcaattccatcttcctaacgttactacacttttcttcacgtcaatttcatttctccgatctgagattccgtgaatttctgggatcaaagtatatgatcttttgtgtaatttagctttcattatctatgttgctgcgttttattgaatttgttgtgtatggagaatgaaattgttttgttgaattgttaaaacgtttcttatgtgagaaatgaggatagcttaaacctgtttgatcgcatttgaggttttgattgtctaatcagatattgaaattgttgttaggtgctgatcacagcagatg

SEQ ID NO: 5581 - DNA, 3000 bp, Unknown; identical to SEQ ID NO: 5563
  misc_feature (1)..( 3000): cDNA_ID_1828785_gDNA_ID_1620803_Annot_ID_50526 3000 nt of promoter + ATG

SEQ ID NO: 5582 - DNA, 3000 bp, Unknown; identical to SEQ ID NO: 5562
  misc_feature (1)..( 3000): cDNA_ID_1828781_gDNA_ID_1620803_Annot_ID_50527 3000 nt of promoter + ATG

SEQ ID NO: 5583 - DNA, 3 bp, Unknown
  misc_feature (1)..( 3): cDNA_ID_2156237_gDNA_ID_1620804_Annot_ID_168752 3000 nt of promoter + ATG
gaa

SEQ ID NO: 5584 - DNA, 3000 bp, Unknown
  misc_feature (1)..( 3000): cDNA_ID_1810748_gDNA_ID_1620804_Annot_ID_168753 3000 nt of promoter + ATG
agatcagactataccgagacaacaacattagtaagttttggcatgttggtaaatattattgctctcaagtcttaagaaaatataatcaagttaaaaaagaaagattaagggggtgttattggttagtggattttaatagagttaaactctaacccaaatctaatgttattcattcattgattttaaatccattatttaaatcaagtgttattagttcttatacttacaatatcttcattaaaagactttaaaattaagtgttattggttttcatatttctaatgtttatattactagagtcttaattctaatgttattggttctcatattcacaatgattagttcaagtttcatgttattcatgtttgatagattttcacaaatacttttatttgaaaagatttgaatgaatctcaaactgatttcatgtgtaaattatagcaatcaaaatattgccttgtatcttgagattttcacaatcatacagtctcatgagaatattacatattgccttgttcctttgccaaaaactttctttttccttccacatctaggttcacgttacatctcggactttcttctctccttcttctttcttcttccctttcacggtaaagtctatctcttttcatcattatagtagtcatggctcgtgaatttgcttgagaacaaagtcacttttatcacttttgatcatactattatatatatttttattgtaggttttataatggaacgaaatctttgtgaggaagatgattcagatgtagatattatgttattgatggtggttggatccgttgatgcttatgaaagtcaaatcccacgtccgatgcgacgacaaatcacaaaaaagggacacgcttatatacaaaaggctttgaaagatgatcctattcattttcgtcaactatatcgtatgaatcctgaggtttttgcggaattatgtcatcttctccaaatgaaaacaggtttgaaaggtacaccacatgtatgtgtcgaggagatggttgctacctttttgataacagtgggccaaaattcaagatattgtcacacaatggacactttcaagagatcaaaattttcaacaagtattaatttccacaaggttctcagagctttaaacatgcttgcaccaacattgatggccaaggttacaaatacagtgccctcaaaaataagcaaaaccacaagattttatccttacttcaaggtacatatctttttgtgtgaataatatttcttgaagtcttatataaacagtttttaatttatgttaggactgtgttggagctattgatggcacacacataaatgcaatggtacaaggtcctgaaaaggctagttatcgtaatcgaaaaggagtcatttcacaaaacgtattagctgcttgtaactttgatcttgagttcatatatgttctaagtggatgggaaggttcggctcacgattcaaaagttctacaagatgctttaacaagaagaactaatagattgcaagttccagaaggtaatagattacaagttctaaaaggtgatttatcatatgataatttatttctaatagtgtgcttccatgtttcaggaaaatattatttagcagattgtgggtttccaaaccgacgtaatttcttagctccactacgaagtactcgttatcatctacaagattttcgtggtgaaggacgtgacccaacaaatcagaatgaattgtttaaccttcgccatgcatctttaagaaacgttatcgagagaatttttggtatatttaaatctaggttcttgatttttaaatctgcaccaccgttttcttttaagacccaagcagagatagttctttcatgtgctgccttacataactttcttcgacaaaaatgtcggtcagatgaattttcaagtgacgaagaagatgaaacagatgttgacaatgcaaatcagaattctgaagaaaatggtggtgaagaaaatgttgaaacccaagagcaagaaagagagcatgcaagacattggcgagcgaccatagctgcagatatgtggagagatgctactaatattggtagccaaagatagtaattcactttttataaagttcatgtatttgtctttctttggtgttgatggagacacttttcccgtgtttgagctgaaagatttatttttgaaccctttacactttcttttattattattatgaacgagttcttgtcgtgaaatgatatatgacatgcttccgggctaatctcatcgacataattagaaactgagaagttggccatgggaaaatggtacaagacatacaaatacagaaatgacaatgatgtcagcatgacacttgaccataacgttttaaattatgttctactcatatcggtggtggaataattataccttgacctaagaagtatgggtttatatgtattcttttgtaaacgtttaatactattaattatgaacgagttattctacctctatcatctatgttacagctaagcttttggagttatactgtaaaacattgttcattattcaaatcatatcaattaaaataaaaagtacaggatcatatcaattagaatattactttgatcatcataatattctagttgctactaaagaatagaatcatattacttagaatatatattaccatgatcatcataataatatcacaatctttttgttatattaacgtatatctttacgatcgcactatctctataaatgtcacgtacatctctcttctcattctctaagcatacaagctcattcgactgcaaagaaaaaggttcacttgttcttacttttttcttttgttcttatttacagaatcatatgttggaagtgtgatattgattaacttttgaatagttaacttttgtttcccgtctcactatttccttgttttttgcattgacgtatggttattttttattaaaatattgcaactttttcatgttttaacgtatatttgtttttccaatttgtcataggtatcact

SEQ ID NO: 5585 - DNA, 3000 bp, Unknown
  misc_feature (1)..( 3000): cDNA_ID_2156256_gDNA_ID_1620804_Annot_ID_168759 3000 nt of promoter + ATG
aagcagcaaagaaagctgctgatgtggccaacgctaagggtgttctctcaggtaaaccagaggcgtctcgctgcattaacgctctctcgttattgatgaagatcaacattactccaaaaccaaaagaaccaaggagtatgatggataagcttgagggacttacaaaacataaagaccgcaagatttgccatgttgcatcagcccttcttcacctttggagacagaggatcagagaacaagaacgtaaaaagtctgttaccaaggcttcatcaaagaacatacaaagacgaggaaacttagtgatgtgaagatcatggcttgaacaaatcaaagtctcttgtggattcaaaaggttctgaaccattttattgagatcgaatataagtgtgaggaagagataaactcatttgtaagcatggttgagtgctgagcaagtatactggtgaatttctcgtatgttatgtagggttccacattggaacctgaatttgtaatcttttttgtgtctttacttttccctgctttgtttgttacacaagagactaacttagtgcaacaatattgtggcgaatcttaattctctaaaccaaattagagtagagatagttcaatagatgtaatgaataccaaatttattatcattgaaaaaactaaaatcacctcatttttttcactatgcaattgtttagcatgtgttgacaaaaaaaaaattgtttagcttgttcattaacaaaatagtcatattgttgtttacgttcactcgttatttatttgagtgtagtaagaattacacgatttccactatttgtccttaagttcaggtttacttgtccgaatttcttaaaccatatatcaaaaatatttacactatcgcatcaaaacagatacatgacatgcatgaaaatatatatgcaagtgagatgcgtactctttaaaaaattcaagttggggtatgatataaaactgtcaaatacatatgaaataataatcaatatattaaaaataagaatacataaccatatatatatatatataatttatttatattcaaattaactgtaatatcttcataattttttttatctcttactcgtcgcttttcactttccctttttaacatcacaacaaataatgtcgttcaccataatatctcctatataattttaacaacacgttttagtaccaaatttttatatgtatgtatattactaataacgtacagtttatttctgaaaattttcccaaaaaactatgtacgatgaactgtaaaagcatgtgttcaagataggtaactgttggaattgtatcctttgattgaacctgtaaaagagagaagaagcctcatgagatgaagaaggagaagagaagaagtcaagccaagaagaagagcaaaaggaagaagaagaagttgtcgtgaaacaaggtcaacgacaaagaggaaggaacaaagtcaagataatagtgttgggcttgtgttgttttgtaagaataagtgtttgggctaattgttttgttcggcccaaatgagtaagtgttttatgttagtcaaagtgtagcttagtgaaagactagagttgtgtaagagttgcttgtaagtttggttatagtcttagggtgatgatgcctagaagtatggtctaggtctaagtagaagcatggtgcaagtgtctgtactaagtagaagtaacttgtataagtatatgttgtgtgtcttgtaagaagtatctggtgatccaagtttattatcaatgtagtctttcaaaaagaaaaacgtgttcgtgtgtttgtctctaaacaagaacaaaacagagtgcaacaaagagagaaactaaagagatagagtgaaaacagagaatcataacaaaaactctatagaaaccgaaacccttgctcccaagggtgttgccattcaatagcttcacaatagatgcatcttatttctccgtacatgccgaagaaagtttgctaaaggccaaactattcaagaagccatcaaatgatcaatgtataccaatcttaaactatatccattttctaatagatttctaaaaaacaattttgcactaatttttcatataaatatcacataaaccaaatatttttcaaagatcagatctaatcttagtgctacaaactcttccatggacgagcgagatcatccctatcaagaccataaacccttctagtattctgatttagttagttttatatagtcgattgatatcttaacaaatatcctgtattttgatattttaataaaaaaattaaagtcgattaatgttttagaatgtatttcctttatcatttcgctaaaagctaaaaaattatcaaatatatttaatatatattttcatacaattactgaatttatgtagtttgggtcaaccaacgtttttaattataaatattagcataaatacaatatatattgtgattatgtgaattaaattaatcattttagaaaacaaaattttatataagaaaaaaattgttttctttttgttacgtgaatatcgtattattacatttttcacaaacaaaaaaaaacaaattgttttccggttgcgaacagattaaaggttttatatttttcaaacgaaaaataaaaaataaaaaaataatgtacttattttcatgaggtccacccaacaacagtcgtcacactagtcgcgttggacttgcatgcgcatattatactctatagtcaaacccacactaacctacgccgatattcttatccaccaccacctcttattagctcaaaaaaatttcactaacccatagtcattattgcttatactccgtattaaaaaatgttaaaccttttgatctgacgtttaaaagcaggtttctttctatttccagataaaaaaactttactcatcgagactcgtttagtgattcgaaatttcccttctcggctcaaatcttcgatctgggctttcgtgtctttttgcgttttgattggtaataaaaagaagctttttaaaaactttttcc

SEQ ID NO: 5586 - DNA, 3000 bp, Unknown
  misc_feature (1)..( 3000): cDNA_ID_2156278_gDNA_ID_1620804_Annot_ID_168765 3000 nt of promoter + ATG
acaagtttcacttattcatcagcccgatgaaagaaatcaaacttaatttgaattattttattttattataaaaatgatcaaattcagtttatggtgttatatttgtttatttacaaacaaggatttttttttttcattatgtaattactactttatttttctgggtaattagccccatttttatgatgtatatttacgagatgtaaaacttggcctacgtacatgtgtattttatctctaaaattgcaaatgtaatatttttcggacatatattaaagaagagattgatttctagtattgggtaactagggtaattaatgatgaacaataaacatgcgattaattaatctaaactgttaagtcctaatattgctgtttaatatgaagtagctagtatatttagaaaactatatatttcgaaaacgtgatatctcataaatttgatttaacattggataacatttgtggaccaccatgcatcatgcgtgctggtaagttgattcgacaaatttctgacgtttgtaagttgatggctaatattaattagattatgcattggaaccacatagatatttcaaaaacaaacatatttaggttcgattcatcactagtaatatattgttttgaccaaggactttactcatgccctgaagcgacaatctgtctatggtgttgcatgtttttgaaacgaaaatctgtctcacaaaccctgtggttaatatctcctctggctgaagaatatgaaaccttagattggaaaaccatctatgaatttttgtctttgaaggttttatcactaccgcatctattatctctatccgtgaatatactgagcttatcccggagtgtcaatttagacacatctctgccggacgttatcttcatcgactatccactgaagcatcttgacaccacttcaatctagcggccaaaactaggagttgtgatttccctgtttttgcttaagctttttcgaaccatagctaactgttccccgacacacatccagctagcttccgatctagaatttcattcttacctgacttcaagggtcctcgccatccaagcttccccgtcatggaaagaaccttggctctggttccatttgtcgtttgtgccggcgaatagtgagactaagtacctttagtaatcgtcacaaaatcttttgatagtgactagttctaaaatacctgaattgttcgtggaagtctctttgacacaccaagaactcgcttgtggcatgttgctagctagcttctgtctctgagattttatcataaaatttttatgggtctatcctcaatgcttttaacttatcctagctatcttatctttattgtaagaatgtgcttcaagtacttgtatcctttgtttctcctcttttgggtttgattgaatgaaatcaattatgttttgcacaaaaaaaaaagacaatttgacaaacacgtgaatgcaatttgattgagttaagattaattagtacaaaacataataattgaaacccatgtaagtttggttgattctatgtaaacaaccgtttttctcaaaaggtatatatttttttgtttttggcattcaaaagctatagtttgtttctaaagtaatcatttttagctgatcaaaaccaagtaaaccgattaattattgtgtgaatgatagttaggtgttgcatttgtgtgtaaatgaccttaatgtatagtagaacggaaggttgctgttacatgattatctaaccggttctcagatggaatcgaaagtagaaaattcatatggaaccgaagttatgcgattcaataaaaccatatcaaatgtacaatatatttacacggtaagtacattgcattagtaagtaggtatgaactcctgactccatgtatagtagaaaagggattgattacataaaatacattgactgcgtgaaatgtatgataagtgcttggtccttagtcctttgttgtgtataaggagcaatttatcgggttttcgatcataaaatgatatttttcattttctaatcataggctttttaaggttttttttttcatcctaagcacaagtgactttcaaattaatcttcatttttatgactaggagatgtaactattttctagagagtaaactctttcctacatgtatcgaacccgtgatctccaaaatctctacgttttcagtaatccatggatttaaccatttgaccaactcgaagttgatttatttttgttctgatgtataatataccaccttttgtattgatttcaaggtgaaacaaatttttttataagacaatttagtttgaaaaaaaaaagggagattaaaaaaaatacactatttatttttaataaaacttaaaaacatctgttaacatagaaacaaatcaacgcatagttttgtttttttaagatacaaatagttagagaacataaaataaaatttagatttaaggttagaaaaataaaaatcgaataaaatgcagcaaaagattatctataacatgtgataaaatggaataatatttaaaatagctgtactttaatttcttttctttcttttggtgcaaaactttaatttcttaaaccaataaaatttaactggataataatctgacccataatttccttaataaaacataaaaattaataaaaaaatctcacatacagttaagtacaatccaatcccttagatatattcccccccccccccaattgaagtaaaaatcaagtattaagagttaacaatcactaagcattccaataatatatttttcaatggaatggaattaccattgtgacataactttttgttttttgtcaaactgtgacataacataaaaccattaaagaaaacatgtgtccctcctttaataagaagcacattgtgacaaacagagcattctctctctctcacactctcctctgtctcgctacctctgtctctttctcgagcactcactgttttatttaccagaaattgtgttgtatcattacatgcatgcataaaatg

SEQ ID NO: 5587 - DNA, 3000 bp, Unknown
  misc_feature (1)..( 3000): cDNA_ID_2105391_gDNA_ID_1620804_Annot_ID_168774 3000 nt of promoter + ATG
ggtaaaggagcgttggagtgtgcgatttgtttgaatgagtttgaagacgatgaaacgctgcgtctgttgcctaaatgtgatcacgtgtttcatcctcattgtatcggcgcgtggcttcaaggtcacgtgacttgtccggtttgtcggactaatcttgctgaacagacgcctgaaccggaagtggtggtggaaaccgatcttgaggcgcagcagcaatcggcggttcctgtaccggtggtggaacttccacgtgttaaattcccgaggtcgcatacgacagggcattcggtggttttaccgggagagagtaccgaccggtttacgcttagagtaccggaagaattaaggaagaagataatggcgaattggaaattgaaccggtcgaatagtgtttttgttttaccgagaggaggaagctcgaggagtggtaaacaggttgaccggtcgagggctaaatcggaccggtggttgttccgtaaaactccgtcgtttctatggaggaaccgggatgatggttcgattaggctaggtggtaccggtagtgttagaggaaattcagtaacaagtccgagcggtgactcggtacgagcagaccggtgggcttttcttagaaacccatcgtttctctggaggaatacgacgccggttccttcgccgagagttgaagtcaataataaggacggtgaaggaacatcgtcagttcaacatatcggtacagttggttcaactagcggttcccttaggctaccggtttagtgttcggtgatgttttgtgcattgttcataaacacgcaatagattttacgtaattctttaattttgtttgtctttttctgtaagatatttaaatcgacaatccaacggaaaaaggagattgttttacttaatttattttatactcttcaaaagtcaaacaaagaacgaactggagattggtcttgttcttaaaaaaaaaaaaagtcttgttcgtcgaccaaagaatacatggaactggaagatagagactacaacattattttatagcggtaatggaatgtattatctagttctgaattcatgtgtttatttctcgatgaatacgatgaacgactaaaaaaagagaggaactatataacaaacaaatttgttaccaattaatgattgttttttttttggggaaatacaacgttttttttttctcaagtagtattgttgtcggaccaaaacaaaaatttgtactaatatatgaatcaagtagataagaacaatgtatcaaattaaaatttcagataacagtttccacagttaatcatttgagcgtcaaaaaaagtaatatcatttgaacattgaagcacgaggtactttactttcagagctgagactaaagatagttcgagaagatcttattttaatacttggaagttggaaatacggaaatgaaatcatatacattaaaatataaaacatagttacttcatcagatagaccacgactaagtcgtttcgatacggattggaagattacttgttcaacaatttgaatagttacgtagaaagttgccatcattcaaattttattctagaaacataaaaatgtaaaaattaccaaacacacaatatagccgttgttgtctacaatatgatgatggtaccattgtttatttgtttttatataactgcatacgagatgttggaaaatgtttacatatattttagttagttagtttaaataataataaaataatttgtactttttatttaatttactctattttttaataattttatgttttttgtttattttatgtgacattcgatctacgtccgtaatcagattgagaatacaagaacgtctcatacctcagaaaaaatttatagttctgcattttgctttttttttgcgagagtcggcggcatctctgtcacactgaacagtaaagagaaaaatatatttaggatttattttaatcgtgtatttatactgtgttttttgggctgggtcttaaacaaatctgcccaaaaaatatatatatatatatattttattttatctcttgtgaaaatatgtaaacaatttattctttttgtgctgaatgattaataagtgaatgcaaggttccaagtttaagaaaatatatactcgatttgatccgacgaaatcatatggaattgcgagcaatacatttatcaaggttttaaaaattgagatttcaaaataacgcttttgttattataacgacaaacaaaataaaccatatttcttatagaaaaaaaatagttcgttctaaatttgtacatgactcaatatcttattttttaaatcccatatagtatcaaaaagtattaaattattaatgcacacaaagtcacaatcaatgatttatattaaataaaattgcattgactaactatttggaataaatcatggattatgtatactgtatagtatataattcgtatgcacacaatccatgatttatgttttaaaagacatatgaacacaatccatatctctgtgtacaatctaacttttcgaaataaatctaaacaaaaattgaatagtttataatttcaaagtttgcaattcaaatccaacataaaataatattaatcaaaataattaagtagaaacaattttgattggttttatgcttagttttactaactttgccattacgaccaacaatttttcactaacaatcggtttggtgacagaaccgattaataactttgccattacggccaacaatttttcactaacaatcggtttggagacagaaccgatcaataattttctaaaccgtactattgtaaaccggaatgttggtttatatgattaagatcacattggtataactctacgtgtctcgtccaatcacatttcacagcgtcaaggaaataaatattagataattaataaattttaataagaggaaaaaaaaacattcatcttcttcttcttcgtcggagtcggagcagagaaaggttttggagatcgagaccaaactccgattgaaagagg

SEQ ID NO: 5588 - DNA, 3000 bp, Unknown
  misc_feature (1)..( 3000): cDNA_ID_2156350_gDNA_ID_1620804_Annot_ID_168788 3000 nt of promoter + ATG
aagacaagcttatatttcagctaagcacgttatcgcaagcttgagacagtagtaaataaatatgaatggggtttgaaatgaaaatggtacctgaattgctggattcgaggtcaataaaagagaaatcccaaggccatcaaatgcatttccccatgaaccatctgttagtgtcttccacaaccctttagattttccaaactcgcttgtttgcatcctcgatgaagctgtatctagaggctacaaaaacatacaacttaaagttaagcaaagcatatagttttgaagcagagctgagtgcaaaaaaacaaaaaaaacgtacttgagtcaaaacagaggtacaagcaccagcagcagcagcaatgaggagattagcctttgttccaatagacttagaaccaatcctttgggaatgtaacctcttgaaatagctataactatagaaatagatgaaggacgaaataaaagactgcaaattcttagtcccaaggccttgatacaaggagagaacatttcctgatgaaattgcttcccaaaacacatctgacagatatctgtaaacatcacaaaaacagctttaggtacctcaatattatctaatgacaatcacatatgaaccattataatacctaaaaaccttaaccaaaaatagtgattcaaaagcttaagctcattgagaagccttgatcagagaactgaaattttcgatttagacgaggatctacaagggatcaacatagaaatcataaacctaatccaaaaactgaaagttaaaaccgatttcaacaattcagcaggaacacagctaaaattgaagcgtgatgcagagacataaagaagcaattctcaaattctagatcatcatcatcgcgtcgcaatcaaatggaaaaagggaagaaggagagaaacctgtatttctgctgaccgcgaacacgaatctcggcttggaacttggatttacaggtatcaagagggtataaaatggtggtgctgagaagagatccaatggctccggaggtggcttcggagatggattccaaatccaaatcaacacccatatcttcttcttcttcttcttcttcgaagagagaaatgataattgatggtatgggcgatcacaagagaatgattttcgtcttgggattttaaacaaaaagccgtgtaagattgttttttgtgatggtgacgtcatccttttcaatttttcctttttttggtttagtcggtcaaatcatagaatgtaaacgataatatcaaagtcgggccacgtggttttcatgtttaaaaccggcctctacccaatattatttcgaattagggctaggcaaaaatgccgaattcgaatcttaatcgaaacactaccaaagaaggttgattagaaaattccccaaaaaaatatccaaatgaatcttagagttaggtattttgggtatcggataatatataattcgaatcgaaactcgaactagttagtatccgaaaaaaattaaaattaagtaaagtcatcaatccatattatatagttttgagtaattcatatattttcgagtaatttgagtgattaaattagttactttccaatattttagataatttgtttatttgttttttctaccgagttttatttatagaatttggacattttcaaatacttttcaatattttttcttgtaattttgaatacggatcgaatccagataaaagttaatctaaatagtaaaatctgatcgaaaacgaactatgaaaaactgaaccgtatccattccagcccaaatattacaaatatcctaacatgaaatatgagcctaaaaatccaaaaaaattgaaaaacccaaactgaaccctaacgtctaaccataatttaaatgatgtaaacgggtcagacggtatgatcaaacaaacaaaaaaatcaagtagttttaaaagtaaattatgaatattatacagaaaatatgaattaaaggataatacagtatataatatatgttgaaatagacaggtaaaaaaaatataatgaatgatgcgaaacaaattgatagtaaaaacatattaaaaatggttaaaaacataaatgttgtagctgaaatattttactgcataatatgattataagttaaaatcaatacaaattttagacgaaaaaataaatacacggactgtacatgaaaagtataacaacgacaaaactggtgtatcacacacccatgcggttcacgttcaccaagttttactatgtaaactgaaccatttttttcttttttctttttctacttttttttttaatcataaagcgcaatgttgtaagaataatcatgaatggaagacatggttacaatccaaaagaacggtgatatacccgcattcgtccgcgttaccactcaatggcatggtctcatgtcatttcctgtattataatgacattgtcactagctaggtgatattttgttgtataattttatgaaactaaatcataatcttgtaataaataaaacatattgctatagcgatgttgtatggaacatgttttttttgtttaacgtcactgtattcaacacttaataagagggagatgtctacttcaatgtattcaacaactagaaaagactttagtatgcatgattcaataaacgtaaatgcacatttttgtgcctaaattaaagtcattgattaaaaaaactagaatcatttgctttaattgtgcctaaatcatttgcgttacgttcattgatttaaaaaaactagaaaaagagactttaattgtgcctaaatcatttgcttcctaaattagatactcccgattgctgcctatatagtatatggacaggaggaagaatttttaccaaaaaaaaggactaggaatggagaaagaataatcatatgattcgatgaacgtaaatgcacatttttgtgtatatatatacatgatggaaacacatacatagagagacctaaactacctaatacctatacattcaatatattttcatcatctttatctacaca

SEQ ID NO: 5589 - DNA, 17 bp, Unknown
  misc_feature (1)..( 17): cDNA_ID_2156354_gDNA_ID_1620804_Annot_ID_168789 3000 nt of promoter + ATG
ttcggatccggattatg

SEQ ID NO: 5590 - DNA, 3000 bp, Unknown
  misc_feature (1)..( 3000): cDNA_ID_2156314_gDNA_ID_1620804_Annot_ID_168778 3000 nt of promoter + ATG
tggcctcggttcatcagcagctttatgtgtagctctcacagctgctctccttgcttcttctatttcagagaaaacccgtggtaacggttggtcatctctcgatgaaaccaatcttgagttgctaaataaatgggctttcgaaggcgaaaagatcatccatgggaaaccttctgggatagacaacaccgtcagtgcatacggtttgttctaactgtaaaactccaaattctcggatcaaagtttcaataatatgttagagaaaaccgtttctgtttcgtggtggttgcaggcaacatgatcaagttctgctcaggcgagataactcggttacaatccaacatgcctctgagaatgctaattaccaacactagagttgggcgaaacacaaaagctctggtctctggtgtgtcacagagagcggtaagacatcctgatgcgatgaagtcagtgttcaacgccgtggattctataagcaaagagctcgctgcgatcattcagtctaaagacgagacctcagttacagaaaaagaagagagaataaaagaactcatggagatgaaccaaggtctgctcctgtcaatgggggttagccacagctcaatcgaggctgtgattctaaccacggtcaagcacaagcttgtctccaaacttacaggagctggtggcggcggctgcgtcctcactctattaccaaccggtaaactttgtcaggaactttcaatcatcctttttgtcaatttcggttctttattcttaaattaacccctctctgcaaaacaaactcgtttcagggacggtggtggacaaagtggtggaggagctcgagtccagcggttttcagtgtttcacggcattgattggtggtaacggagctcagatttgctattgatcaggtcggaaaaatcatatttggcctctcaccattcttaaacttgctgacgtgtacgtcaagaaggctgcaattagaaattcaaagagtcgattttttcttataaatgatgtgttgaatgtaaaattgctttattattataccatgtgacaaataattgaaaaaagcaaagattgtttagtttttttttttgtattttgaaattgttatgtttcatgatgggaaatataaaatgacaaagtttttacttagattgtcacattgatcacattatttcctcgtatattcatagtttgtccaacttcatcatttcatagatatcataagctggtcttttggcatgttcatgcattctaagtaacaatctgtataatggtaagcttgcaagaccaagacgatgcaaatctctaacatatgcagttgcttcttcaattttctcctctttctcaaagtactcggcaatcgccatgacgatgttatgggatggcctccaatgacaccgcctcattagtacaaacacttggtgcatagcatcaatggctttctccatattctcacatttcacccatccctccattaagatttcccaggtcttgtagtttggagtacctcctctctccaacacacaaccatgcaatgactcggctttccggatttctccattacgcacataagcacccaaaagaacattggagaccctaacatcatagttaaaacattgagcctcccactcactaaacaccctttcagcctcttcaagatcaccagttttcaccaaagacgacaatacacatatgtagttcacacaactaatcctaccacaaaccgatttagaaacttcccacaaacgaacaactccttccttattccctaaagacgcataaagcgtgataagaaagaaatatccaagcctattacttctattcaacatcttttccgcatcctcaagcaccaacctagccttctcatcaaaaccactcttaatataaacattagctaaagtacacaacgaactccacccaacttcaacactcttatcaccaaccatttccttataaaccgtttccacagccgcaactccagacacttcacaacatgcattcatccaaagattatacgaaagaacgtttcttggtatcttattccctttcatcatcgaaacaaccataactactttctcatactgaccactagcttcataaagcttcatcatttcgttaaacgggtgtggagtaacaagaaaccctaatccattcaacttctccattagagcttccgcttctttaaccattttattcttcacataagcacgaagaagcggaagataagccgatttcgctactctcatagacacagaactatgtagcagcttctcaaaatactcctctccttgtttcaagccatgagttttgatgatcaaatccaatctaagagcaatgtcataaacactaaattcaatatctttttgattctccatccactccatcatctgtatatacacacattactggcaaaatcaaaatcaaaagcttagttctcagttttaattaagggaaaaatttcaaacctggagagcgagatcgtaacgatttgatctaatgagacgcttggaaatcaatcggagctccgataaagagacggcatgacccgaatcgatccgttcctgaagcagagaggtaacgctgcgtcgtggaccgttctttctcagtatctccttcaagctattccgatttgcgactgatgacgtgtccgaaccatctgcaagtgaagacacgagccttgatactacgccggtggtgttgaacctcgtcttcgcaaccgcaacgcaacgaatcagcatttggattttggagccgccgcgaaactggttcggtctttctcgagaatctcagagaagagacggtgagagtggatttgggccgtattaaattaagttgggcttacccggcccatatcaatagttataagcccgtttaaagaaccgacgtcgtatggtcaaaaacctgaaacattagcttccttcttcttcctcaccttcaagcgccgacttcgttttcttcgaatccaaatttctgtgtctgcttttgattcacagagaaggagcaggaaag

SEQ ID NO: 5591 - DNA, 3000 bp, Unknown
  misc_feature (1)..( 3000): cDNA_ID_2156274_gDNA_ID_1620804_Annot_ID_168764 3000 nt of promoter + ATG
tattatttttaaattgatatcttcttaattttttaaaacatgagacaagtagaactctagtctggtgaaaagctcacaagtaaaacatgaaaggagtgtcttaattcaactttgttttgtcggcagtacacatcacaatgtcatatagataggttgtagacggactattttctgaattgaactgggtcgtgtttgtagactatttttttttttttttaattctatcgactgatccggtgagtttcaataaaagcacactgaaatagttcagagagaacgttttttcgaaagaccaccacattatatgtcctaaattttaaatgttttctaactaataacagggttaatcagactacatgtatttatgattattagataaatcaattgagccaaaacttaactaatagattttccaaacaaattttccaaacaaatgtgacagattatttattttacaaaaaaattgttttacattaaaactttaaataatttctacaccgaagaattgaatttgcagcacaacataagaaatcatgaatgatggtatggcatgcatatgttaatcctaacaaaattcatgattccctatccacgcaagctagcttgcttgtccaaattagatttgttcaactgcataaacaaattgtcaatttccaaagaggcaccaaaagtcaaaccataaataggtagtttggacaattattggggatataatggattagatcgtagattcaggagaatttaaggcaagtaagttggttctctatctaatgttccaagggtcttatctatgtacttcgtttcgatgattaattgatgtagttagtagtttcaaattccaaacgactatttgtatgtacaattacatatggattaattgtcagataacatgttgaattctaacatgtttctgtctatccgattttagattaaagttgtttatacaaaattttagacaacacttaaattagtactatcgttagttatatagttccattaatcatttctccttctgtatggtttatttggacagatatgtcattaagcgtttaaaaatatttgtagatttgataatttgtcaaaaatagcatttattgatattatagttgatccgtacgcgttacgaattctttagttgacctttctttttttataatctcctaatatttaaaattcagcagcagactgatgaataaaattaaatacttggttccatttctagatggtaacaggtacaaatatagatcctcacgtaagaataataacaacggaggacaaaaacgttaaattatgattaattaaacatttaattaaaagtattagcaaactcaatcaaagaatgactaaaaggttctaataacttgtgaggtatttaaacaagttaatgtaaaaaaagaaacaaaaaggttgaaacgtacggttttcatccaatgattatgaatgactataaatgattgttttttctacatcaaatatggagttccatcgtcatccaattttcttttggttacgagtgaaaacttcttaaaacacccgaatataggatctgattgataaccaaaagttgtacaagttttttagctgttaactttatcgaaatagtgcaaaactgttaaaagagctgtataaaaaaactgtacaaaaaatctaagaagaaaactttttgtaacgtttttgataaagtttttgtgattgataactatcaatactgtacaaagctgtattgtgttaccattcaaacttataatgttatagtcttggagagatattttttttactcaaagatatgaatttaagttaaaatattccataatccaaaccagcaatatatacacattaatataatttaaattgcatggaattcaaaataatacttatcgtgaatccatctagatacgttgagataagggaccaatcaacaagagaagacgtcacttttacaagttgagaataatctttcagagagaaaaaaagagtaactgtcgatttttgttgatccaaggtaacgtatatgtcctgactcagattattgcttccaattatatgtgaaaagagctttctccacattgacatataactaggatcattcgctatagacgattaatcgttgtttataatttgttataaaaaaaactttggtattttaaagaatatgtcaatatttttttcatactacagtatttttaattcgtcaaactatttaagaatacgctcatgacaaatgatcatataataataatttaaatagtacttgtatttattttttcaagaagaaaacttagttgaatgaaatttgacttaaaatgatataaagggtttgaatggtaaccattttaataacaatacagttttgtaccgttttgacagttaccaatcacaatttttttatcaaaaacgttacaaaaagtgttttactctcagctttttttatacagttccttttaacagctttgtactattccgataaagctaacaaataaaaattttgtacagcttttggttaccaataaaacccaaagtcttacaaaaaaggtcttacgcgtccacgttagctttccaatccaacccttaattagaagtcttcaccatttgctggttaaaggatattttttcaaagtgtttagcattttgtatacgtcaaactattttagaatccagatgatgaatgatcatatactaatacttagctgtatttttataatttaaaacaacaaaacttggtttaatgaaatttgacttgatcttgtttaaaaaaacgtctcacgtccacacgttagcttttccaatccaaaacccctaaagagtagaaaaccaaaataaccatttttaattcccagcctctttttatacgtagtctaaattgacaaacacatcattcgctctctttctcttctttctctagctctcttggttttttgctaaaaacagagcattttctctctagctctcactgtttctttaccataagtttcgtcatattagtacatgcaagtgtaaggg

SEQ ID NO: 5592 - DNA, 3000 bp, Unknown
  misc_feature (1)..( 3000): cDNA_ID_3077774_gDNA_ID_1620804_Annot_ID_168763 3000 nt of promoter + ATG
aatctacaaatatttttaaacgcttaatgacatatctgtccaaataaaccatacagaaggagaaatgattaatggaactatataactaacgatagtactaatttaagtgttgtctaaaattttgtataaacaactttaatctaaaatcggatagacagaaacatgttagaattcaacatgttatctgacaattaatccatatgtaattgtacatacaaatagtcgtttggaatttgaaactactaactacatcaattaatcatcgaaacgaagtacatagataagacccttggaacattagatagagaaccaacttacttgccttaaattctcctgaatctacgatctaatccattatatccccaataattgtccaaactacctatttatggtttgacttttggtgcctctttggaaattgacaatttgtttatgcagttgaacaaatctaatttggacaagcaagctagcttgcgtggatagggaatcatgaattttgttaggattaacatatgcatgccataccatcattcatgatttcttatgttgtgctgcaaattcaattcttcggtgtagaaattatttaaagttttaatgtaaaacaatttttttgtaaaataaataatctgtcacatttgtttggaaaatttgtttggaaaatctattagttaagttttggctcaattgatttatctaataatcataaatacatgtagtctgattaaccctgttattagttagaaaacatttaaaatttaggacatataatgtggtggtctttcgaaaaaacgttctctctgaactatttcagtgtgcttttattgaaactcaccggatcagtcgatagaattaaaaaaaaaaaaaaatagtctacaaacacgacccagttcaattcagaaaatagtccgtctacaacctatctatatgacattgtgatgtgtactgccgacaaaacaaagttgaattaagacactcctttcatgttttacttgtgagcttttcaccagactagagttctacttgtctcatgttttaaaaaattaagaagatatcaatttaaaaataatatgattgccattttggatttctaaatcaattaaaatattgtgtctaaatttgttaaaaggataattttatggcgaatatttggatattattagttttgttgactaacgatttaactagtagtaaaaacagaaaataaaagattagattcatgttaatacaaatgaatcggtacgctaaattacctattagaaagctaagatattttagcagaaaggaaaacgatattccctctgttattaaatgattgattatatagagaaaaaaaattgtttctaaaagattgattttttaagttttctttgtaatatttattggttagtattggtgaattgtaattttcaagaaaaatagttaattatcattggtttagagttatagaaaactgtaatacacaaaaagtaatatatttataaccaatatttaatatgttttttaatatgtgtgtttaaaaaaaaaatcaagtttaaagaacaaaggaaatatgagataattaattaaattttttgtttttttatttgaaaataaaatattaaatttatagtatacatataaataaatcaccatgacaaaatggtagatgcgtgtaattaagtgagtcacgtaaattaagagggctagcactcccggccccgggcactctccgacccacgttttggtccccacgttaatcatcaaaacacattttgttttggtatcaattaatcatttaagtttccccacaatagaaatcattttggtgcattctctatgcaaatttatggatcgaaatcgaagttaaaattaagactgtttaatggggaaaagaaaagaagttttaagactagctagttactactaactagggaagtttttaactatcatatgattttttgttgcggaagtggataaatatgacccactaaaaatcaaaacttattagtcaactagtaaccgctagatagttctaatgtttacactatcactgaccttcagattcattgaatctagacaggagaaagatccagcgtaaattattggcaaaagcgatgagaaatatcaaaaatgacattgattcacacgaatttaattataaacaaatcaatggatttgatgttcttccatttaagacgataattacggctaaacctgtagtgttttttttattcaagtaattttgtagtgatttatcaaaacttaaattattgttgtataataatagttaaaatttaggttccgaatagagacaaaatctaaatcgtaaatcgcacaatacggtccggttcattatcatgtgaatcacaccgtactttattcgtagttgaacgacgcatttttattcggaacgataagactttagtgtttgattagagtaatactgtataccaacattatattatgggctgtctgcctctgtcaccctgaaatatatcagttcaactacattccccccatactttcactctctacctatttccccctatacaaactatattcttcataattccacccaatcttacacaattccacccaattcaccaaaatcaattaatctctctgaatgcgttttaaaattaataattgcgttttaactttgataatctgctattaaaccattgacccaaccaaaatctcataacccaaaacaaaccttctgtttggtaaggaaggttcgatttataccttaaaccaaaagggggaaaattctgaattaggttttctatttcttcttatgcccaaaaaaaataaaaaataaaaatctattctatttcttcttcttctccatcgacactctctccttcttcttcttctacttcttcttcttcatcttcttcttaattagtttctccggcgttaattggagtggttggtcgttggatcatcatctctggagaatctaaagcgtgaatctgaagcgtggttgggttgaaatcacacattacccacacaaagatg

SEQ ID NO: 5593 - DNA, 3000 bp, Unknown
  misc_feature (1)..( 3000): cDNA_ID_2156241_gDNA_ID_1620804_Annot_ID_168754 3000 nt of promoter + ATG
gctgcttgtaactttgatcttgagttcatatatgttctaagtggatgggaaggttcggctcacgattcaaaagttctacaagatgctttaacaagaagaactaatagattgcaagttccagaaggtaatagattacaagttctaaaaggtgatttatcatatgataatttatttctaatagtgtgcttccatgtttcaggaaaatattatttagcagattgtgggtttccaaaccgacgtaatttcttagctccactacgaagtactcgttatcatctacaagattttcgtggtgaaggacgtgacccaacaaatcagaatgaattgtttaaccttcgccatgcatctttaagaaacgttatcgagagaatttttggtatatttaaatctaggttcttgatttttaaatctgcaccaccgttttcttttaagacccaagcagagatagttctttcatgtgctgccttacataactttcttcgacaaaaatgtcggtcagatgaattttcaagtgacgaagaagatgaaacagatgttgacaatgcaaatcagaattctgaagaaaatggtggtgaagaaaatgttgaaacccaagagcaagaaagagagcatgcaagacattggcgagcgaccatagctgcagatatgtggagagatgctactaatattggtagccaaagatagtaattcactttttataaagttcatgtatttgtctttctttggtgttgatggagacacttttcccgtgtttgagctgaaagatttatttttgaaccctttacactttcttttattattattatgaacgagttcttgtcgtgaaatgatatatgacatgcttccgggctaatctcatcgacataattagaaactgagaagttggccatgggaaaatggtacaagacatacaaatacagaaatgacaatgatgtcagcatgacacttgaccataacgttttaaattatgttctactcatatcggtggtggaataattataccttgacctaagaagtatgggtttatatgtattcttttgtaaacgtttaatactattaattatgaacgagttattctacctctatcatctatgttacagctaagcttttggagttatactgtaaaacattgttcattattcaaatcatatcaattaaaataaaaagtacaggatcatatcaattagaatattactttgatcatcataatattctagttgctactaaagaatagaatcatattacttagaatatatattaccatgatcatcataataatatcacaatctttttgttatattaacgtatatctttacgatcgcactatctctataaatgtcacgtacatctctcttctcattctctaagcatacaagctcattcgactgcaaagaaaaaggttcacttgttcttacttttttcttttgttcttatttacagaatcatatgttggaagtgtgatattgattaacttttgaatagttaacttttgtttcccgtctcactatttccttgttttttgcattgacgtatggttattttttattaaaatattgcaactttttcatgttttaacgtatatttgtttttccaatttgtcataggtatcactatgggagattcacaacccaaaaaaagaaaaaagggggattataatccgtggtctccagaggagactaagctgttggtgcaacttcttgtggaagggatcaacaataattggcgtgattctaatggcacaatcagtaaattaaccgtggaaacgaagtttatgccggagatcaacaaagagttttgtcgttcaaaaaactacaatcactacttaagcagaatgaagtatttaaaaatacaataccaaagttgtcttgatcttcagcgttttagttctggttttggttgggatcctttaacaaaaagatttacggcttctgatgaagtttggagcgactatctaaaagtaagtatcacattttcttttttaagtgaacatggtcgtacttacatattattaatatgtccctttgtttttgtaggcacatccgaacaataaacaacttcgttatgatacatttgaattttttgacgagttgcaaatcatatttggggaaggtgttgctactggaaaaaatgcaattggattatgtgatagtacggatggacttacgtacagagctggagagaatccaagaaaagaatatgtggatgattttgacaacgtgtatgagtatgatactacaactcatcatgagtcatcggagcactacgcaccatttatgtctcatggaacttcagaaagtcctaagcttcccccacgtaaaagaacaagatctgagagaagtacttcacaaaaagaagaaagtcctatgatggttgttagcagtaaaattttggatataatacaacaaagagaagagaggcaacaaaatgaagtggcacagaaaaagaataacgtttgggatgctataaaagaaatttctgacttggatgaatgtattcgttacaaggcacttacgaaaatttatcatttgggaatacaagacgttttcgtgagcatgtcggtggaagagaggctaggatggattcaaaccattatggaataatttgagcttaatttttattttctttgtttttaaagtttttaatttggattcaccaaaattattatgaataaattctttatcttattcccaaacttcaaaactctagaaaacttgaaataaaaaaataaaaaactggtcaaagttttgttagatttcgattagattataaaatcatttgttatagagttcatatctattagaaaaccaaatgacatcatatatcactgaaaatagacttccacgacagaatgaatagtgattcagtttaaatgaactcagatgttttaaaatctgataaacttcaactctaatggagttgacttcaacttcactaaccaataacaccacctaaacttataaaattcagaaaaataatcataaaccggaaacaaagctaatt

SEQ ID NO: 5594 - DNA, 3000 bp, Unknown
  misc_feature (1)..( 3000): cDNA_ID_3077764_gDNA_ID_1620804_Annot_ID_168772 3000 nt of promoter + ATG
tcaccaatgtgagagaatcaaaaccataggaagcaatatatttatatcagtgacattagaaaccaaaccaaatctgacaaaaagttcatgaggatgagacacttcacacaccgttttctgtagctgaggtggagccttaacttgcgttgtagcagaccttttttcattcataaacggcaaaaactctgcaatctgataaacaacaccaaatcatgtatatatgattcaaaccaaagatcaatgatttcaacacctaatgatgaatctgatgattattaccattgtagatcgaagcaaatgtgtattgacgctgtggccttcatataaacgtgaatacgcactttttccatgagcttcaggaactggaaatgtaaactaaattactccaaaagcatcacttcacagtcacattcaatggagaaattgagaaaaattaccgtgacaaagagaagaatgatagcttctccaacaaccaaatctgaaatcatctccaatttgaatcaaagagaactcatttccattcctaaatctgaagaaaccaatgatgaagaaagctaaaaattgaatctttttggtaacagaaacgattcagagttcaatttcacgtattttcctaaaacgcaatcaaagttaggaaatttgcttacggaagagaagaagattctcttgatccagctgttttcaataaagaacgaactgtttgaaatcttctcacgagcgacattttttatctgggtgaagaaatctcaaagaaaaaccctaactttcattgatctcaaattccatcgaaggatttttgtctgtgctgattcgactgttcaatcggaagggtttaaggcggaagagattggctacatcgcggagcactgtatctccgtgtgccttctcttctagactgaaaacgtggacacacgtttcggaaacgcaaacgcaggtttttttcacaattgggctaaaacatgagcaaggtttcaactttcaacaacacaaccgcagaaaatcacagattttgagcccaaaacgcataatcagtaaaaacacgttctaggactttcgcggtacaaagaatcttgatttgttatctcattatacagaacatcaatgaacatattacatcaaccaaaaataaacagataaacgaaaatggaatgacaaatgtgtctcaaaacaatatctggttatcgcatttggccagtttgttcttagtcccacattttcgagtcgactagagagcgattttcgagttttctgttagaagaagctgccttttgactatagaatagtgaaagaaatggcagcagatcggagcttcaactcatcgtctttccatttggattccggtgcagctgctccagcgatataaaccttttcaagattaagaaagagacgcagagtgagtaatgaatctcgaaatatgaatgtcgaggagtaatcaaatgtgtgttttgcagcagagaccttccctctgttcacagaggctactagagctatgcgttcttcatctctaccaaactcgtagaagtagtaatttctgcagatataaataacaagaatttcaaacagatgagtcctttggaaattctcctatcaagaacattgattcccgaaccgatgggagtatagtttgaagctacttgccttaaaccttcttcttcctttaccttgattgtacgagcagagtaaattgttgccgcacctgctcatgcataaagaatatcaaagacaagattctaagcaattttctaatatgtatatgatttagcgaacctggaacaaaaagtcttgcagctgccttcaatgatcccaaatcagatatatctttagcctatttgaatcagagatcattcgatgagcttagtgaacaaggcaaactgatgactgcggaaaatgtaaacttgtaaaggaaatgactttgcagtgcaaacctctaagaaagtgatcttaagttgatttgaaggacgaatgactacactcaaaacttctgatctgcatacacaaatgatttatcacacaagttatcctaatggaaatccaaagggattataaaggaagaggaacaaacaatacccatcaggagtttggaaccgggcggcgaaagtttgtggctttgccttgtcaccatagagagacaatcccgcagagtaatcctagaggatgaggtaacacataatgtcaagaacaatgatcatttcatcccaaaaaaggaagtagcaccagttttcaattcaagcttaagattctactgatcttgaaacacagaacacaatgtaacagtaactcttaaacctcaaaatcaaattgactagaacaacaaccattgattcagacctaacttggcagctaaatacattgatcactaaaaagtctacaactttaaccaaaggagcagtctttgcatcgctatatcactcattgattcgtattcataagagattggtcacagagtttacacacctcaggctcattgacgtcttcaaagtcaggaggaaccctaatagcgaacccactaccaaagtactggaaccaagacttagtgttcgcaatgccgagtcgtaacggtttggtagacttcaaaggatcagctaatgactctggaatttggttttgaaagatgaaggagacgaaacagagtgatgctgttctaagcaccacatctctccgaaaggtagcagaagaagagagaattttgggtttataagggttttgaggtttagggtttggtggatgaagagagagggagtgaagtagaatggccatgagaagaggaagaagaagaagaagaagaagatagaagaaggcttcattgcttcgaatggataagaagtggggagattctctgaagtgtttagaagacaaatgatggtgcaaggcgaagggtacaatagaaatttcgttttttttgaagggttatttggtccttttgtatataggcccattaggcccaaagtttgcatgcttttgatgtggctagtgatcctcggagcttgacacggtgaagtc

SEQ ID NO: 5595 - DNA, 3000 bp, Unknown
  misc_feature (1)..( 3000): cDNA_ID_2156150_gDNA_ID_1620805_Annot_ID_168814 3000 nt of promoter + ATG
atttgagatcggaagaaacctggagatggagagggtcctctttctggctcatttgggatatctccatccatcataccgacaatagaaaaatttggcatagattccgagcaccaaaggttgaaatccatatctgcaaaagagggaaagatggaaaataagacaaggttagagcaataatttataggagcaacgtatccctcaaaatccatttttttccatcctagaatggagcgattcgagggagaatttatgttgtccagctaatcatgcctttaaatttgtaatcgagaatataccaaattaaaaggtagtaaaagttttccataaataaaaatgggttgaagcccgttacgagttcaaccgaagtaaaagcgagttaaaataaaaaacattagttcggggacatttttggaagaggctcaggaacagactccttcatcgctggttcagcattcgaagtggacgtttcgttcttatcatccaacttgggcttggttttgacgtgtttccaggtgttgctgtcttctccttcatcatcatcttcgctttcagaagggatcacttcacccgacgcagacgcaggtcctgaacttgacttcaactgcggaggtacatccgaagcatggtcgggatcttggctacagaatcgaagttcctccactcccattgaaagggatcgctttccagagccctcacattcctttccacacaagcgatgcgcgcctcaagcatctgcctcttaagacccgagcgctgcctctcatcgcacatgcggtggtgtttatcgataacctaacatggaaaacatgtgaaaatagggagagagtaaaagagtcttcaaagagagcggttaccgaccttatccacgaaatcttacgcctctttcttatccttcagaggaaagtggaaggcaacatgtgggaacaaaacaccggacaattcaaaaccgtcgcaggacaggaacaattggctgaccagctcgagagggcaaattgtggacgcgccttctctctccatctttgaagtatcatagagggaaatttcagaaataatgtttggagggagttaagttgactagagtttcttatttataggggcttagggttaccttggaaccagaagctcaataatggtggcgtgtcagaatggattaaaccatttttagaaatcgagaaagtaaaattattgccttaatggcgtgtagtttttactattttcgaaaaacaaaaaagaaaaagcaatcgtcacattaaagataatggcccattaatgtcgaataaaacaatcaaggtctaggcccttacatttaccgaattgactaagtggggaactcgtgttaagtcgagctcagttctcgcattttatgaggaaggtctaatcaacctaaattctcaaagcctaaccacaaggtcaatttctaagagtgtggactttgcaaacccgcataacaactgagaaaccctctatggaataaaaattgaaaggtttaaaagcctcctcaagcaaacagcttgttcaagaaattgagcctccataggcaaaaactaacttttcaagaaatttaaaataggcttttaaaatatttgggacatgccccagtttaaagtggtcacagccactacgaatcagttgccatctcgaattctttcagctacgaaaggatctttaatgagcttttgttcggctgaaggttcatgagcggtttctaaaacattctcatcattcaagaccatcaccggatcgttgttcacaatcaaaggcacctttggttggatagagttgtatttgatggttgggatcagtgtgataggcaccccggcctaagaagaaatattcaaatcaattaagagcgtaaaatacacaaataataagtcttgaaagtagaaaaactcacaacccaatcaagtcccgtttcacctaatgggggtgactcggtgaaaaattcttcgtaaagttgaggatcaaagggtgaagcagggaaagccgcaagacgttcttttttgtctttcaaagtggcattcagcttggatctctcttgctcctcaagaaaatcgtcatcatgagtctaatccaactagagtaggttgctcttatactccttgatgtccgattcgagctgcgattgagccttctcagtttgaataaagcggatggccccctcgatcagctccattccgtgatctttaacctcttttctagccttcgaggctgactttgccaattcggaatcccttagcctgacaagcgccttgtatttgaagtcgagctcgacgagttggttgttcgaagcatcgacagccaattcggattaacagagtctgtcttgaacacccaatagttcattctaaaggctgtcatatccaccatactaggcttgcacttcctcaattcgacaccacctaggtgtcgctcgacaccaaagaggatatagagctgcaactattgcaaatggacgtgctattcaacttgatgactacaacacgccagatatgttctatgctagtcattccagctattctactcaccaagcccaccctccacccacttctacgagtatgatggaatacatgctataatagattctcaagagccaagtgatgacgaatgaaaggattgatggtctgtatgatgatatacaagacttgaatgctcgattcaacaaagaggatgttattgtagttcagtcaaggagtgaaattcagcaccagacctctgagaaaccccacacgactgcttgcgacacttatttacataaccactcaacaccaagtctcagtgttgaccaacacgaccttggtgtcaatcgacactcatcaggaacagaccatgattcaacgtttgaaggagcgaaatcgagcaagctcaacaccaaagcgtcaacaacagatgatagtgtcaatgaacaatggattgatgttgagatagctatgttcatggtacaagcaagcaaccacaagacgcagctgacgaagcagttgatgggaatcatctgcagcaatg

SEQ ID NO: 5596 - DNA, 3000 bp, Unknown
  misc_feature (1)..( 3000): cDNA_ID_2156203_gDNA_ID_1620805_Annot_ID_168828 3000 nt of promoter + ATG
gggctagcctatgatgatccagtggatgaatccacggacccttgggtgtgataaggatatagttcggatcgtatggatggatcaataagccgaaagctttatcgaccaccatagaccagacgaataaacagttagtaaaccgtaggcggtcgtagtaaatgaccggatcggaaacatggattgttcgataagccaagggctcaatcgtccaccatggaaccgaaggggagtacgtttagaggacggatggatcaataagccaagagcttgattcggtcatcgtgaaccaagggaatcgtacgatccccaatctctatcgttgtacttagaccagtggggttggttggttgtatggctaagtaacgatagggattggttcatcaattcacgaccgatgacgagtcgttgaacgaatggagtaaggcgacaaacgggctaaggaatcaaatccgcatattggccaaggtatgtaacgatctagcttattagttaagatagacgtttggtaattgatcgtgaaagtaggataaaggaatatgcgattgtttggcttagaatggttagcgaacatatgcatgtcttgaccgagtaaagaatcgatctaagtctaagggacaaagacgatgaaaccggtacaagagttggttagaattaaaccaaggttagaaagacttccgctgtgtaataagagagcgattatagaatttagcctcgtaaaggcaattctatgttgaatcgcgaaaaattaagaggttcggccggggagaggcgcgaacttgagtactacgtcgctggacgccgagacgtccgggactgggtctcacaagttggtatcagagcatgcttgatcctaggatggataggtgctcgggaaaacgtcatagtaaggttttggcggataaggaagttgagggatcgatgtgtttggaaacggaaacagttacctaactcacgatcaggaaccaagatattatccttgttgtcaaaacttaaacatgacgggaaaatgggttgatatattcggagatggaccgatatcaatgaaatttggatctagtcggaacttgactaagatcgggtacagacttagtcaggatttgactatttctggggttttgatcttatcggaaattgaccaagatcatggaaaaacgacaaggtcggaagagacctatgtcgggaatattgaccgagtccggtggggaccagggtcggatatattgacaaagtcagaaaaagacttaagtcgagaatatgatcgagtccgggaaaggaccaggatcaaaaatttgatcgaatgtcggaagagacaaagatcagaaaacattgatcaagtccaggaaaggacaaagatcgggaaataatgatcgagtccgagaaaggaccaggatcagaaatttgatcgaatgtcggaagagacaaagatcagaaaacgttgatcaagttcaggaaaggacacagatcggaaaacgttgatcaagtctaggaaaggacaaagatcgggaaataatgatcgagttcgggaaaggaacaggatcggaaatttgatcgaatgtcggaagagacaaagatcagaaaacgttgatcaagtccaggaaaggacaaagattggaaaacgttgaccaaatccaagaaaggacaaagatcagaaaatattgatcaagtccacgaaaggacaaaaatcgagaaataatgatcgagtccgagaaaggaccaggatcagaaatttgatcaaatgtcggaagagacaaagatcagaaaacgttgatcaagtccaggaaaggacacagatcggaaaacgttgatcaagtccaggaaaggacaaagatcgggaaataatgatcgagtccaggaaaggaccaggatcggaaatttgatcgaatgtcagaagagacaaagatcagaaaacgttgatcaagtccaggaaaggacaaagattggaaaacgttgaccaaatccaagaaaggacaaagatcggaaaatattgatcaagtccaagaaaggacaaagatcgaaaataatgattgagttcgggaaaggactaagatcaggaaacttgatcaagctcggaaatagagatttgatcaggaaacttgatcaagctcggaaatagagatttgatcaaatatgatatctaaagtctcggagagactaaagatgggaaaacgttaaggagtaaacaagatcttacatccgctgaattcgaggacaaattcagtttaaggggggtagacttgtaacgcccgtgtcccaagttagggagtaaacaagatctctcacccgccgaattcgaggacgaattcagtgtaaggggggtagacttgtaacgaccgcgtcccgcgttcataaagaggcaggtttgttttaggagaaaactagatcatggtcgaggaacggaacaaaatactaagtaggaagaacgagaaagtataagctaaaccagctaggtgagctggacaagctgtatgaactagctaggtaagctatgtgagctaaaccagctggaagactagctagctcagctaggtgagctgaccgacagctcgactgagcttggtgagctgatcaagtactgacccagctgggtggtccggtcagctgacactcgagctggtggactgtggtagctcacgggtgaagaggtgtctcggccaaaaggtgtaaggtcgagcgggtaccaacgaacgtttgcatcgcccaaaggatgcaaggaacagatgtgacctttcgaaaggatgcaaggaacggatgtgaccttccggagggatgcaaggaacggatgtgatgcttcgggaagcatccattcgccccctatataagggaggacgcccaaggcatctcagatcatctcagaacatccaaaacaccataaaacattcttaaaggagccattcttggaagaggtttaaaagctacaccactcagtgcccctatcatggtttttagaaggcttcattattgagcacactctatagaggagccttaccaaagatcagaatg

SEQ ID NO: 5597 - DNA, 3000 bp, Unknown
  misc_feature (1)..( 3000): cDNA_ID_3077800_gDNA_ID_1620805_Annot_ID_168825 3000 nt of promoter + ATG
actcgacgcgatattgagcagagtgtcaagtaggatccgtgggttcagaacgagcagaatgttgagcaaaattagtgggatcaagatgggcagtactcggtaatgaattggcatgcttactatggcatcaacgagcatgaaccttcacctgaaaactgaggtaacaccacctctccattgtatatactataacatcgttttcatttttatttttctttgtgtgttttgtgctttggtcttgaattttctttcagatttttatttcacaagggactgtttaatttaagtttgggggagggttcaagacatgtttaacattgtgttctcttttcttatttcaaattttgcatcatctaaggcatagaaaaaccataaaaatttgaaaaattttcagaaaattatttcataaaaaaaagagtgtcatgtagattgtatatcattttaggattgtatatagagtgtttgcatttaggattgctcatttgcataggggataatgatgatttcaaaccgattagcatgttttgattcaatgaagtaagttcaatgcccaagttgttagttctctgttgcataaccgattgtatctctgaaataagaccgcaccttgctttgaatttgtaacttgactatactactttgatcgaaactcgcttatctgatgtgctaagattagaagaaaaaccttaagtttgtaaaagtataaaaccaaacccgctagactcttaaatcgtttcaagagaaccccttagaacatgaaccaaaaaagagagaaagaatgagaaaaagggtagagttaggaaatctatgggaatgggatcatcttctgagctatcatattatatcattgggtagatgggagtctgttcttgtatgtgtccgttggcttttacctttagcattctactgaagctcaatgttttctctgagagtcccctgttactcgaccaaaccattagagggaccatttttgtctcttagcctaagcccgaaaccaagtgagttcataaccattgaattgcttgatccactgtttgtgcttaatgaatgttaaagggaattggttgatgtgaatgcttgaatagattaaggcaagttgttaggttgcaattgtgacgagtatggctaacttttttgagtaagggtctatcatcttgcaatcagaattagctacctggacattgagcttacccattttataggcatgcttcggtttttgaatccccaccttcaaacctctccttcaacttaagattttttgtttgcttgagggcacgcaagagataagtttgggagagttgataacactgtattttactcattttaggtgtatgtttatcattatttagctttgcatttgctcaatgtatcatatcattgtgcaccattttagcttgttttgcatacttaggcatctaggatcatcttgcattcgcattgtatgttttggtgtgttttcaggtgcaaaaggagcttaaaagggctctactcgatccattcactcgatccaagcagctacagaagaggcatcatcctactcgacctctctactcgatccaggatgctacaaaggaggctgcagtttactcgaccctcctactcaatcaaggcaacctcagatgaagcagcaaattcaactactcgaccctcctactcgatccattactcgatccatttactcgaccaagggtgaccatctctacaacacttgttgagatatcaaagcgtcttcggatcctcctcattccccactcaaccatacatctgagcatacagataggagaggatgaagcatctactcgaccaattgatcactcggagcatagacacaaaggcgcagactttgcagcaccctctttactcgatccccaaggtcgagtattcgcccaaaccgcctcaagtctcctgtcttctagtgaatctagggtttccaacattttagtataaatagatcatttggggtttgtccaaaagatctagactttatctttcagtttttctttgtgtttatgaatcttgaaacttaaattactcttaatctatttcgtttttgcatttagttgttttagtaaagttgtttagcttgtttagatctacattttggtatgattttagtaatttctgggtttgtgttcttgagaatgttgcttgaatagtgattagggttcttgaggatggattaaattagggtaatctctaggttagttaggtggttagtgtttaggtttatacccttctggattcgcttggcccctatgcggtttttgctggctaatgtggagattcgatcatagacgtccagcgtctaaaataacgccctgctctgctatgtttcatcaacgagagttgagattaggaagtggtagagttatgggggtctctgtcacgagagtggattgacctggtttttgaatctatcgtcatgggtatctacctttcgcctattagccatttgatgaaccctagagttacccttatcaatgaaactatccttagaacttctattagatcgattttcatcccctgttgattgcatttttatttacctgtcatttgcatcctctattttcatcccctgttgattgcattttaattcttaattttctcacctgttggttctactcgacccaatgatcgagtagggcttttaaagttctcatttttacttgtttgaatcctgacctaggattgttactagaaacccaccatcattataacctggcttgacttagtcgtttttgtacatatcttgattgctagcaatacagtggactggattgacaccctctataactgcatcgacatgtttgtgttttagaggaattgaactgaacacacactcttcagtataagcagacttgaaaaacctgcttatcagttggttcaagttcttgagagtacaaacgagtgattgagagttgtgagagaaacgtttaatcgaagatcggagttgtaacagattggtatcagagcctggttataggcaaaactccatcgatg

SEQ ID NO: 5598 - DNA, 52 bp, Unknown
  misc_feature (1)..( 52): cDNA_ID_1828945_gDNA_ID_1620806_Annot_ID_50529 3000 nt of promoter + ATG
aagcttgtgaaagtctctctgcaaatcttgttgctctgttgctacaacaatg

SEQ ID NO: 5599 - DNA, 3000 bp, Unknown
  misc_feature (1)..( 3000): cDNA_ID_2053446_gDNA_ID_1620806_Annot_ID_168876 3000 nt of promoter + ATG
tccagagatttcaacgcctcttctgctttaccgtagagaccgactttaatataaattgctgcaagattagcaaatgtattccaagagaaaataccttcaccttctgctttcatttcatcaagaaccttctctactccatctaaatcctttaaacttccacagctttgtatccacatggagtaagtaatatcacaaggagtaatactcttctctttcatcgcaacaaccaatgcaggcaccttctctggttgacctagccccatatacatagccatcaggttattaaacggcaaagaattactcacatgattgagatcaaccatattttcaaaatgagcctttgctttaacttcctccttttccacacagtaacagttcaataaggaaccataagtggactgattcttaatagaatcgtctaaactgttgaagtaggtctcagccgcctctaagcctttactctttgcaattagattcaaacgaatcgcgtgatcgctgccagtaaacgctatttcctttctttccatccactcaaagatctacacataattcagaaaaactcaaacactatacacatttaagcttcctatacaataagcctctaacaatggtggctaaaatcaattccaaaggaaagaggagacaaacctcgagagcgcgttgaggttgacgaaacttgcgaagatcctttgcgtagcgaatgaggtcgtgttttttgacaggtacgccttccatgacgaactgatttagcgtttcctccattttccctcctcccctcgtgccaaggcttgagagtttcttgtatattgaccgatgctttttcgccttcgtcggaacagaagcagcagcctcgccgctaatctccgccgtagcagtagcgagcgttgcacagaacctcctcgcgagccgtgaaacggaatgcatcatcagatttacggattttgaatttttttctgagtctcactcgaatctatgattttgctagggtttaaaaggcttttagaaaataagaagtcgaacttcatgtcgtttttatataactaaaaacgacatatagtttatttttgtaatcgtctctcttttgttattggagcagaaaaacttgtaaggccagaaatggctgttcttatccaggttcttcttcctcctccgacgactatcgtcttctccaactcattttctacaaagttaatactcacgcgtcgtcttcgttgccgtatctctaattcgtcagaggtggttccaatttgattttttttttttaaatctcaattcgagcaattttgtacatatatgaaatgtgtgattttgaatttgattctcaggttaaatcagatgaaggagctccgaagttggagtataagccaggacctctcgacgatttcttcatgcaatcgttccggaacaaattggtcgaggtgagttgtgaaatcgattttttttttctggtttcttcatgaattttagtgttttgatttggagtggtaattaggttttaacattagtctaatgatcttctttatgttcaagtatgtgtaacaggaagtcgggtcggattcagagaaacccgggtacgttggacttattgagttggttaagcttctcttgttgaaaggtcgtactaggtcggagacaagtgatgctgcggtacatttctcattgagaagttatatttatagacactttaggttaaagttctgagtttttggttcttttttggttgatacaggttcgaatactgaaatcgttgtttcctccgctaattttagagctttacaagcttctcattgctcctatagcacaaggaaaattagctgctttgatggttggtgagttcttttgattcttcaatcttccatgtcaatgaaaagttgtcaaaatattggtaacaattagtgttttttgtttcccattgaagcaagagttactgtacttacatgtcaatggctcatgggaccgagcaaagtaaacatcatcgatcttcctaatggagaatcttgggatagcggggtaatgatgatactggaactatgcatctgtttcgatatgatttgttttgtcagttatttttctatcctttgataacgaagaggagtttgatgaatccaagtaggttttcgtggagaaatgtcagtatctagaagaaagcaagtgtgtaggagtatgcattaatacatgtaaactaccaactcaggtattcttctgcaatttaacaagccaatcaaccgattattactgtaacaagacatgaatttgattaatccctgaaaatgtggatttcgtttttttttccagacattctttaaagactacatgggagttcctttggtgatggaaccaaacttcaaagattatagttgccaggtacatcttgcttgccccttctctaaacaatagacatatcaactctaagttcatggatttacttatcgtcattcatcaactggtattaatcaaaattaacatgttgatgtttttgaatgttcccatttctattagcatcttctttggccagttattaacttcatgtttgaatcataacagttcaaattcggagtagctccaccggaggatgatggcaatgttaatgaaccatgttttgagacatgctcaatcgctggccgccggaaattaaaatccggggagtgtcctttagcgtaaatatatcgtttttatgtccatacactgacattttacgttgtgtaataacttgtgtatatcaacattctagctttgattacgaaagaaaacacaaaatttctttaactaagatctaatccaatttttatgaatatcaaagggtattataagaaatgttgtacatgtgaggttttacattacggtgtgaaaaagaataaaacggttgacatctataacgttcaaaggggtaaaaattaatcgaatttgtggaaaatcaaaaaatattagaaggtcatacaagaaaggtcggacatgtgaaagagaaatagaaatctagttattttttttgtaaacctgaat

SEQ ID NO: 5600 - DNA, 3000 bp, Unknown
  misc_feature (1)..( 3000): cDNA_ID_1828875_gDNA_ID_1620806_Annot_ID_168874 3000 nt of promoter + ATG
tggagagtgtgctgcaaatgcaggtccggagaaaggctggatgttagaatccctttcatccacattttttctaagaggtacctgaggcaaaggacctgcaaagtttggtaaagaagtagctcttgtatgagggtaatatgcagccaccaattcatcaggatttaaaggaggatgaggaatccttggaggtggatcgataggagtaggaaacgaactctcagacatctgagattgtgaattcattgaagatctcagattttcatctctcatgaacacctcttctctaacattcctttgagcagtggagttagtcaccctatggagaggctcaatctgacggtaaggacatgagttcctgtgatgagtcattctgaagcagctactacagattctcctaagtctttcatactgaaagcttatcagagcagcctcaccaaaatcaaaaatgattctttggaaaaacctcaggcgatctgtaattccaaaccggattctcacacggatataagctatttgagtcgtggtggagtcatgaaaatccagagtgagaatctttcctaactcatgtgctatctctaaagcagtttcctcacacacatacaaaagaggaattccacgcatctgaacccataattcaatagatgttaacaggtgaaacgtaagatttacctcccatctatgagttgtcacaaaccagttgttatacaaccaaggttcccttcgtagtactgacaggagatcaatcgttagagatgtcatattcaggtttacaaaaaaaataactagatttctatttctctttcacatgtccgacctttcttgtatgaccttctaatattttttgattttccacaaattcgattaatttttacccctttgaacgttatagatgtcaaccgttttattctttttcacaccgtaatgtaaaacctcacatgtacaacatttcttataataccctttgatattcataaaaattggattagatcttagttaaagaaattttgtgttttctttcgtaatcaaagctagaatgttgatatacacaagttattacacaacgtaaaatgtcagtgtatggacataaaaacgatatatttacgctaaaggacactccccggattttaatttccggcggccagcgattgagcatgtctcaaaacatggttcattaacattgccatcatcctccggtggagctactccgaatttgaactgttatgattcaaacatgaagttaataactggccaaagaagatgctaatagaaatgggaacattcaaaaacatcaacatgttaattttgattaataccagttgatgaatgacgataagtaaatccatgaacttagagttgatatgtctattgtttagagaaggggcaagcaagatgtacctggcaactataatctttgaagtttggttccatcaccaaaggaactcccatgtagtctttaaagaatgtctggaaaaaaaaacgaaatccacattttcagggattaatcaaattcatgtcttgttacagtaataatcggttgattggcttgttaaattgcagaagaatacctgagttggtagtttacatgtattaatgcatactcctacacacttgctttcttctagatactgacatttctccacgaaaacctacttggattcatcaaactcctcttcgttatcaaaggatagaaaaataactgacaaaacaaatcatatcgaaacagatgcatagttccagtatcatcattaccccgctatcccaagattctccattaggaagatcgatgatgtttactttgctcggtcccatgagccattgacatgtaagtacagtaactcttgcttcaatgggaaacaaaaaacactaattgttaccaatattttgacaacttttcattgacatggaagattgaagaatcaaaagaactcaccaaccatcaaagcagctaattttccttgtgctataggagcaatgagaagcttgtaaagctctaaaattagcggaggaaacaacgatttcagtattcgaacctgtatcaaccaaaaaagaaccaaaaactcagaactttaacctaaagtgtctataaatataacttctcaatgagaaatgtaccgcagcatcacttgtctccgacctagtacgacctttcaacaagagaagcttaaccaactcaataagtccaacgtacccgggtttctctgaatccgacccgacttcctgttacacatacttgaacataaagaagatcattagactaatgttaaaacctaattaccactccaaatcaaaacactaaaattcatgaagaaaccagaaaaaaaaaatcgatttcacaactcacctcgaccaatttgttccggaacgattgcatgaagaaatcgtcgagaggtcctggcttatactccaacttcggagctccttcatctgatttaacctgagaatcaaattcaaaatcacacatttcatatatgtacaaaattgctcgaattgagatttaaaaaaaaaaaatcaaattggaaccacctctgacgaattagagatacggcaacgaagacgacgcgtgagtattaactttgtagaaaatgagttggagaagacgatagtcgtcggaggaggaagaagaacctggataagaacagccatttctggccttacaagtttttctgctccaataacaaaagagagacgattacaaaaataaactatatgtcgtttttagttatataaaaacgacatgaagttcgacttcttattttctaaaagccttttaaaccctagcaaaatcatagattcgagtgagactcagaaaaaaattcaaaatccgtaaatctgatgatgcattccgtttcacggctcgcgaggaggttctgtgcaacgctcgctactgctacggcggagattagcggcgaggctgctgcttctgttccgacgaaggcgaaaaagcatcggtcaatatacaagaaactctcaagccttggcacgaggggaggagggaaaatg

SEQ ID NO: 5601 - DNA, 3000 bp, Unknown
  misc_feature (1)..( 3000): cDNA_ID_1031484_gDNA_ID_1620806_Annot_ID_168865 3000 nt of promoter + ATG
actcttactctgtcttagatactctggcttttctttacatataggagttgttgttaatgttgtgtgtctgtgtttggttttagaccttggagtcactagcagaagaacatggaggacgagtggagcttgctaaagcttactacgatggtctgaccgaatccatgatcaagaattttaatggaactgatgtcattgcgagtatgcaacagtgcaatgagttcttcttccttgccacaaagcaaatctctattggcagagttggtaatatatataaagctaaagccgtttcttttgattccactagtgtttgagcattaacaaaagttttgaattttgctcaggtgatgatttttggtggcaagacccatatggtgacccacaaggagtatattggctacaaggagttcacatgattcactgttcttacaacagtatttggatgggtcaaatgattcaaccagattgggacatgttccaatcagaccatgtctgtgccgagtaccacgccgcatctcgagccatttgcggtgggcctgtctatctcagtgaccatcttggcaaagcctcacataactttgatctcatcaagaaacttgctttctttgatggtaccatcccaaggtgtgtccactatgctcttcccactagagattcgctcttcaagaaccctttgtttgacaaagagtcaatcctcaagatcttcaacttcaacaaggtaatcagttttaaatcaaattcatcgtttagagatcagaactttattaaaaccccatatgatttgttgcagtttggaggagtgattggaacatttaactgtcaaggtgctgggtggagcccagaggagcataggttcaaaggatacaaagaatgttacacgacagtttcgggaacagttcatgtctcggacattgaatgggatcagaatccagaagctgcaggctctcaggtgacctacactggagattacttggtttacaagcaacaatctgaagaaatccttttcatgaactcgaaatcagaagcgatgaagataacccttgagccatccgcgtttgacctgttgagtttcgtgccagtcacggaacttgtaagttcaggggttagattcgcacctctagggttgatcaacatgttcaactgcgtcggaacagtccaagacatgaaggttactggtgataacagcataagagtggacgtgaaaggcgaaggaagattcatggcgtattcgagttcagctccggtgaagtgttacttgaacgacaaggaagctgagtttaagtgggaagaagaaactggtaaactcagtttctttgttccttgggttgaagaatctggtggcatctctcatctgtctttcaccttttaataatttgtttggatttttgtttttcgttttccttttcttgcattttgttatcagaagttgggttgtcaatttctgtttggtgttttacttttcaatttggagacttctcaaacaaattttaatatcaaatggattttctttgtcggttaaatttgagatttagtcaaatatcttttaaattatattaaaaaggtcaacatcattggtcaatttattaaaaattattctaacgaaagtaaactttaataggtttggtccaacatcattggtcagattggttcgagttatgcgtaatttttaccaatagttgtatttgtacaattgagtattactctttagaaagttgctgtttttttttgtgtgtgtgtatgtgtatacaagaatcacttttgccaaaagttaaaaagaactttgtttgtttctgtttggatcatagtgaatgttaatgaaggaatgacccatgatgttgatttctagacaaggcaatgggaccgtaacggctaattttttgtataatacatacatgtatacatgtgtctaacctatatgaatacatgtgtctttaacatgatcatattgcccagtgaaaaaagaacaagatttattcgagttctataaaataaatcatggatagaaaaataaaagaagctttatccatttatagtggttaactttaaaacaaataattaactggtacattggtgttttaatatcctaatttttcttcttttttcctttctctgttttgattagctaattataaacttaattaaaaactccattgaaaaaagaaaaacaataataaaaagaagaccaattttcaatttgttttcggcgacattacaatccaaaagacattcttgtgtgttgtgtttctttatttttagtattaaaaaaaaccagatttaatcgggacacgaacaaaagagaaaagaaaaatcaaaatttttgacctttatgaaccctaattttgggttggtcactctctctctctctctttcctttcccaaaattggattcaaagttctttctttttgtcttcctcgtacatcacagcatcaagggttttcgacattaccagctattatgcttgaattcgtgagttttttaaaggtttcttctggggttgtttgtttgttgtctgaagaatttctctgtttccttctcgactttcgttataaagttgaaatctttgatgtattagaggtcttctttctagattctgggtttcataaataggtatatttatgttgcattcgttctttgaattggagaaaatataaataaagttcgaagctttttctcgtttagcttgttccagaaattagaggatttacgaaatatgattttaaggtatcactggttgtttggtgttttcaaaaggcttaggtgatttggtgatgttagggttttagctatttatgttagcatttgtgggtaacaaaatttgtttatgtttctttgcagttttgttgttatgttaatcgtatttggtattattatcttgtgcatatgttaggaggacgcaaggagttaaaagagcaagtcttttgagttgaggaagcttctgtagaggattattatttcaggggaaatttaagggtttgatcagcttttgtgtgttgtgcgggatg

SEQ ID NO: 5602 - DNA, 3000 bp, Unknown
  misc_feature (1)..( 3000): cDNA_ID_1828887_gDNA_ID_1620806_Annot_ID_168863 3000 nt of promoter + ATG
ttcagtttttttggttgaaaaactaaattaaaatctcataaaccaaactaaattttatttggattcaaatcgacttagttcaatttaaatcgtatcacctcgccacctcggttgcattcgcattgaatacttcgtatgtgtatctctttaattctcatccgtatatgtagcatctctcgatcgtcgttttcaatacatctattattgttgttcttctttttggggtggttttgaacttttgatactggataaggactatggacatatgaaagaaaatacaaaaattgaattaaatttcacccatgttgtgaaattttttcatattccaaaaagacaaaaactaagttgttcaatttttttttgtcaaggtacaaccttaattatatatgaaaaagcaatgtacgtacattgcatgttgttacatccacttaacgcggatcatgcattaaaatcaactgatcgaatgatcgatagtcgaagtttaatttatttattttgtaagcttttcatcttcaacttcaagctttcccatgctatttctaagtcaactcttttttcagtttctttctattattttcctccattctctctgttttttctttttaacgtttatttgttttatttcctaagagcatccatatttatcatttttatgagtgtctttaaatggttatttctaaatataaaagaaaaaaaaaaaagagagaaatacagatatttttagaataaaaattatgggtctgattggtaatcaaaagctgtacaagttttttacctgttagctggagatgttaggtttttcggaatagtgcaaagctgttagaaagaactgtataaaaaatttgtaccaaaaaactgagagtaaaactttttgtaacgcttttgataaagtttttgtgattgataactgttaaagttgtaccgtattaccattcaaactctatatcttcctagagacatttgagctttacctttaatattattttatgtgaaagacatcatgaaaagttgttgaatgttgaacgaggatggtctaagagtttctttcttcttatgtatcatttcctaagggtttgccccaaaaaagtatcattttgtgtttgggttttgagttttgacaatcaaacatttatacatcacatgatcagttacagactgtatttagatttatgtacgacagggatcggacacttagtttttctgtcctactatatatctaagtttggattttacaaaattcttagcgtgaacatacttaagtttgatcttattagaagataagattgtattcgattctttgtgtgaacataagctctgatgtgtgatccaaatatgaccaaataaatctcgataaatagtttgtgtatatatttgagcttaagctaacgaaaaataatcaaacattcaattcgattcaccttattttaggatatttaagcaatctgtttttttttttctctctaagtcgtctcggtttgggattcgttctattgaaatctttcttaacaaagtacaatgacgtacacaatgcaaattcttggagatgtgtattaatttagtaacaccgacagttaactttatatttcgaagtacaaaagaatgatatgaatattttaccatttgaccaaagttcaaaaatgaatagaaataaacttaagctagaaagagatccccccatcccacgtccacgccacaccacaccacacagtttgtaaacgtggtcggcgactcattagcattcaatgcgtttaactgtttttattaagataatctttccattttcaacattcagtcaccatttttaatttttatttttgtagtatgtccttaccaaaaagagattttgctcaaaagaccatccataccaaagattgcaaacatgtatggtcatgttggttttaatttaatttggaattagtttaggaggtgcatagagtgattagttataagctgtccaatattaattggatcttaaattcttaacaattatgaactacattcatttaatttaacaattattttgggccaacaaaatgattattttccataaatttaatatttgtaggacagtttttctttctttcttgttttggtatcaagactcgagataatctaatttgtaggtacgtggacccttttaatttcgttctcgtagacaaccgagagaagataatacaaaacaaaaactcgacttggtcctataacacatcaattaatgattcaatatatgtgtactagtcgtatgatttctctatcattagttttagtttcctaaacgtaagttcttgtcatatcaaaaaccctttaacaaaaaaaaagttcttgtcatatcaaacaacaaatacaagttcttgactttcaaccatttaatgaaacatcccaacttgtacatataatagtaatcaattcgaaataaaagtaagaataacctttacaggagaataatacgcaatattaaacggatctccatcacatatattttattgtttggttatgactgttaaagtacatatatgtaatgacggtttcagtttcgctttgttaaaaaattatgattaacaagtggaacaagacttgtaatcacgtacttgattagttatgtgtgttaatctccgattatacactaactttgactcgtgttattttatttaacaccacaaataattctacttaaatattaaacaaaagctttgactcatactctctttcgactaaaatttttggtctacgagtcatacacgcgtatacttttcaaatatactattacatgttcacttggtaatctcatttaatgcataatcatgcaagctgtacgttaacgatcaatggcaatttcttgtaaatttgcaacacgctcatgggtaatttcgtcttggttttgttatataaataccccatcaattgctctccaacatgcattgtctgaaaccaaacaaagaaaatacacgaaggaaggaaaagaaaagtaaaaagaaaagctttctgcaaaatccaaacatg

SEQ ID NO: 5603 - DNA, 3000 bp, Unknown
  misc_feature (1)..( 3000): cDNA_ID_1976770_gDNA_ID_1620806_Annot_ID_168862 3000 nt of promoter + ATG
aagaaggttttcgagcggggagagcggttttgcctaaatactttctagaagatgtcggactcgagatgttcgaagtgttgaagagaggagggaagaaaatcggagtgagtgatgatcttcctcaagttatgatcgaagggttcttgagagattacttggagattgacgttgtggtcgggagagaaatgaaagtcgttggaggttattatctaggtatcatggaggataaaaccaaacatgatcttgtctttgatgagttagttcgtaaagagagactaaacaccggtcgtgttattggcatcacttccttcaatacatctcttcaccgatatctattctctcagttttgccaggtcagtctcttttatcattattttgtttgcgtttacgtttacagattatacagtttttaattatatttggtaagagattttttggaaatactaaacgagaatgttttaactactaaatattgaagcagccaaaaaaagaaactactccatatatgttgatatctatattatgacttgttacagtttttatatatatgatgaccgataattagtaaaaagcaacatagcatattaaattgtgatagtagtgacggtgatgaaacacggacaacttgcttgattgcgaatatgaaatattaacaacataacgtcaaaaatattaacaacatatataaaaagggaaaacaaaaggaaagaacaaatcaaggcctatatcattaaatacgaataagaaacgacgacagatcctgtgtgcatagttattagtcatgacaatgaatatatctcgtcgagttgaatctcaatacctgtaattgatttttgttaggtattttcattcattgttttcatgttatactcaactgattttcttgtccttttctctctaataggaaatttatttcgtgaagaaatcagacaagcgaagctggcaaaccctaccacgaagccagtaccctaaaccattgattttccatgatggccgtctcgcgatcaaaccaaccctaatgaacactttggtcttgttcatgtggggtcctttcgcagccgcagccgcagcagccagactcttcgtctctctttgcatcccttactctttatcaatcccgatcctcgccttttccggttgcagactaaccgtcactaacgactacgtttcatctcaaaaacaaaaaccaagtcaacgcaaaggttgtctctttgtttgtaaccataggactttattggaccctctctatgttgcattcgctttgagaaagaaaaacatcaaaactgtaacgtatagtttgagtagggtatctgagattttggctccgatcaagacggtgagactgacccgtgatcgggtgagcgacggtcaagccatggagaaattgttaaccgaaggagatctcgttgtttgtcctgaaggaaccacttgtagagaaccttacctgcttaggtttagccctttgttcaccgaggttagtgatgtcatcgttcccgtggctgtgacggtacacgtgaccttcttctacggtacaacggcgagtggtcttaaggcacttgacccgcttttcttcctcttggatccttatcctacctacaccatccaatttctcgaccctgtctccggtgccacgtgccaagatcctgatggaaagttgaagtttgaggtggccaacaatgttcagagtgatattgggaaggcgttggatttcgagtgcacaagtctcactagaaaagacaagtatttgatcttggccggtaataatggagtagttaagaaaaattaaaatttgttttaggatgatgagtgagtgatgagttcggttctttgggtatgtaagtaaccaatcgattatttcatttgtttattaataatgtctacgtaaatgtaactacaatctttttttcttggtaatgtacacatatgttctatatcatatccaaaatctttgtcagacaattttgcctttcatgcaattctagtgcatatataaaacaatggtccacaaataatgtaacgaatcatctatattaattcggacaacttgaaagtttctattaaatttctatatattgttttcgtcggcacatgcatcataaatgtttttaacggtctagcccaaataatgtaaccaaacttattgtaaatcatgaatacaaacatgaatggccttgtatatataataggctaatagctggttggttataaatgtgacctatagtttagtttttctttgtcaactaaaagtttatttactcttatataactatggcatattcgttggtcaaaatacatatattctatatatcaaaacgtaaagttattcgtttacgttcgctagggcctaggctctagtagaaaccatgtgagcttgcatgtgaagtgaacaaaaatcaattcttaatataccgtactcgataaaaaagttagtcaatcgacacttgagttataaaatttctaatgatcagttacaaaagtacaaaatgatatagacttttaagtcaattattacactttttgtatgtgtaataatgaatgatatgttattatatttcgtcttaaaagaaaattaaagttgtacagcagaaatcatttgtgttagtcccgtatggaattggacagaatcaaatatgtctgtggtgggtggtgtggccatcactgtcgcaactgttgtgtttggaagaagcaaagtcttataaaacaaatatggatttaattgattgatccaacataaaagaaaagtcaaactcactcacttaaaggagaacgaaaaaattggtaaccgacacgtgtctccgttcgtttaaatggattgggtcgtcatagtaaaagccatttatatcgatcggcccatttgttgggtccactgtttacattttctgatctgatcctttaattaaaaaactcattaattttaaggactattccgcaatttattgattcttctttatcgtgcttctgattgttttggttaacggatcaaattatcgaacgatgatg

SEQ ID NO: 5604 - DNA, 3000 bp, Unknown
  misc_feature (1)..( 3000): cDNA_ID_1715684_gDNA_ID_1620806_Annot_ID_168861 3000 nt of promoter + ATG
aattagataaggccaaagatctcatcaatcacgagcatctctgatacgattgatgtatcaagaagaatgtgaatgagagaaagcaaaagaagacacgtgcaagtgaggaggcacgtgagaagaaacttgcttgaagaagaagatatttttaggatctaaaaatatcttgaacaaactcagttcgagtataaataatggctctgaatgtttagagaggtttatgttgtttgttgttgaatggtatgagagacttaagagcagagctagtgatgtgctagtctctctcgtatggtgtattgagagctgagctagtgatgtgctagtctctctcgtgtttggtgtgttagtgagtactggtttggttaaggaataaaggtatcgatattgaaaacttaacaatctcgaaacacttgtaaattgaagaaacctctcaaagtctacaaaaatgctactgagagtgaaatcaatatcagaagaaacaacaaccattttccactgattaaaagataagtttttaatataccttttgaacagacaagactgatctatcgtgctcttcattttcaaggtgagattttgtagaaaacgaaaggcataacacgttagaaacagatcgatcatatccaattaaaattgcaagattcttagataaatggtacaagaaatctaaaagaaacctgcactcgctagacatctagattcagatgcaaaacaaagcgcaaaagtaagagcaaacgtagttatcggaggatccaagtctcttcaagatgataggaaaaatgcaacgcaactcacaatagctgcaaaatggacgagatgcactattattgagcaccacctcatatgatttttcccaagggtttattgtgcttcttggcatgagcaatgaaagggctccgaccacacactctatatgcaaactagcctggtagtctttacacgtgtagaaccatatctctggattggtttctttttcacaaatatcacaccaatatttaccactagccttttcgccatagcatagtgagagaggatggtcgtcaactctatgctttaccacttgtggaaaagttgcgcatttgaagcatatggcaaatctgcaatcatcttcaatgcatcctagcacatcatagaaaccatttttgcagccattgcaaatcttaatccctccatctggtaaagtgtgatataagggatgatcgggatgactcggatgaagaaatggctcagcaattgaaccgcaccgaacatcgaatgtgatgtttccttgatggtatctgaaaccattggaccatctatcacaagcataacacctaaagggttcagcttcgtttataacaagagtaagacgttcattgtgtagcacatgccatttcattctacgaaatccagcgcagttttggtggagaatgaagtcacaatccatacagccgtaaaaggactggagacagatgggatgggtgcatgcactgcaccacttgttgtcgtcacaaagaacaccattaacatggagtcgtaggtaatgctctttgtggctgaaatgttgtattgtgttttcatctattaccacatatggttgtatatcttctgtttcttcgggtactccttcaagctctttcccattccacacatcttttctagtagcacatttagaatgaacgacatagccatgacacctctgacaagaaaagcctccacaagtccaatccaccttctggtgacaaactccacatacagacttgacaacaccaagaacagatgttcgagaaacacggtgatcatgccgattaatgtttataacgcgtggaaggtcaagacagtcttgatgaatcataaaaccacattgaaaacatacataagggcttcgatctcccttcagcccacaagcattacatgtgaaagaatcgagccttgggagaagggtgagttggtggtcatgagctttcaaattcagaagagattgttgtggtggatttaaaacacatcgcatatccaaggtgaagttacacgaagaacagtgataaaacaatctatcaccaatatatcttccgcaaagacgacattttctgtcagaatagtccggtaatttacctcttacgagcttaagagggtgtaaggagtggtaaaaatggtttacctctaacgggagatttgactctgatgggcgccatgcgcaatcaacatggaatgctaaatcacattcttgacatttgtaagaaaactcataagaaagtttcccacatttatccccacagtcgatataattcggcttcttgtaaaggttgagcttgtggtgatgcgtctcggaaatgtcaataacttgtggtggtggatacttggcacaatacatatgcacgttgaagttacagatctcacaattatagaatagactcttgatagagatgccacataagttacagttacgtgtatgacctggtttacgtagaagctgaagagcgtgacttgggtgagatggatgctcgatatattcggaggacctatcgccacagctcttgtggacgaaaaaatcgcaggttttgcaatagtagccatcactgatagcttcaaaacgtctacaacaatcacctttcctcatatcattccaaggcaacatatgatgcttgtggatcaacggcagtgacactccctcagaatccatggtcaaaaattggatctgaaatctcaaaactcaaaaatcttctctcggtaatctcaacgatcgatgctcttataaaattaatcggaataaatataaatggaagaagaggtctctcgtcactaatgagaggaaaaggccattgggctagaggttaaccaagcccaaaccgaaacataatctaaacaaacctaagttcagttatctataatatcggtttagtttagattatgtttcggtttgagcaatttcatttcggttagagtcagtttaattcggtttgtttttcaaaaccatttcttcaaacaattccttcaatttttttgtatggataaaattggaaa

SEQ ID NO: 5605 - DNA, 3000 bp, Unknown
  misc_feature (1)..( 3000): cDNA_ID_1828932_gDNA_ID_1620806_Annot_ID_50534 3000 nt of promoter + ATG
gtcctcagattatccaacgtgatccacatcgctgtttgaactgtggagcatattcaaatccctatagctccatattaattggctcaggccaatggcagtgtgtcatctgcgagaacatgaatggaagtaaaggtgaatatgtggcttcgagcaagaatgagttgcaaaactttccagagctttcattgcctctggttgattatgtacagactggaaacaagagacctgggtttgttcctgcctctgattcgcggacatctgcacctgtcgtccttgttattgatgagtgtttagatgaaccacatcttcagcacttgcagagctctttgcatgcatttgtagactcgcttccacaaactaccaggcttgggattatactgtatggtcgtactgtttcaatatatgatttctctgaagattccgttgcttctgcggatgttatttctggtgcaaaatcaccatctgcagagtcgatgaaagcgctgatttatgggaccggtgtatacttgtcaccaatgcatgcatcactaaaggtagcgcatgagatattctcgtccttaagaccatacacattgaatgtacctgaagcctctagagataggtgccttggaactgccgttgaggctgctctggctataatccaaggaccatcagccgaaatgtctcggggagtggtcagaagagcaggaggtaacagtagaatcatagtttgcgctggtggtcccattacatatggtcctggatcggtacctcattcaatgagtcatccaaattatccatatatggaaaagacagccataaaatggatggaaaatttggggcgtgaagctcacaggcacaatacggtcgtcgacatattgtgcgctggaacttgccctctcagagttcctatcctgcagccacttgcaaaagcttcaggtggtgttttggttcttcacgatgattttggtgaagcctttggtgtggacttgcagagggcagccactagggcagcaggttcacatggtctgcttgaagtacgatgttcagatgatattcttataactcaggtgattggacctggcgaagaagcacattcagaaactcacgagacgtttaagagtgatgcggctctctctattcagatgctgagtgttgaagaaacacaaagcttctctctctcaatggagaataagagggacatcaaaagcgatcatgtatttttccagtttgctttccattattcggatgtttatcaagcagatgtgtctcgggtaattacgttcaaattgccaactgttgatagcatctcagcatatcttcagagtgttgaggacgaagcttctgcggtcctcatctccaagagaactcttttattagcgaaaaatcagaaggacgcagtcgatatgcgtgctacagtagacgaaagaatcaaagacattgctttgaaattcggatcacaagtgccaaaatcaaagctttatagcttccctaaggaactatcatccctcccagaactcctcttccatcttagaaggggtcctttactgggaaacatcattggtcatgaagatgaaagatcggtgctacgaaatttgtttctaaacgcatctttcgatctgtctcttcgtatggtagcaccccgttgcttgatgcaccaagaaggtggtacattcgaggaactaccagcgtatgatctctctatgcaatcagataaggctgttattcttgaccatggcacagatgtatttatttggttggtaagttactcttgtcttcattctgtgtcttaattattttcggatcacttcagtttaatcattcattttggttgatttagggagccgaactgtcagctgacgaggtgaagagtgctgcagtcttagcagcttgcagaacgttagctgaagagctaactgaattccggtttccagctccacgtattctcgcattcaaggtccttaacatttcagaaccttatacaatttttctcaaaagaatcacacactttctaacctttctttttttatggattcaatatctatctgctaatccattgaaacataattcaaaatcttgtatatattgaaacataacaggaaggaagttcccaagctagatattttgtttgccggcttataccagcacataaagaccctccttatgagcaggtaaaaacatactaaaccatgtcagaaagaaaagacaaaactatcattgcggatcttaatccatttatttttattttttttcttctgaacccaatttttttgtgcaggaagcaagatttccacagataagaacattgacgacagagcaaagaatgaaactaaagagtagttttatagagtttgatgaagccagtttctgcgaatggatgaggagtttgaaagtagtgcctcctgagcccaggtagtcatacattttattcttgcttcatcgttttttttccgccttttactgtcagaacattttttttgttctctgtgagtcttttgtttttaggattctctttatatgatctccagttctctcaagtgaattatatactctgtccgttacaagcaaaataatgtgtagagatgatgaccgtgatttttctttttaccattttacagtcgatgtaatgccgtgtctatttttaccatccatgcttagcctttttggtttgaatccaagttatttgatggtacaaatcaatcggtcacctaaatttttaaaatctgcattatcataggcacatacatgccgaatatataaaataattcgtgaaataagttaaagctagaaaatatgtaagaaactcaatgacgtggcaaaaaagaagagtatccaccagaagttgagtctaggggtataaacgtaattaacatcaccttatccccaacgtctcaattctctctctcgtgctcttcactcgacgacacacgaaaaccggaaataaaagttttcgggttttcttcagccggactgtttttcgctcccgccggaaattctcccggctcgccgtcgacgatgatg

SEQ ID NO: 5606 - DNA, 3000 bp, Unknown
  misc_feature (1)..( 3000): cDNA_ID_1828928_gDNA_ID_1620806_Annot_ID_50535 3000 nt of promoter + ATG
aatcgaagctttcttcaaaccgcctcacgatatgaagagagattcaagattctggtcaatgatattcgtgcttcttggtgtagcttctttgatagtgtatccaatgcatacctacttgtttgctgtagctggagggagattaattcagaggataagagtaatgtgttttgagaaagttgttcacatggaggttgggtggttcgatgatcctgagaactcgagtggcaccataggatcaaggctctctgctgatgcagccttgatcaagactcttgtgggcgactcgctgtctttatctgttaagaacgctgcagccgcagtctccggtctgattatagctttcacagcgagttggaaattggcggttattatcttagtaatgattcctttaattggaatcaatggttatcttcaaattaagttcattaaaggcttcactgcagacgcaaaggttggtcgcacattcctgttttcatttttttattgtggaatgagttttcaagggtttaaggcttacttgttgaagaagaaacttaaaatagttttgaaagaaaaaaatgtttgcaggcaaagtacgaggaggcgagtcaggtggcgaatgacgcggtggggagtataagaactgttgcgtctttttgtgcagaggagaaagtgatggagatgtataagaagcgatgtgaagatacgattaaatctgggattaagcaaggtttaatcagcggagtagggtttggtatctcctttttcgttctttactctgtctacgctagttgtttctacgtgggagctagactggttaaagccggaaggacaaacttcaacgatgtttttcaggttttttcttcttcttgggaatctttgtaatgaaatcttgggacgaagaaaactaatgatcttttgcaggttttcttggcgttaaccatgacagcgattgggatatctcaagctagctcttttgctcctgattcgagtaaagcaaagggtgctgctgcttccattttcgggattattgatgggaaatcgatgatagattcgagagatgaatcgggactcgtgttagagaatgttaaaggagatatcgagctttgtcacataagcttcacctaccaaactagacctgacgttcaaatctttcgtgacctatgtttcgccattcgtgctggacaggtaacatgtccaaaagactactatcatttgtttttttggttatcttgatatttcccttacatattgacacaaataaagtgaggagacatgaaacttaccaattctgattttgatatacatgtttagtcctttaattctcttgcttatttcagacggttgctttggtcggagagagtggatcaggtaaatctacagtgatttctctgttacaaaggttttatgatccggattcgggtcatataactctagacagagttgagctcaagaagctgcaactaaaatgggtgagacaacaaatggggcttgtagggcaagagcctgtactgttcaacgacacaataagatccaacattgcctacggaaaaggcggtgatgaagcatccgaggctgagatcatagctgccgcagagcttgctaatgcccacgggttcatatctagtatacaacaggtaaactacaagtacaacaagacttttattcacttttgaaaaacagagagattacttactatgcaagcaaaaaaactctttcttatttcaatttagggttatgatacggtggtgggagaaagagggatacaattgtcaggaggacagaagcaacgcgtggcaattgcacgcgccatcgtgaaagaaccgaagattctgttactcgacgaagcaacgagcgcgttggacgcagaatcggagcgggtggttcaagacgcgcttgaccgagtgatggtgaaccggaccacagtagtagtggctcacaggctttccacgatcaagaatgctgacgtcatagccgtggtcaagaacggtgtgatcgtagagaaagggacgcacgaaacgttgatcaatatcgaaggtggtgtttatgcttcgcttgttcaacttcacattagtgcttctagttgacaaacaattgttttcctaagtcctctcaaaatatattttgagcttaaggtatttttttatactaacattgtttctaattatgtaaaagctttgacaaaaaaggaagttaccaaaagaaaattggtctttaaccacaaggtttattgttaacgacgtcgtttctcccgaatttaaccgttacgttacttatttcggctttggagagaatctgaaatgcgacgtcggttaataccacgtcatgcagtgtgctggcagttgattttataaccaatgagatattacgatcatgccagcaaggcacgcgtggttagtgaaatgaccaatagttgtagcttaagtgtaaatattaacgaaaatgccacgcatcgagttaaaagaaaatgaaaaaatgaaaatagaatcgagaggagtagtactgggtgagagggatcgtaagctacgattcaatgcgagtcaaaaattcgtctacgaatttgcttcttcttcttcttcctaatttctcgaatcgtctctccgattaaggtatcacaatttttattcctgcttcttcttcttcttcagatttctgttttcataccctaacttctctgcttgattttaagattttgccttttgtttttatgtctactttgggtagattttagttgatatacacttctgcggattttgatttgtcggtgattgaaacgaaaacgaattggtgattttgggtttagtatcgtttagaagtataacttcggaattgtcctgttttttttttctatgaactttgttttttgatattttgagctgaattttaggggatactaaggactaaggattgtttgttgaaattctctgcagattcttgatctggacacagttcaaggctgtttcagcttgtgaattgtgatcttactttgtttggattaagtagaaacttcggaatccgatg

SEQ ID NO: 5607 - DNA, 3000 bp, Unknown
  misc_feature (1)..( 3000): cDNA_ID_3077901_gDNA_ID_1620806_Annot_ID_50537 3000 nt of promoter + ATG
ttggaggcggaaacgtggttgtgggctgatgagtggttccatttaccaacaaattaggaatctctgaatcttgaaaagctaataaaaatgaaatcttttaccaaacggaaaacgccaaaagaaaagaaaaaaacagagagaggagtgtgattggtgttttggattagcaatttgtttatagaatggggcacacatagtatgccacgtatgaaaatcagatttatcgtcagaccacatgtgtattattattgttagttcatggcttcacgcaagtaagtgtttaggtttagattggtaatggtatctatatatacatttttctaatcattttagcaaataaatcctctacttgacacttatttacaatggtataccattggcattaattcttttttctttaattatttaatttgatttttaattctttatttaatatatcaatcacattattcattcaaatttaatctaaacaacaaactttaaatcaaatcccttaaaattagctatacataattatttaaatgattattaatattatactttattaaaaaggtaaatattataattatttaaagtttataaaacgtttataatatttaagagaaaaacgtttataatatttataaaatacaaaactatatgttacatatagagaaatattttagatgtaaaatctataaaaaatcaaataactatttgaaagacaccttttaaatttatttgaattataaatcttttaataaaaatattatttaaacaaaaaatttaaaaaataattattaatttcaccgaacgggattagattgtatgacggttttagaatattaaaatatatgaactttataaattataacaattaaataaccatttaaaataaaaagtttgaaattgatttgaattatatataattaaaattaaagtattattaaaacaaaaataataaaataatatttaattttattgaacggggttagatggtagaacgggtttgggtcgatagtaatattagacagtatacctaggatgaaatccattaaatatgtttaatttcattgaacggtattagatggtaagacgggtttgagtttatagtaatacgacacgttatacaacgggtgaaatcctataactaacaattaaaatacaatgatataatttaaaatatatgacaaaagaaacaatcttaacaaaaatcatatataattttaaattttaaattttaaaaatcgacttacggtgtactccatgataaaatcaagggattgtacaatatataaaaattatgattatatatttataaaatacaaacaatatgttacatacagataatttataaaataatatatttttagttatttttaataaaataaatagtcccgcggtacatcgcgggttaaaatctagtttttagtgcaattttgcaagtattttgtcaatttaacagtatagtgttaataaaatatatgatttttttgttttgttttgattttaaaaagtataaataaaagaatattagaaaagtaaatgagttagtattttatgttttatgtgtttccaccattatgtaatttacatattaccaatttaccaatcgaattttttgaagggcaagcaaaatatatgtgacaaatttcatttcatcgactatacgttatacataattaggccttttattgactaactaggcttgcttaaaggtccattaagattatgcatgtttaaccatttaaggcttaaaatacaatgttactgtcaatggtagtcttctaagtttggagagatttcttttccttgggtttgttcgttgttgatgaatatgatagcggtctcgatccatcttcattctcattcttgagattggtgatatttatgctctttgtgactttgtccctgttttcaattttcatgatctatttagatttgatcgcgttttgaaatgttttcgagtttttttcatgaatttcatgactttgtccatcgtcacattcagaaatgttttcgagttttttttgtggttttgcttgccatattatgaattttttttttctatggtttcgaaagattagctaacatcgtgatagaagatggttgatttgatgttaacttcggattggccgtgggtatctttggtaaatctcatcgacatatgcttgagaagaagagatttctttgctttctttgagtctagagggtatgaatgtatgatgatgaagtctggtttcttttgttcttagtttaaggttttgtagttcgatttaaaagtttatgcttcgtattaatttatagtgtcttaatttgcatcccttccatagaatctagattccaagaaaatcacttttcttccggctgtgtttttggaatttttttttttgtccacgatttaaatttttcttatttggacgttataatttttcgtggttccacgacaaatttcattattaaaaatttccgatgacaaaacaaaaagaagggattcgaggatcatggaatacacgaccgagttgaggacaatggaaattagtagagcccatgacacaaacactgatgatactttcatattttttgtaaggagttttctacttaaaaatacaaatcatgttaaacattatggtcattattaatcaacattacatatataccataaaataaacaaacaaaaaaaacaattacatcaaaatcatgatgaactatcaaaatcgtgtttgttgttagccaaaaaaaccaataaaacatcccactgttgcgcctcttaaatttttgtttatgtcacacctaataacagcatctttaaaatactatttatctgatatcccacgatgtccttcttgattttgtatttataaacaaattaaactatctttcaatgttttaatgaacccatatttcacctgtttatatgatcccatatctttcaatgatttgactttgtttcattgataatacttggtgagtcatttttcaatggtcgttcattcaaacattccaacacataaggagatg

SEQ ID NO: 5608 - DNA, 3000 bp, Unknown
  misc_feature (1)..( 3000): cDNA_ID_1828916_gDNA_ID_1620806_Annot_ID_50540 3000 nt of promoter + ATG
tcagcgtggaggaagttgtgaagaaaatgaaacccatggaaagagctgttttaggattcaaatgcaaacagatcatcgatgcagggaggatgaagtgggttaagaaacatggattaaattcaaagctagtgaagtatatcccggcaagcatctcgccggaaaatactttactgatcgccggaaaacccaatccttctattgcttgatgttgtattcttgttggttatttaatacttggttggtgaaaactagaagagatattacacatggtgtatacgacagcgattttgcttgttaagtcacaacttcattagctcattctctgtctttggtcaaatccactgtttagtattcaaaaccaattttctcacattctattacacatacatgaatctcttctgcgtcgattttccacgtaattaacgataaaagatcctatgaagactgcaacgtcattacacacgcacgtacggatcagttttgttccgttcacacttcacactcagtcaaatagtcaaacacctccacaaccttctataaatactcgaatcacttaccaccaacaattcatcaaaaactcgacaatggaaactcccaaaggcactatcattttcaccaccgtcggtcgaactcactacggcttcgacgtcttctctctcaacatagccacctccgtcgaacgccgtttaacagacggcgtttccgtgaacttcaacgctcaattcgtcaacgataaaagcgatgatgtcgtctttgtttcggaaagaaacggatccgccaggatttacaaaacccgatccggaatttctaagcccgagcagattcccggagctccagagagctacttccacgaccgtcctatcatcactcaaaacaacagactctatttcatctctgctcacgagcaacctgatcgttatttcaagaattggtctgcgctttacaccgtggagctcaacagcgcaaagagagaagttacacgtgtcactccaccagacaccgccgactttagtccggcggtttctcaatctggagatttcttagccgttgcttcttatggaactcgctcttggggtggtgagtttcacgagatcaacactgatattactgttttcaaagcatcaaaaccagagacaagagtggttatctgcgagcgtggtggatggccgacttggtccggcgattcaactgttttcttccaccaccaagcagacgacggttggtggagcatcttccgggtagatataccggagaatttcacggaatataccgatttcccaatcacaccaatccgagtcactccatctggactccattgcttcactcctgcagctttccgcgacgggaaacgaatcgccttagcaactcgccgtcgcggcgtcaaccaccgtcacatcgagatttacgaccttgaaaacacaacgtttcagccggtgactgagtcactcaatccgagtttccaccattacaaccctttcgtgtctccagactccgagttcctcggctaccaccgattcagaggcgagtcaactcaaggcgagtcaatcgtacctaacatcgaatccatcgtttcaccaatcaaaaccctccgattactaagaatcaacggatcgtttccatcatcatctcccaacggtgatctaatcgcattgaactccgatttcgacatcaacggtggaatcaaagtatctaaatccgacggttcaaaacgatggacgttgatcaaagaccgtacagctttctacaattcatggagtccaacagagcgtcatgtaatctacacatctctaggtccaatcttctctccggcgagaatcgcggttcagatagctcgaatcaagttcgatccatcagatctcaccgctgataaagaagatcttccatgtgatgtgaagattctcactctagagaacactgggaataacgcttttccgtcttgctctccggacggtaaatcaatcgtgttccgatctggtagatcaggtcataaaaatctctacattgtagacgccgttaacggagaatctaacggcggtggaatacgacggttaacggatgggccatggattgacactatgccttgctggtctccgaaaggagatctcatcggattctcatctaatcgtcataatccagagaacacggccgtgttcggtgcttacgtggtgagacctgacggtactggtttgaggaggattcaaatttcgggaccggaagggtctgaggaagcggcgagggagagagttaatcatgtgagtttcaataaagatggtgattggcttgttttcgcggcgaatttgagcggagtaacggcggagccggtgacgatgccgaatcagtttcagccttatggggatttgtacgttgtgaaattagacggaacgggattgaggaggctgacgtggaatgggtatgaagatgggactcctacgtggcatactgctgatgaattggatttgagtcagttgaatttgaacggtcaagatggtgacaagcttgaaggtcagtttgaggagccgttgtggatttcttgcgatatctgaatgcgatttctccttttcttataaaagactgtcatatttatgtaatctcgctttttttatttcaataaaacaaacaaaaataaatgcatttagcattatataagtacacgtgtcattgaataacaacaaagcggggatagctcagttgggagagcgtcagactgaagatctgaaggtcgcgtgttcgatccacgctcaccgcattactttttttgtttgtctaactttttagtattgggccctttctctacgctctctttcctgctcaattatttgattttgtacataaaaagcattaagcccattaacatgcgactaaaagcccatatatgaagcccaaatgttcgaggctcgttgactcacttggaaagtttgactactattgcaaagttttgtgttgcctctaaactttgaactcaagtcggagtcggagccgcactgtcgtagcaaagctatg

SEQ ID NO: 5609 - DNA, 3000 bp, Unknown
  misc_feature (1)..( 3000): cDNA_ID_1828905_gDNA_ID_1620806_Annot_ID_50544 3000 nt of promoter + ATG
aaaaccacctcgccatacaaccgtcgtatctcccgtccccttgttctctaatggatgagactatgtttcgagtttgcttatcgattctttggatgagttgagatgatagaatagatgcttctccatgtctatggcggtttctttctttccatagtgaatgtactacaagctgaaaggcatatctcgtcaagaacaagcattctttatcgagagatgtatgtgtctgtgattatcttaatgatagaatcccagtgaggacccaccaaacctccgttgagtatgaacaagtgaagaacaaatggttacgtgattccaaaggatcttgacaaagaacacaagcgagaacagatttgggcctttattcaaacccatgactgattagttattgagtgaaatcactgaaatcaaattattttcattgcagttagtaatgtcttctttgacctggttataaagtttttctttttttggttatcaaagaaaatgcgttttgtcttttctttttataatacttttattgtttcactttccgcgcaacattcacgttttggattgttaaaatattcaaagcaagaatgagcattttccaattcggtctccatcattaaattcgataaaagtttgcgacttcggatttgacacaaatccaacggccaataacaaagaatagcatacaatatggttacgttgaataaatatttctagacaagccttgtgaacaaaaacgaaaagtaaacacatttgtcaataatttaagttggtcagtctttttttaagacccaaagaaagaaacaatgaaattcgactaggaataatctttttactttcttacccctggtcacgttttccacgatgaacagaaattatggagtaaagagttattaactttgatatatgattaatttaaattgaaaaatgtatggttttattctttatttaagggaatttaataatgtattggtttgtggattttggtttcacttagaaatctaattaaaactatatgttcttttctagaacacattttttaattgaaatacaaataaactagatatagaaaaataaattggaggttataagtggcaatttagtcttttctaataccattatctttcaccactcccctcaatatacatttctcctaaaaaccctaaattccaaaaacaaaagaaagaaaaacaaaactttcttcttcttcttcttcaccatcgaaaagagataatgaaccaagaagaagaaaaaacagagaacaaaaggatcaacgagatcgatgaagacgaagaagaagagttggagaacaagaagatggacatgttcttcaatctcattaaaaactaccaggatgctaagaaacgaagacgacaatacttaactcaagattctggcgacgttgcttcgatgccgaccaagagatccgactacagcattgttcctgtattccgtgctgaagatttttctcactgtatggacttaaacctaaagccatcgaattcgattatctccaccaagaaccaagaagaagagaagcaagaagaagaagaagaagaagatgatgaagaagaagaagatgatgatgaaggagaagaagaagttgagaaggtgatgagaaaagataatggtttagatcttaatcttgcattgtaataatacactttgttttttggttctgtttcgtgaataagaagaaaaaaactttcttaattacattattaaaagagtgacattgcaattaaacttaaagcagtgaatcatcaagtcaagaagctgcatgtgaaatttccattgatgaatgttagcttctcagctttgacgacagaatctagaggaagaggaacgaaggttttgtctggaccatagaagtgagggaagctatttacttcatccacagcttcatagattaatccatctccaagctgccaaataaagcacatcaaacaaaaacaaaaatgtcaatctcttcttagcactaaaatgtatccaaaacatcaacgtagcataacgattcaaatgacaattttgtaagaactttacatcaatgtccatgaccatcctaagatcatggttctgctacttagattgtgtttatccacaattgcagcttggtaagaaaaatgtttgaaacccattttgttttcaagtgtacaaaataacactaaactttagcacaaaccacacataaccaactctagctaactcatacccactttagctaactgctcctctacttaaacatggagctaatcacgcaataaactaacatttaccaaatcaaccactcaccaaactagaggatccctaacacaaaaatgatcataaattttctatccacatatgtttcaagttaaaggtaaaagtcaaccttcttaggatcgacttgaagaaggtaaagatactccttcacatccacgaaaaagttcttcaatgtcaattgtacctagaaatcagagaatcgatttcatcacaaaagcagtaaaaatctacataaaagtaatgatttttcacaagttcaaaccaaattgcctaagaaaatgagaaaattttcgagaatcttcatcacccaaatgaaaaagttgagatctttatgggaagagagaaagacctgatcaagtttgctgagatgataataacaagttgatttatcaatctctgcaccataagaagatccattcttcttaaactcttcccattcttgttccgtactgattctgtatatgaactcttcctcagccatttttgtttcaccttaaccagtgtgagatcgaaaaatcgtaactttaaagcagacttgattcgattccattccatcagagccacttcactaaaccgatctaaaccggaaatcaatttctgtactaaaccggttttattagctaaaccgactcgtcgtcaacttcgaagttccacttccaataattacctccttcgtcgtcgctttcgatggtcgaaatcagttggtaaagaggaaactctgaaagttgtgttaaaaaaaaaactagaatc

SEQ ID NO: 5610 - DNA, 3000 bp, Unknown; identical to SEQ ID NO: 5603
  misc_feature (1)..( 3000): cDNA_ID_1976770_gDNA_ID_1620806_Annot_ID_50548 3000 nt of promoter + ATG

SEQ ID NO: 5611 - DNA, 3000 bp, Unknown; identical to SEQ ID NO: 5602
  misc_feature (1)..( 3000): cDNA_ID_1828887_gDNA_ID_1620806_Annot_ID_50549 3000 nt of promoter + ATG

SEQ ID NO: 5612 - DNA, 3000 bp, Unknown
  misc_feature (1)..( 3000): cDNA_ID_3077884_gDNA_ID_1620806_Annot_ID_168858 3000 nt of promoter + ATG
taatgtgtaaaccacactatccaatagcagccttgttgtatatgactaattcattatgacacgagtttttttttttttttaatccagttgtaatgttaagatgttagtagaagaaactgaggaaaacaggggaaataccgagataatctacatatattttcgtggcagacaaattttggcctgtatgtagtaacaaatgatattcgagaatctagatgtttatgtcttgacattattggaatcataaaataattaactatatgttaacatagatgtacaataacaacatgataagcactacttcaatgactacttgtttcataaatcgaacaagcacatgagtcatgactcacacgataacaaattagacttttatttgtttactgttccatgatttagactttagtaaacatcacaaaaacaaagatccgaagaggtaatagttatggtttttagatggagtaaacaaacttagtctcgttcacacaaagcacaaaagcttcaagaacaatggtgtacacaaacacaaacgtgctaatgcttgggctgctagagaatctattgttctttgcggggtagagcggattttgggtgcaaaacgaacaaataaaaactaaaattctatgtttttgtccttcctccacccaaatccgccatatctttagatctatgtaagataagttttataaaaaataagacaaatactgcttaaatttatcaaacctaatattctctttattcattttggtaataagatcttttagttaagagcataaagattaagaaactatgatttaatacctaacaaaaattaattcaaccattgaaaacaaatactgcaaaatttaaatgggctttgagtacaaccaagatcaatgatatctctttcgacatgtgatcaattatatctttgtctacatgagagtttcgatcaatttgagtgttttgcgatgtaacagatggattgctgcatatgattttcgtatttgttactgatatttcatagataaaaagaagattatttccaagcaaaaaagtcacataaaaatttgacggaaatgatgaatacgttgaagtacttgactaagaaaacagcgtataacttgctttattgttttctttgttacataaaccattagttgtatttgtagtcttgtatatctgattcatattaaaggtttttagatgttaaataaaaaaaagaaacaaagagagtaatcttacgtagattttgatagcaatcaatattaattccaaagtttaacgaatatgaaaactgaaattaaaaaaattaatggagaaatgaagctcattaatggtacagctaaaaattaaaatattttagtacaagtggttagtgattagttatattgtcagtttgtcactattagaagttaacaaatgatattcgagaatttagggaggtgttattagtttgtgatttatatgaatttttactgacttgaaatgttataaaaaatcttgtgttattcaattaagattttataagactcggttaaagtttagtgttattagattttgatttgttaaaagtattataaaatcttaattgaataacacaagattcttcgtaacatttcaagtcactaaaccaataacaccccctaaatctctttcaaagtcataaaccaataacacgtcctagatgtttatgtcttgacattattggaatcataaaataattaactataactatatgttaacatagatgtacaataacaacatggtaagcactacttcaatgactacttgattcataaatcgaacaagcacatgactcacacggtaaccaattagacttttatttgtttactgttccatgatctagactttagtaaacatcacaaaaacaaagatgcgaagaggtaatagttatggtttttagatggagtaaacaaacttagtctcggtcacacaaagtcaagagcttcaagaacaatggtgtacacaaacacaaacgtgctaatgcttgggctagctagaaaatctattgttctttgcggggtagagcggggtgaagaacgaacaaataaaaactaaaattatatgtttttgtccttcctacacccaaatccgctatatctttagatcgtctatgttaaaggggttttattaaatgaaacaaatactgcttagatcaatcaaagctgtatctattttgttttgttttgtcgtcttattacatcatcactagaaatatttaatctaatatgatagtcactcccgcaactcaaaaccactacgaacgactctgcgtgcggcattctatacctccgataaactttgcaccattgatctacattttttgggaatcaaaccctagtataaatgtattaatgaactcttagttaaccattgaaccaaatattaatgagattttttagttaaaagcaaaattaagaaactatgatttaatagataaaaaataataattcaaccaatgaaaacaagaaggacataatttgaatagttataattattaaacaaatataaattgaaattgaaaaaaatcaaataatttaaaacgaacaaaaacttttaaaacttcttatagtaaaagaaaacaaaggaagtatatcttatggaggttttctatcaatattaattccaaaatttaaagaacatcaaaagtgaaattgaaaaactaatgggggagatcaagctcataaatgatgtacacctaaagaattaaaaattgactatattcttacaagttattaatgattaagttatattgtcagtatgacagtaagtatcatacccataaaaattatatttattgataatgaagagtataccaagcaattcaaaagtctaatataatgattaatgttattaagcattgttgagattaacaagagaagacttttgacttttgagagagaaagaaacacgaaagaaccatagctttgcgatttcagatctaaccttcttcttcttcttcttcttcttccaaatatcttgtagtatacgaccatg

SEQ ID NO: 5613 - DNA, 3000 bp, Unknown; identical to SEQ ID NO: 5609
  misc_feature (1)..( 3000): cDNA_ID_1828905_gDNA_ID_1620806_Annot_ID_168853 3000 nt of promoter + ATG

SEQ ID NO: 5614 - DNA, 3000 bp, Unknown
  misc_feature (1)..( 3000): cDNA_ID_1021679_gDNA_ID_1620806_Annot_ID_168852 3000 nt of promoter + ATG
agatcttatgaccaaaagcgtcttcattaaatctagatatatgcatataaatctagatagattaggttatattgtgcttccattagaagcaattctcctttacactggaaaacggttgttgtcttttcaaatattggtttcagtaacattcttatagactttaagaagtttcttcaatttacaagtgtttccagaggctcttgagttatgagacatttggccttgtcaaaagagagaagaaaaatgagaaatgatgttgctagaggagcagacaaagaactactaacaaacaacactagtagtactaggcacttttggttacttgaaatcattatgaaacaaagtaaaagaagtatcgttgtcgcaagaagtcttggacaacggcgtcttcaaagcattgttgtttgagaatctacatatatatttttgcagccattctgtgaaataaatcttcaagttgggacttatttacagtggctgccactgatatttaataattatttttgataattagaaagtaaatcttcgaattaaatatttgcatttaactaccttcccaaaatctctccgcattaactatacgattagttactaaagtaaaacttctaaaataattaatatgatttaaacactacaaaattatcatttttgatattgctttttttcatgattataacaattcgattataagccgcaaaccatagagatatttgatagcaattaattactacaaaattacaaaatatttaaacaatgattcataaacatatcataaataaaatcaacattaataaaataaataaatttttttacgggacgggttggcggtacgggtttggcaggacgttacttaataacaattgtaaactataaaataaaaatatttaatagatagatacaatttgcaaatttttatatatactaactttaaaaaaaaattgtgattaaaatctagtaccacaataaaaacagggacttcggcttttattaggaacagagtttcgatgtctgagaaccaggacagatgtttctgcataattcatgtacagttaaaaacacatcttgatcgattcaacatgaaaccaaacacagactccattcattattattcgcagaatctagagaccgaaatgaaaaaaaaaaaaaccattcttgagctctgtttgttcctaagacggtgaaagcatatcaccagtcatcttctctgctttctccccacgctcacctgaaaatgttttatcaacatgtacacacgttttaaggcaagccaagatctgtgtctttcttttaaaaagaatatggcttttgaagtttttacctgtcctaactcttatgacatctgacacaggcaaaactgtatataaccaaacaagaaacaatcacaatctgagtaatttcattttgcatttacaatttgaggtatcaaacataaatctgattgtgaaaagagtaacaagaaaactttttgtgttaccaaaaatcttgccatcaccaatctctcctgtccttgctccttcaattattgtgttgattacagattccacctgcaacaagaaaaaaaaaagtaatggctcaaactcgaatttcgcttatgaagtatcgatttttttaaccatatacgtacttggtctttcttaacaacgatttccatcttaactttagcaacaaatttgtcttccgagaactcagagcctgcaaatgcaacaatgtgtatagaaaagtcatgaacacattttgacaataagaagaatcatcaaaccaattcttgaattcacggacgtaccaccgtgtctctcggtagaacctccttgtgcaccaaaccctctcacatcagaaacagtaacacctcgaatcccgattttcagtaaagcctatttatttatgaaacagagaaactcaagatttagttttggatttttcaaaagtgtaataatcatctctatatactaaggaagtaacaagtaccatctacaataactatgagaaccataaacccttcaattcaaattcacatttcaaacactagagaaacgaagatttgaccagtcctgtcgagttcactgacattatttgattttcgcatgcatcgataagaactactactcttacttatttctcaaaattctgttttatagtattcaaaatccacatttaaaacactatagactcttcatggataacaagtaataatggaaacctcaagtgattagcaaagttcaaatcttttcacatatcaaagttgagaacaaggaaaatcttaccgatgaaacttgctggattctccatggtctttatcagtccaacattcatacatgaacagagaagaaacaagcaacattgtcacaattatgagctttgattggtacatcaaaacaaaaattagaagcttacctgacaattgcttccaccttgtaaaatttcgagtctggaatataatctaacaaaatatgaaaagagaaatgctatgaacacacaaaagaaaccaaattgatcgaaaaaaggatcagagactcattactgttggcttaccagaagatatttgggcactaacgacaggtaaaacacgactgttattactcggtgactttgtgaccaaatcgaggcaagatggtcgggaatgtctgaatccagaacaaatcgaaatgcaatcagagaaagcaatgttctttcgatcagaatagaaaccgagagaagttattgagatgggtttcgtcattgacgccgccatgattctagttttttttttaacacaactttcagagtttcctctttaccaactgatttcgaccatcgaaagcgacgacgaaggaggtaattattggaagtggaacttcgaagttgacgacgagtcggtttagctaataaaaccggtttagtacagaaattgatttccggtttagatcggtttagtgaagtggctctgatggaatggaatcgaatcaagtctgctttaaagttacgatttttcgatctcacactggttaaggtgaaacaaaaatg

SEQ ID NO: 5615 - DNA, 3000 bp, Unknown
  misc_feature (1)..( 3000): cDNA_ID_2053495_gDNA_ID_1620806_Annot_ID_168850 3000 nt of promoter + ATG
gtgtctggtggagtgacacgtgtaacttctctctttgcgctgttgagctccacggtgtaaagcgcagaccaattcttgaaataacgatcaggttgctcgtgagcagagatgaaatagagtctgttgttttgagtgatgataggacggtcgtggaagtagctctctggagctccgggaatctgctcgggcttagaaattccggatcgggttttgtaaatcctggcggatccgtttctttccgaaacaaagacgacatcatcgcttttatcgttgacgaattgagcgttgaagttcacggaaacgccgtctgttaaacggcgttcgacggaggtggctatgttgagagagaagacgtcgaagccgtagtgagttcgaccgacggtggtgaaaatgatagtgcctttgggagtttccattgtcgagtttttgatgaattgttggtggtaagtgattcgagtatttatagaaggttgtggaggtgtttgactatttgactgagtgtgaagtgtgaacggaacaaaactgatccgtacgtgcgtgtgtaatgacgttgcagtcttcataggatcttttatcgttaattacgtggaaaatcgacgcagaagagattcatgtatgtgtaatagaatgtgagaaaattggttttgaatactaaacagtggatttgaccaaagacagagaatgagctaatgaagttgtgacttaacaagcaaaatcgctgtcgtatacaccatgtgtaatatctcttctagttttcaccaaccaagtattaaataaccaacaagaatacaacatcaagcaatagaaggattgggttttccggcgatcagtaaagtattttccggcgagatgcttgccgggatatacttcactagctttgaatttaatccatgtttcttaacccacttcatcctccctgcatcgatgatctgtttgcatttgaatcctaaaacagctctttccatgggtttcattttcttcacaacttcctccacgctgatcaaagaagcatctcttacttctccttcttcctcctcctttgcactgcatcagaagaacaatcaaatatgaaacaacttatatgcagtaacttctttatcatctttaaatccaagaaaatgttactttgaatcaagaaggtcaatgtcatcaacaccgggaagcttggaaccgtgatcatcatctactgcccagctagtgaacgaagtcatgatatggaactcgtccttggaaatccccaggctaaggatatattctttatctgagagacacataaccatattcttgattaaatagagaagttatataataatctgatagatcaaagaagtcacagtgactgtgagtttacttatgtagcttttccattgggaaagatgatggcaacaagtcgcaatagcgagacctctaagtactgggctttcaccatcttgtctggataaacaacatcttaagctcaaatctattatcgacacataagaatgaacatcaattagcaaaaccagatgctataaatgaagtggaaatctaatagtgaaggagcaaagacataagcatgtagtgacctgttgcaggaccacagagatgtttccctacggccacataaggaacaccgtgcaaagattcaaccgcgttaaggttcaaatcctcaactgaaaacacacaaggttttttccatcattaatacataacctggaacaagtaaacaagaaaaggtactagatttacgggaaccttactatcgattctcatacgctctaatactaagctctccttttgcctcaatgacctatcagcctatatgcgataaaacaaatgtggactgaaaaacaagatagattactaaaaataacagaatgaacacaaactagcaagcttaaccaaccttaagcttgtaagatttcctctcaactagatacacttttttgatcccatagcaatctgctagcatctgtgttaagtatcctctcccagcgccaaattcaacaaccgctggcgcagtattatcgtctttctcttccagatcgctttcgcaacattccacatttatgttgcacctcttcaatacaccaatctcttccaagttaccaagaattgaaccttgctgcaaaacatgtttctcttgaaatggtaatttcctgccaaacaatatgtatcagtcccgaaacttctcctcgccctatccatacccaagaaccaaagctccaaactattctaaccatttatgatttacctatctatctccttattaaaccatatgttacaagcttcaggtgacaaatacgaatcttcgatatctttacaaataccgccatgaacatcctcaattttcttaataagctgatgaaacttagaaacactcatactatagagcagatttctcttcatctctgaagtaacaagagaacaagatcccatcttttcttcttcttcgtcgttcccagcattaatacccttctgataaaatcgttgaccagacaattctacagtttgtttaagtaaaggacatctctttacatgccattcgagattctcctgcaacacagagctaacaaaattcgaatcaaacagttgctacaatagcagaaaaattgcaaactataacctttgaaaaaaaaaacaaagtatttgactcactgagaaggatcaatagggcatggaatccattgaccttccaatctctggctatggtttccacaaaacctgtttgataactttgaaaaattagctcctcactaatttgaacagaagaaaaaaacgaaactttactctttcacttacatagaactctcgattcgagtattcgcgcatgatcttttcttcttcggaagccagaaactgcatcgattgctacttttcgcctccattctctcagccagagttttgctcttgagacaaaggagacggaggtcttcaacgggtcctaaaaagggctttttttggcccattaagagcccatttaagtttaaaatcgaatcaatctaagcaaccatttgaaaa

SEQ ID NO: 5616 - DNA, 3000 bp, Unknown; identical to SEQ ID NO: 5608
  misc_feature (1)..( 3000): cDNA_ID_2053503_gDNA_ID_1620806_Annot_ID_168847 3000 nt of promoter + ATG

SEQ ID NO: 5617 - DNA, 3000 bp, Unknown
  misc_feature (1)..( 3000): cDNA_ID_3077901_gDNA_ID_1620806_Annot_ID_168841 3000 nt of promoter + ATG
ggaggaggaggaggaggagggattttccggtatgggttggaggcggaaacgtggttgtgggctgatgagtggttccatttaccaacaaattaggaatctctgaatcttgaaaagctaataaaaatgaaatcttttaccaaacggaaaacgccaaaagaaaagaaaaaaacagagagaggagtgtgattggtgttttggattagcaatttgtttatagaatggggcacacatagtatgccacgtatgaaaatcagatttatcgtcagaccacatgtgtattattattgttagttcatggcttcacgcaagtaagtgtttaggtttagattggtaatggtatctatatatacatttttctaatcattttagcaaataaatcctctacttgacacttatttacaatggtataccattggcattaattcttttttctttaattatttaatttgatttttaattctttatttaatatatcaatcacattattcattcaaatttaatctaaacaacaaactttaaatcaaatcccttaaaattagctatacataattatttaaatgattattaatattatactttattaaaaaggtaaatattataattatttaaagtttataaaacgtttataatatttaagagaaaaacgtttataatatttataaaatacaaaactatatgttacatatagagaaatattttagatgtaaaatctataaaaaatcaaataactatttgaaagacaccttttaaatttatttgaattataaatcttttaataaaaatattatttaaacaaaaaatttaaaaaataattattaatttcaccgaacgggattagattgtatgacggttttagaatattaaaatatatgaactttataaattataacaattaaataaccatttaaaataaaaagtttgaaattgatttgaattatatataattaaaattaaagtattattaaaacaaaaataataaaataatatttaattttattgaacggggttagatggtagaacgggtttgggtcgatagtaatattagacagtatacctaggatgaaatccattaaatatgtttaatttcattgaacggtattagatggtaagacgggtttgagtttatagtaatacgacacgttatacaacgggtgaaatcctataactaacaattaaaatacaatgatataatttaaaatatatgacaaaagaaacaatcttaacaaaaatcatatataattttaaattttaaattttaaaaatcgacttacggtgtactccatgataaaatcaagggattgtacaatatataaaaattatgattatatatttataaaatacaaacaatatgttacatacagataatttataaaataatatatttttagttatttttaataaaataaatagtcccgcggtacatcgcgggttaaaatctagtttttagtgcaattttgcaagtattttgtcaatttaacagtatagtgttaataaaatatatgatttttttgttttgttttgattttaaaaagtataaataaaagaatattagaaaagtaaatgagttagtattttatgttttatgtgtttccaccattatgtaatttacatattaccaatttaccaatcgaattttttgaagggcaagcaaaatatatgtgacaaatttcatttcatcgactatacgttatacataattaggccttttattgactaactaggcttgcttaaaggtccattaagattatgcatgtttaaccatttaaggcttaaaatacaatgttactgtcaatggtagtcttctaagtttggagagatttcttttccttgggtttgttcgttgttgatgaatatgatagcggtctcgatccatcttcattctcattcttgagattggtgatatttatgctctttgtgactttgtccctgttttcaattttcatgatctatttagatttgatcgcgttttgaaatgttttcgagtttttttcatgaatttcatgactttgtccatcgtcacattcagaaatgttttcgagttttttttgtggttttgcttgccatattatgaattttttttttctatggtttcgaaagattagctaacatcgtgatagaagatggttgatttgatgttaacttcggattggccgtgggtatctttggtaaatctcatcgacatatgcttgagaagaagagatttctttgctttctttgagtctagagggtatgaatgtatgatgatgaagtctggtttcttttgttcttagtttaaggttttgtagttcgatttaaaagtttatgcttcgtattaatttatagtgtcttaatttgcatcccttccatagaatctagattccaagaaaatcacttttcttccggctgtgtttttggaatttttttttttgtccacgatttaaatttttcttatttggacgttataatttttcgtggttccacgacaaatttcattattaaaaatttccgatgacaaaacaaaaagaagggattcgaggatcatggaatacacgaccgagttgaggacaatggaaattagtagagcccatgacacaaacactgatgatactttcatattttttgtaaggagttttctacttaaaaatacaaatcatgttaaacattatggtcattattaatcaacattacatatataccataaaataaacaaacaaaaaaaacaattacatcaaaatcatgatgaactatcaaaatcgtgtttgttgttagccaaaaaaaccaataaaacatcccactgttgcgcctcttaaatttttgtttatgtcacacctaataacagcatctttaaaatactatttatctgatatcccacgatgtccttcttgattttgtatttataaacaaattaaactatctttcaatgttttaatgaacccatatttcacctgtttatatgatcccatatctttcaatgatttgactttgtttcattgataatacttggtgagtcatttttcaatg

SEQ ID NO: 5618 - DNA, 3000 bp, Unknown; identical to SEQ ID NO: 5606
  misc_feature (1)..( 3000): cDNA_ID_3077905_gDNA_ID_1620806_Annot_ID_168839 3000 nt of promoter + ATG

SEQ ID NO: 5619 - DNA, 3000 bp, Unknown; identical to SEQ ID NO: 5605
  misc_feature (1)..( 3000): cDNA_ID_3077909_gDNA_ID_1620806_Annot_ID_168838 3000 nt of promoter + ATG

SEQ ID NO: 5620 - DNA, 52 bp, Unknown; identical to SEQ ID NO: 5598
  misc_feature (1)..( 52): cDNA_ID_1828945_gDNA_ID_1620806_Annot_ID_168834 3000 nt of promoter + ATG

SEQ ID NO: 5621 - DNA, 3000 bp, Unknown; identical to SEQ ID NO: 5601
  misc_feature (1)..( 3000): cDNA_ID_1031484_gDNA_ID_1620806_Annot_ID_50550 3000 nt of promoter + ATG

SEQ ID NO: 5622 - DNA, 3000 bp, Unknown
  misc_feature (1)..( 3000): cDNA_ID_1828883_gDNA_ID_1620806_Annot_ID_50551 3000 nt of promoter + ATG
acagcgactcaataaatcaagtcaatggtatgtgtttctggaataaatctggtgaagtaatattcccacctcggaatttggtagaacatatgaaaaacataaaaggtagaaagccaaaaccaaagaggaagaaagggaggcatgactctcctacgaagaagaaaaaggttagtaggaaaaggagggtaatgcattgtcgtagatgtagtatggctggacccagggcttccaaatgcccaataataggagtggagaaatatttgccaccaacgaagaagaagaagacatcaaacacaatgggagatggagaaggaccatgcaagtcaagcaacacaagactaatatcagatttcaagtttctctttctcctttcctcaatctcatttttgttttcagttatttattaccaaattttgttggtttttgtagcttgaacataaattatgatgcagtttaggacattttacttttcggattttcaatgcggtggtgtgttttttggcgacatgtaacacaatcttatggtctcttgttctttcggcgatatgttacccttgattatgaccatttttctgttaatgacgatttgtttctgttactttcactttcatatgacaattttttcattcaacatacaaatacaaatagaactacttagcctgttgcttttaaactctcgtataaaaacacaattctaaaacatacaaatactatttagtctcatacacttacacacattcatcttcttgaacctcaaacattacaacatacataattctactgattctagctcacaaactcaatatttagtcaagaaaaacatgataatcaccaaagctaattatcagagttcttcaagatctttagctgcattttgcactctcggatctccttgtcaaccacagcctcacacacacgcaactccattgcaagagtatcaatctcaaattcacaaacattgaagcctttttgcaatgtgattgaagctccttcaatgttatcgactttctcaatcaagtccttaatttcttcgaccattgacatatcaagccatttaaatgtatgactccaatcctaaaatttagaaaaatataaacacattacaaatttaaagttgcagacataacacaaccgatttctatctctccaaaaagtgagatgtcacacttaccccttacaggattttcagcagtcctcgatgttctcataactacagattctcatcatctacatctctcatgcaaacctcttatgagattatccatgaggtcttcgaaatccgtaattgatgacgagaaacacaaggtcactgagaaaagatgaataaaaagatgattgttaggatggacgaactcaatgcaaaacgacgttgttttgtcaaacactattccacatagtggttatgaaatgctgctttgtcgtccgactaagctattttaacggtttgactaacgtccgtttaagttaatgttggttttggaacttagtaactagtatatgtagtaaatttgaattttgttaactgttaaaataaacactcattgtatgaataggaaaaatcaccgtccacatagtcatagttaaaataggcccttttacccgtgtacacattgtattcttgatgggctgttgagaatcttgagatcggcccagtccatcaaactttgattttgtttaatacaagtctaatataagataacaagcttaataatggacatgtattggacttggttgagtaaggcccattataaatccataagggtgttcaaggtagtacatcatctcatatcaaaacaactgtaaggaagaaattcaagtaaacgagtttgtctactatatctaaccatgaattaaccctagtttattagcggattagggttgagttttacaacacatttgtttaattaaagcaatgaaaacaatgcgattatgggttagttataatgtgtggttaatgggtaaacccattaggatttaatacaagattttttttaatttttttgagtatcacaaaaaagacatacaatcttttttggattgatttaaaataacaaaaagacataacttaattcatgattgaaaacattatttagttgaccataagctaaattaaatctatggtaagttgttaactaactatgctaccaatcacacccataataagtactataaatattctgtcttatccaataatcatcccaataagtctgtacgatatctaattttccataacggatacaaacaataataagtagatatctgagtagatctccgcaaatatattactttttctgcaggatatatattcaaaatccaattgctcaatatactctataataacgatcactgtatgtgtaatttaataaaataatcctcttgatgacaaaaataaaattaaaataacaacgatcatttgtctcattgtagcatcatagtttgccaagtagcattacattacatgcacgtagacatgaataagctacgtgtgaataatatgacattttgtttcttaatattactgactcaaaaaactataatattattctaaagtttctttttctttagtagtttcttgatcttgcaagaacatcatacaccaacttcttttttcttccatcttttcgtcgtcgaaactcgaaagtttcatagaaagtttgtatttaccatttacggaagatccttcgattatagtatttcgtacaaagatatatcagtttccctaattacgacaatcatatatatattatccgtatttattacattgaaatcatctccctatgcaagtaaaaatctcattaatacacaaagaagattaggtaatcaataaatgtaattagataatacgaaatatgaagtatggaaactcggaggatcttccgttataattacttttatccattttctctgtatatatatagaaagcaaaagaaagcattttcatcacctaccatcctctgttttcatttcctctgtttttcaaacttcctctgttctctcatg

SEQ ID NO: 5623 - DNA, 3000 bp, Unknown
  misc_feature (1)..( 3000): cDNA_ID_1828875_gDNA_ID_1620806_Annot_ID_50553 3000 nt of promoter + ATG
aatccctccattcatatgctcatcttcattggactttcttgcatcatctttaaacctgggaccacccatgttctttctttttgatgaatcccccttttccaccgtgtgaacattctgagtattctcaccttgccttgatgattcacctacttccactaggcgtggagagtgtgctgcaaatgcaggtccggagaaaggctggatgttagaatccctttcatccacattttttctaagaggtacctgaggcaaaggacctgcaaagtttggtaaagaagtagctcttgtatgagggtaatatgcagccaccaattcatcaggatttaaaggaggatgaggaatccttggaggtggatcgataggagtaggaaacgaactctcagacatctgagattgtgaattcattgaagatctcagattttcatctctcatgaacacctcttctctaacattcctttgagcagtggagttagtcaccctatggagaggctcaatctgacggtaaggacatgagttcctgtgatgagtcattctgaagcagctactacagattctcctaagtctttcatactgaaagcttatcagagcagcctcaccaaaatcaaaaatgattctttggaaaaacctcaggcgatctgtaattccaaaccggattctcacacggatataagctatttgagtcgtggtggagtcatgaaaatccagagtgagaatctttcctaactcatgtgctatctctaaagcagtttcctcacacacatacaaaagaggaattccacgcatctgaacccataattcaatagatgttaacaggtgaaacgtaagatttacctcccatctatgagttgtcacaaaccagttgttatacaaccaaggttcccttcgtagtactgacaggagatcaatcgttagagatgtcatattcaggtttacaaaaaaaataactagatttctatttctctttcacatgtccgacctttcttgtatgaccttctaatattttttgattttccacaaattcgattaatttttacccctttgaacgttatagatgtcaaccgttttattctttttcacaccgtaatgtaaaacctcacatgtacaacatttcttataataccctttgatattcataaaaattggattagatcttagttaaagaaattttgtgttttctttcgtaatcaaagctagaatgttgatatacacaagttattacacaacgtaaaatgtcagtgtatggacataaaaacgatatatttacgctaaaggacactccccggattttaatttccggcggccagcgattgagcatgtctcaaaacatggttcattaacattgccatcatcctccggtggagctactccgaatttgaactgttatgattcaaacatgaagttaataactggccaaagaagatgctaatagaaatgggaacattcaaaaacatcaacatgttaattttgattaataccagttgatgaatgacgataagtaaatccatgaacttagagttgatatgtctattgtttagagaaggggcaagcaagatgtacctggcaactataatctttgaagtttggttccatcaccaaaggaactcccatgtagtctttaaagaatgtctggaaaaaaaaacgaaatccacattttcagggattaatcaaattcatgtcttgttacagtaataatcggttgattggcttgttaaattgcagaagaatacctgagttggtagtttacatgtattaatgcatactcctacacacttgctttcttctagatactgacatttctccacgaaaacctacttggattcatcaaactcctcttcgttatcaaaggatagaaaaataactgacaaaacaaatcatatcgaaacagatgcatagttccagtatcatcattaccccgctatcccaagattctccattaggaagatcgatgatgtttactttgctcggtcccatgagccattgacatgtaagtacagtaactcttgcttcaatgggaaacaaaaaacactaattgttaccaatattttgacaacttttcattgacatggaagattgaagaatcaaaagaactcaccaaccatcaaagcagctaattttccttgtgctataggagcaatgagaagcttgtaaagctctaaaattagcggaggaaacaacgatttcagtattcgaacctgtatcaaccaaaaaagaaccaaaaactcagaactttaacctaaagtgtctataaatataacttctcaatgagaaatgtaccgcagcatcacttgtctccgacctagtacgacctttcaacaagagaagcttaaccaactcaataagtccaacgtacccgggtttctctgaatccgacccgacttcctgttacacatacttgaacataaagaagatcattagactaatgttaaaacctaattaccactccaaatcaaaacactaaaattcatgaagaaaccagaaaaaaaaaatcgatttcacaactcacctcgaccaatttgttccggaacgattgcatgaagaaatcgtcgagaggtcctggcttatactccaacttcggagctccttcatctgatttaacctgagaatcaaattcaaaatcacacatttcatatatgtacaaaattgctcgaattgagatttaaaaaaaaaaaatcaaattggaaccacctctgacgaattagagatacggcaacgaagacgacgcgtgagtattaactttgtagaaaatgagttggagaagacgatagtcgtcggaggaggaagaagaacctggataagaacagccatttctggccttacaagtttttctgctccaataacaaaagagagacgattacaaaaataaactatatgtcgtttttagttatataaaaacgacatgaagttcgacttcttattttctaaaagccttttaaaccctagcaaaatcatagattcgagtgagactcagaaaaaaattcaaaatccgtaaatctgatgatg

SEQ ID NO: 5624 - DNA, 3000 bp, Unknown
  misc_feature (1)..( 3000): cDNA_ID_1829007_gDNA_ID_1620807_Annot_ID_50555 3000 nt of promoter + ATG
tctgtttctgccacttttgaaacagaggaattatttacttacatggttttgaagtcaagtcttaagatgtgatggaagaaacatgacaggattctacctttgcctctatggctctatagactatgtccatcactgctgcataatggcatattttttacatatccatttttccaagaaaagagtcataaacttatgcatgataaatacagttgacatgatttccatgaaatctaacccagcccaacaaggcccataggtagaacccatccaaaatccagcttatgagtgagttacatgtgacatttagtcactcccaagtcctaacgccgatgtgagctgtgtaaagaatatcaatactttcactcacaggtcagacactgaaattttgcttcaacttgagtcatccaagatgatatttatagaatcaagcccatctttatggttggatatcccaatctccatgaccactttgatcattaaatatcttccaataattatacgaactagcggactagtcaaatatgttaatcctaaaaaaaacatttgaaaagtcacattttccacctgttaagccatgaattctataaattctatatgagttaccacaatgtttctctgaacaaattaccgtgatgaaaaaaaaagaatgaaagctgataacaaattttggtcaagttgacaatgtttctatcgttgcttggaaaaataatacgagataatgttttgtgtctatcttcttcacatgcaatcttaaatgaaattagtatattgttacaaacgtcagagaaacaggaaaatgacgggagaccttgttaaacgagagaaacaaaacgtcagcatgttagttgagctctgtcaccatatatttatgcatatcttttggaactcttcgtatatatcacaagcatcaataatatttttttctatcttaacccatttttatttatattaaaaccgtgtaaggaaatcgccagaaattgcagacctgtttcgtccttaattgcggatctcatcaataggttaagtagtgacaacttgttgcgaggataatagtagtgatggttttcgaagatgagttatcccaaaaaaagaaaacaattgacgtggtgataataagtgatcaataatgtatgtaaacatatgaatggtgagaaacgtaaatgtttattttcctagtaatagataagatacttctagtttagagtggtccactactgtctctttaacaaaggcatgatgaaaaaaaagttcctacttgcaatttcatgtttgtttaattttagtatgactcaaaaattgaattattgaccaataatctatttgatggttcgttttacttttattattttttgttgaaagaacaaatttgagagaaaaaagcttagttaaaagttacttttgactgagcgttcgatgctttttcatctaaaccacttggaactcatcaaatagtatatttttgcttatatatacgttttcatatattgccaaacaaaattatattgttacgatgatattgtaagagcattataaggattaagttgagttaatatgtgtttagctatgtttggtttaatggaaaatcatgtgcaactagcaagaataatatcacacatcactgtttttgactaatggacaaattggatgtgacacttaatagaataattctttcttggtagttgctatgataactatatttgtcttaacgtgagaaaagaagcgattggattgatgaggggaaataagttggatatgatctctgaattcaacaaacacacatcttttacaatgagcagatgactaaactttaatacactaatatggaaagttcgaaggaaaattaccttggatgatgatgatattcgagtccagcaaacacgctttgctcaaaattgttaatccaaaagaacaaaagacatcatatctcccaatatttaatcatgactaaacaatagtaataaagctacataaatgtataatttatgattcagttaaataaagttttatgtattttatcaaagagagtccaaaagtcattttatatttacttgtcgaatatttattgtcacatatacatatgaaaacgacccagcagcttccaaaaatttatgacgttatatattaaaatttaatacgttattagatgacgtggcagtttatcattggctaaccagaaaaagctgcaagaaaggaaatgtgttactataaacttggcgcctgtcttgtagccgttgctttcctctccggccttttctctctcctctcttcgaccgtcgtcgccggagacccttttcaagcggccaaacaaagatgcaagcttttttctttaatactactgtagcactatcgcatccgatgctgttttagattttgggtactctgcttctctttctcttcatcttcctctgttcgtcgtcaggtgatccttaaatctctgagtctcttttcactgttttttattttgttagattctggttattatttgattgtgcgtttcacttatccgattcctaaggttttaaatttgtttccacttgacttgacttttgagtgtgctcctccgttttctaggtcgtgtaacccaatttcgttttttttttttttattggagattgttttaaggctttcgaaagtttaatcctctctgtttctaggaccagtaatttagctatggattgtcttgtcgaattgggtagttaaaatatctgttttttgcttttacatcgtcggctactttactggtttttgggggacttcgttggatctttcacctttctttatagaaagaaaacagcttttcgcgtttattgcgcgtacagtgatgtttgcttttctgtggatgaatccgaaattcgcttctctgtgaaagtaaatcttactgttctggatattatcttggatcctagtctctctctatcgcttatgtttgagttcacaagtctctcaaggttttaacaagtattttaatttggtagctgagtttgattgtcggaaaatatg

SEQ ID NO: 5625 - DNA, 3000 bp, Unknown
  misc_feature (1)..( 3000): cDNA_ID_1829000_gDNA_ID_1620807_Annot_ID_50557 3000 nt of promoter + ATG
acccacaactacaaagcaaagtatgtatacaacaatcaaaagagcctgatcaagagcatgtttatgctttctttgactcggatccaatttcgaaactatctgtttttattgatcttgaagagcaccatggactgtattacacattccaggattcttcaaacaccacaatggttggataggttcagctccaatccctctcttaaccatcctatacctccacaggtttaaacggtccacggcttcaccacatctcttaacacctctctcgtctctattccctgaccacaagctctccgccaacgcagaggcacgtggccaaagacgtgagtctaaaaccgtcgagtcagcttgctctgaccacaatgcaacctctcctcctagcaccagcttcctctcttcctcattgagcaaaccatcagctatatcatagttgtatatgctctgccacgtcttaaatggtgcacaccaagacccgccaccgctttctttctgatcatatatactatcattccctagaaacccgccgtgaccacagtctaagtagtagaactctgatgaagagacaattactctgtaaccagcagctacgattctctttgtgttctccggaccgttattccaagtctgtaagattgtgtgctctttaggaagaacagatggatccgccttgatttgtgcatccaacagaacatcttcccagtaaacaactgtgcggttctgtgacacgatgtaaggtaatgtcgagtttatgtacttttcaagaagctggcttagtgttccaccagaggacaagaaagaattgatggcaggatcggttttccaacagcctgggataacttcatctccacctccatgaaagaaagattctggaaattgattaacgatatcttgtatgacgtttttaacaacttcatatgttttaggactcaaagggttaagctgaccagtcccaggttcactagctaaccgctcttcccaactttttccagcaggccaccagaacatattggcacatgtcacaatttccgggtaagcttctccccatgatcctgtatgacctgtggagttttaacagtatctattagaaccaagctaagttcttgtgcaagagaaaatcaagaatggacttaccaggagtgtctatttcaggaagtactctaacaccatgctcaaaaccatactgaacaatctttgagacatcctcgggagtgtataccatgtctggtccaagagatccttttgcagcaagtgaaggttcagaaggaagcaccagtggaaaagattgtgaatcagtgatatgccaatggaacacattgagtttgtttgcactcatggccttaatagtcctcattatatcatctactccatagtaattcctcgatgtatcgagcaaaacacctctatggccaaacagaggagaatcctgaatataaattccaacgggtaagcacaaatcaggagatgttccccaaatcatctgagagaatgtctcaaggccacgcatagctccccaagccgaatgagctaacaagtgcgcggagaagctgccaatggggatggagagtttgtaagactcatcaacaccgtggtgaagcggaagagaaaaatcggtaacagtgactacaaggttcctcaaggtgtatcttttcataagtttgacaggatagctaatgagaggcgagtaattctcagaacggatcaggttgtgataccgtgttacagaggccgaaaggtattggtgttcaggggcaaggatagtgaaatttggagagagtgcaatggctttatgttgaggccatgagagaaatctcggctttggccaaatgttgataggtagagcaatggagaacaatggcgaaagaagcgtaatgaagaagagtattgggattagtatcacatgaaacttggaaagagttagcatgacttgttcttgaaatcaatctacaagaaaagaaaattgaagtatgcattacagatcaaacaacagcaccaaaaacagacacaagtaaatggtaaaagctacactcctagatcagagtaaacaagaaacagcattaagatcccaagtgctgaagtgttgaactttaatgtttcaaaagcattctgaagcaaaccctagatgataaatggggttcgtcagcaaatctgattggttgtttatcaaatctccatagtaaggaaggacagagagagcttagaagtaattggaattgcagaaaaacgaaaaactgaaagcgaagagagaaactgtaacagagtattacccttagatttagcaatttgtcattcacggaagctgtttggggagagaaattgacttgaggaatctaaaaattgcttcagtctgttcaaaacttatctgtctttactctacaaagtcttgtgaactactttgcttccagaagatctggattctggattgatttgatacttttgcattatagtaataaaaaaattctcgttgcatatttattgtattctactacttgtctattttaattattattaaaaaggaatcttattgtcttatgttaataataaattaataatagactaaactatcttattattgttaagaactgccaaacaaaaaaaaagaaagaaaaaaacttgtataatttgttaagaaaaaaaacatctataagtttgattgaaaataatttattcgcagattttgtaaccgtacaattagaaatcggacaaaaatatgttgaaacaagtgatcattttcaaccagccgtttaaaaaagcacctaacagcaaaaacataaatctgataagcccattttaaaacgagtggttaatgaattccccaatgacaactaatacatcatctataattagccatctcgtctgaactaaaacttggaagaggttgcaaattagttgttattgcagtctatatgaacccaatgtttcgtctgaacctaacgttgggttcaggcagatagtattgtcattttttttggggattccgaccagccatcgtaggaggagatg

SEQ ID NO: 5626 - DNA, 3000 bp, Unknown
  misc_feature (1)..( 3000): cDNA_ID_1828996_gDNA_ID_1620807_Annot_ID_50558 3000 nt of promoter + ATG
gaagaggctcgacgactagtgacatcactagaagcgcgatcgtcatatgagtatacatcggactatccagcgcctgcaaatggtttttttagttggagaaattaaataaaattgaataacgctgaaattttactatttgaaaaaaaacaatgaaaattattgctgacaaaaacaaacatactttgttctatgagtaaaataatgtttagaagaataatgattccttgacaaaaaaaaagaaagaataatgattaatgaaatatttctctaatgttttcactcattcgtatgttattcaactttatacttccctagactcgaaaagtgtcatatgcaataaaagaacgttgattgattgattagtaccttagtatcgcgaccagcattaagaacgacgagcgataaagttcccttggtgttcataagggctcctatagcgaatgcgtcacgcataggtatatgcataaataaagaggtgattacggtagtcacgatctttactaagaaggaagagcagatgactacaaccatcatgaacttgtcagtaaactggagcatgaaaccaatatctgctcgcaacccacaaatgatgtagaagagaggcataaggatcccggaaaggaagtcatggagcttctcctcgatcatgttacgtatgatgtggtcgtgcggaatggagagaccgaacaggaacgccccggttatggagtggaccccgcatgcgtccgtaatcaggccgcataggaccacacctcctaaaatgaaccaaacgtgagtgtctccgacgtgacctgccttcacggtcttcgcgaagatccatgcaattcccggacggatcacaaagatgcagaggaggacgaagattgcggtggtgattatcacgaacggcatcattttgttccatgtccctttttaaccaccaacaaaaaaaaagaacaacgaaaaaaatcatcagaattcttgaattaccatgcatatttttgctatatttctttttcgaggaaaaaataggattcattccattttcggccagtggatatttattttaacggttgtaggtttttgggtatgagtttgagttttggcatggggtcccaaaaagtttgaactaattgtaggaatctttacctgatttgctaaaagaagcaaacccaaaaacaaggaggacccatgtgcacaaatcagtgacaatggctgcacacatagccgtacgacccatatcggaccgcaacagcttaagatccgcaaggatccttgcaaggtcagggaagttggtacaggctagcgcgacagaccagaagacgcaaccagagatgatcttgtctggatggccatttcccgggagatagtaaagaaaggcaccaaccggtaaagcaacaagaagccctgtaaaagcaatgatgaccggtttgagctcggtgatccgcaccatcctcaggtccatccctagaccaaggaggaagatgttgtagacgagagctaagttagcgaatgtctcaagaaccattgtgaatctgtaggggaatacatgtgcgattatgaaacgtgtgttcccgagcacacttgggctaaataataatccacactgcaaaaatacaatcacaacaaatcaagacacatacggaactagagagctaaaaaattgatgtagcaaaaattgcatacgtacgaggatctgagctacgaaaggaggaagatacaagggtcgggttagatagtagaggacacgatagctaaggttcgcgacaaagagttgcgttatgaagaacggaagggaagaggctagcgtacttccgctctcccatcccttttgttctctcttctcaaagagaagactttggtcataacacacaatctttccaaaacgcgattcttcaatatcatagttaggatttgtcacattaaggggggctccggaagacatctcctcctacgatggctggtcggaatccccaaaaaaaatgacaatactatctgcctgaacccaacgttaggttcagacgaaacattgggttcatatagactgcaataacaactaatttgcaacctcttccaagttttagttcagacgagatggctaattatagatgatgtattagttgtcattggggaattcattaaccactcgttttaaaatgggcttatcagatttatgtttttgctgttaggtgcttttttaaacggctggttgaaaatgatcacttgtttcaacatatttttgtccgatttctaattgtacggttacaaaatctgcgaataaattattttcaatcaaacttatagatgttttttttcttaacaaattatacaagtttttttctttctttttttttgtttggcagttcttaacaataataagatagtttagtctattattaatttattattaacataagacaataagattcctttttaataataattaaaatagacaagtagtagaatacaataaatatgcaacgagaatttttttattactataatgcaaaagtatcaaatcaatccagaatccagatcttctggaagcaaagtagttcacaagactttgtagagtaaagacagataagttttgaacagactgaagcaatttttagattcctcaagtcaatttctctccccaaacagcttccgtgaatgacaaattgctaaatctaagggtaatactctgttacagtttctctcttcgctttcagtttttcgtttttctgcaattccaattacttctaagctctctctgtccttccttactatggagatttgataaacaaccaatcagatttgctgacgaaccccatttatcatctagggtttgcttcagaatgcttttgaaacattaaagttcaacacttcagcacttgggatcttaatgctgtttcttgtttactctgatctaggagtgtagcttttaccatttacttgtgtctgtttttggtgctgttgtttgatctgtaatgcatacttcaattttcttttcttgtagattgatttcaagaacaagtc

SEQ ID NO: 5627 - DNA, 3000 bp, Unknown
  misc_feature (1)..( 3000): cDNA_ID_1828988_gDNA_ID_1620807_Annot_ID_50560 3000 nt of promoter + ATG
ctgtgtgattttttaccacttggtccatgtcattttggtttagagaaaaatgtaccaaaccggaaaaacttacacaataccggctctgtttttgtctctcagaggcatacagtatataagtcagactcggtttccttatttaccttatgtgagtgcaacgaatcatgaccgtttctttttgttacgtgagctgtaagaaataagctacagaaatgtaagaggaagagagtgtgtggttttagttttaggtgagtggtttaatttaatatggattatcccgtaagcaaaacaagacctttgaatatctcttttaaccaattgaaaaacccttataggcttatagctaaaccttaaaccctaatcttttgttttgctaacactagaatttgttttattcattaaaaacgaaggaaaacaatttttcttttttaaaaaaaagtggataatctcgaaattcgcttctctagctaatcccatatagattataggaacagaagaaaaaagcttaggctatttgacctcctccaaatcctgatagaattgggagaactcttgccctatatatatatatatgtgtgtgtgttggcatattaattaggcgtttaagacacgtacgagaaggataaacgatggttagtcgagaagaggaagaaggtgcaccatgggtgctattcatgatgagccattcactgcctgtggagacgaaacagagtgttttggaggcaatagagagggaagccagagttttcattcaagttccactaaggaagagaaccttgaggattcctatctctacctagtgcaccagaggagtatgtgactaaagaggaccctcctaaagccaatattattgatggaccacaaacgaaatctacatcaaagcgcaagagatgtcctcttttgctcccaccaacagaagaaaaacctaagatagcaacacgcaaggccaactgtcgttttgatgcaggagcatcttcttctgggacgagagagccaacaccggagtggctggtgcggttgatgagggtaaagtacggagaaaatcctataaatgtcataaataaagaactgactgcaaccaatgtcaaaccacatcaccgtcgtctctccatgcctttcagccagatcatagattttgaattcttgaaccccgacgaaaaaaggatcatagaagaacatgccaataaggaacgtgaagaaggagtagacgtgatactcgtaaattttgatcgaagggaatatatgttgaatttgaggagatggaacatggggacctctcctctatacattttggtttcagggcggtataatgtggtcaaaggatgccgtctaaaggaaggcaatgagattcgcatctggtctttccactttgatgaccagctcaatctcgctatggttcctcttacgccaactgagtccggttaacgatcaaagacaaagctaatgatggattggtgcacaagtaagctcgggtgtgtgtttttagggaggttctatgggttttttttttaattaagaatatatcatcagcttcgttttatttagattcaaattctcattaggagtctcgagattgtgtttaggtttttgcttcattgaatatttgatattattaatgattttagtttagtaataattaattttctctaataaataattgttctgcagtaaaaaataacagtaacggtcacttttctaaccgttgtgatcagtttccttttcttttttttgcagccaccaaactttccttcttcttgatgaaacgaatttcccattttaattcactaaaatatttaaataataaataacatattttcaacgaaaaccatgttaaaacttcttaaaaactagtttaagtattaaattttaaaaacgtcgaaaactaactgcgcctaggcatcatgtccttagttggtccgtaagtggtgttcgaagttctatatggttttcgcgtaatatagatttaacacttaaattcaattttaaaaaataagaataattttctgtaaaatttaaaacgattttaaacgtttaaacttttaaaaacattaaactcaaactatgttaatttcaatattaattttaaaaattggtttaagtgttcaattttaaaaacgtcgaaaactaaccgtacctacgcatcatgtccttagttggtccgtaagctggtgtttgaagtccaatatggttttcgcgtaatatagatttaacacttaaactcattttttaaaaataataacgattttcaccaaaattcaaaacaattttaacgcttaaactttcagaaaataattaataaattcttaactaaaactatgttaattttactatttattttaaaaatatatatcttgagtgttcactttttaaaacgacgaaaactaattgcgcctagacaaaaaatacataagcatataaaaaaactataagctatggttaaaaattggttggtaaaaatgtttgcttttgcataagatagaaaaagtttaatggatttaatatttttgtatcaaatatttgaatatttcttatatatctatgaaactaatttaaaaatatttattataagatttatatgagtttcacacttgcacatgattcatgtgatacagacacttcatctcaaaacctacgaattttctttttcaaacttctcctagatctccttttttcgttttcttctctcttttgctgttgtaattagcttagatcgaatataagaatatgcctctttaaaataacgaacaaaaaaaaaaaaaaaagaagaagaagaagaagctaggaatcaaatcttaagagacaggacaagttaaagaggttttaagaagatatagtttcacaagcaaaggcaaagctaaaatatgtctggaacagaaaatgtcggacgattttcaccatcacacgtttcaatctcgaaaacaaaaacgagcactttatctcctcaaatctcaaacccaattttcttgtttcttgaatcatctctgctcataatcgaaaatg

SEQ ID NO: 5628 - DNA, 2865 bp, Unknown
  misc_feature (1)..( 2865): cDNA_ID_2992610_gDNA_ID_1620807_Annot_ID_168916 3000 nt of promoter + ATG
ttccttcgctgcctccgctaatcgaccattgcgcgtgaggagattgatgcgagaagtccatgaaacagtggtctcggaggtagattgattatgtctctgtatctttggattggcgtgatttttgtgggtgatgagcgccggcgaagtaattccgacgacgggaaggagacccattcgattgagatggtgactttttaaaattgattttttccttttatctctaactaaacccgactttggacataagaccgggtaaaatagaatccggtttgatccggttttaagattttaattaaacgatagtctatctcagcacaagtaaatccaaatcaactgtatagaaatacaaaaaaacttttaaaagccctaataaacaccgttggttgcttagccgccaagtaatgctgcagctgcatcgtttacgcaaccctccatatctttggcggcatcaatcctgttcatattcagtagctttgcagcctcgaatttgtcttgacataccatgagagatctgttcatcctatcctgcattagttaaccaaatgcaagtttctcagtacatggcaaaagcttaatgggatcagttaaggactatttttgtacctgaaacttggccatatcgctatcgaattgctgttgagatttagcaacgggaacacgacagagctcaacacagttagttgtcacttctggctttcttcttttctcaaagcactcgtttgagcatttgaaataagcttgctgcaattcatcatcaatcaaaggtgcataaatctttagcgaaactcaaaagtaaaactaattaacttttctgccctagtttgttaaaagatatagcaatacttgtactaaatgattgtagaaatatatatatatatatatatatatatataccagaagggtgaaactgatatgttcttgaataggagagagctgcgactgaccagatgcatttacttcttcgatttttctcctaaccctctccaataggatttgctcttccgcaactgccatgcgatccatcgtctctctctctggagattttagggttagggtttagctgctcttcaaattggaagcatttatttatataggcgaggttctccgaccgacaagacaaaaaacaccccttcaggataaactgaaaccgaataaactcggatggggtttggttcgattcaaaattatttatgactgacgttttggttcctgcaattagctcctcagctttaaagaaagtacaactacaactacaaggtttgctttacctattcttcctcttcgaaacacattggttttaagatctttcagttgaatacagatctggtgatttgtttttcctcataccacatactgtgaaaagcttgttgttcaagatcctcataatcttatataaagttatggtctgatatactttaccactacacaactcctaccatccattgtgtttatctattgagtcatagtgaaagggcatgaatatgattagcaagagacaaaagtaaagatgcccctttttcccaacagaggattattattagtcggcaatggagaatgacgtcttcattctctgcacaatatgaggcaatgtatcgagactatcctcaatggatgtgttcacacaactctccatagctttggcggcatctcccctgttcttatggagctttgcagcctcaaatttgtcttgacagaccatgagagatctgttcatcctttcctgcatcataattacaattgcaagtttctcagtccattgtaaaattatgcattttttgtgagttgaaattatattatacctgaaactgagacatttcgccttcgaaatgctgttgagcattgacaactggaacactgcagtgctcaacacagttggctatctcctcttgcttcctatttctgtcaaagcactcgtatgcacatttgaaataggcttgctgcaattgatcaattttccgggtttgattcatcaacttaacaaataaatatgaaaacaatacgctttcatacaacttgagttatactaatatagctgtagagatataatgaaaactgtcaagtttaagtttccaggaactacttaacatgactacaacaagacacagcttccaggaacttaacatgactacaaactttcatgttattaactagacagattgtatcaaagggcagcaaaaattagctcagaaaacttagttaaaacccattataaaagagatataccacaagtccacaagtgaacttaactagaacagattaatgccttgaattggacaatatatggaacaaaaggacaagtttttctcttttgttgcgattacaagttgaaggaaaatttcggctttttcagaattggtaaattggtcacccgaatcaaaatcaacacgagcacacaaataacatacacctatgagtaggaggatcaggaatgctacaaaaaggtatatgattgttaatatacctgaagggtgaaattgatgtgatcttgaataggagagagttgcgattgagcagttgcattaacttcttcaagttttcttctaatcctctccgttacaatttgctcctccgctgccgctatgtgatccatcgtctctctcgatctcgaatgggcgattttgattctagggttttagaggttttagatcgcaacaggctaatgtgaattggggttttaacacttttcacgtcggttaagacttttttatttataaccggagatggtttcctctataccaagattgctttttcggatacttaaaaaaccggaattgaccggatcggatcatagcaaggcagcgacattagttagagtagcgtcggatctgcgaagactttgatctgttgatgaaacagagagagatg

SEQ ID NO: 5629 - DNA, 3000 bp, Unknown
  misc_feature (1)..( 3000): cDNA_ID_3077933_gDNA_ID_1620807_Annot_ID_168915 3000 nt of promoter + ATG
ggattgaatgagtgtcttcaaagagaagagagtaacaagaactattgatgtcacaacgcaaagggtgtagaataagtcaaggggttggaaacagaaagatgttgaaaacttgggagtgtttatatatttaaatttttgaaaggctttttaaagtttgtgttgctaatgctatatctaaaagcccaaagtaataatgtaatggaatagaaaagaatccataataaataggaaaaaacaaagaaaaagtacctaatccggtagccacaaggaaaaaagaggacaagaagatggtgacaacaagacaaagaccgaagccgcgtaggaccccaaacgtaccttttaaataaaacgctgattcctttcggacttttgcgtcgcacggtctgtgccgctgtccccacaaatctctattttttacacacgcaatctctacctctgcgtctgcgtttcgaaacgtgactcttctaaccgctccacgtgagtgacttttagagcgagtttggtgtccgaaaccacgcgtgcgcgtctcctcaacgcctgagtctctctatgaagttgcattgacgtcagaaaaattaaatttgtcttacttgaaacataaaaatttacagtagtaaattatcattttcataacacttcatttattctcttgtagttaaacaacggatatactaatgaaatgaactcgttcaatctaattaaaatctcattattaatggtagacgctagagaatctcattattgtaggtgttaatttatgaaaataatacatcactttcaatcactgatttgattagattgatggattttatatacagcccatgtttttaacctctctagttgaaattttggttgattttaaagagaagagaacaaaaattcaaagacgaaaaaagcaaaaagtggaaagtagaaacaaaaagactgatggtgcagagagctggtcaaatatgttgacaaaataaaataaccttacaatgtcactatcatcaataaatgaaaaaatagttctctctatctatctataataataataataaaagcaacttctacctgggactgatattaactacgaagacctctcactctctcaatgggttgtataatagctgtcaaattatgatgtatttagtcacaagacaaaagactgattctgaacactaaagcctaattagggattagtctttactctttagtcatctgtttcatctttattattaaagtttgcaggagttgtagtagatggtgtgggggcaatatatgcagaacatgcatgcttccaaaatgtcctaactacgtcacttaaggttccatttttttctatctaaactaagaaatacttatgtatctattaatctacatctaattggttgtcaaaaaaaaatgtatcatagaagtctttggagcacataaataaaacatctggagattttctgaacataatgtgaggtcaagaatttgtgtgcaaaattacaattttcaggcatgagtggctctgattttgaccatttgaataaatttgtagcttgttataacctttacactcgtaaggaaaaaattatcaaaaaatattgatagtcgataaaattgaaaactctagatttatacaaatcaataaataaatttgaaaataattaaatgagaagtaaatgacattacttcacccaaaaagagtctagacgaaaaagacagacataaaaataagtccccttctatttgtttggagcataaacaaaaacagacacagtttcttctctctctctctctgtctctttccttttctcacgccgagatttctgcgactgctctaatcttacgaccttataagaaacgacgcttattttcactctgcttgagctcttcatcgtgtcacacagcacgatcttggacgtcgttttaagcgcaaaacaaaggaaaaagactgacgtttatacatactaaatactggtttggagttttgccttttggactcagaaaactcaaaagagagagagagacatttctgtatcttatcgggttttgtgttgtcagaaagaagctcaaggacaaaaaaaaaagcaattatttttagggttcaaacgaagcaaaatttggaactttcagaagttgtgggtggtggcttcttgaacaataaagctttttcttagactcttcttccaatttgtgactctacctatctctctctccgtaagctctttctctctctctttattcgttctttctttatttgctctgtttctttactccatttttggcttaattacaccaaatttagtctgctaaaagctaatttcaagcataattacttatctctcctcttcttgttgctaaccttcagttggattaggttttgatttcgtttatacgacaatccccgtgactgaaaaagttaccaactttgatagatatcgttaccagattctactcatagttttgttattgtaatgcaagaagttgagttcttgtttacattaacttcaataattcactgagagtgactttttgttctcctctgatccgtggaggattctctatatgtgttttgttttttgggggggttttctcctgtttttagggactctattgattcatgcatatatgatgttattctctgtttatgagtttatgcaaataatctaagcaaggtatgataacatatttaatctttttgtttgagcttataattgtgcttagaaatcttaaaataatgcttaagctgatgtgaacttgaggcctagcctctgaccacaaatcctagcctacttcgttgaccatacctttgtcttggcttaatattctaaatttctcttccaaatcctgtctcccaatgcattggttggtccaaaacaagatcatcatttcatagatcttgtaatctttctggtctgtaatttgctctaggatggtaaccttgtaccctatgtaacatgtcttgttagtataaattttgggtcatgttgtgttgatgactctttagcgcatttcttattgacaaaaggt

SEQ ID NO: 5630 - DNA, 3000 bp, Unknown
  misc_feature (1)..( 3000): cDNA_ID_3436416_gDNA_ID_1620807_Annot_ID_168913 3000 nt of promoter + ATG
gttccgtggcgaccaagatgtgcggaacagtgaccgaggtcgatgataatgcaattcaccgatatatgttgacataattgttttagtttattagtttatcgttagcatgtgacttatgacatgtgatatatcaatatgtaactcgcaacatacgtacgtgtatatcagattctttttgtcatcttccctgagagagagacactgcatctcagcctctcagctatgtattactgttgatgtcattgcttatgcaatccgaatccaaattgtaaaatcaaagaaaattttctatttctttctatttacattacctgttaattcgtccccaaatatttttgatgtcactcattattacaaaggaacaaaataaggaaccgaaaacagaaataatgggaaaaaagactacttcgacaacttccggcctttttatatttaacgccgtcccactttggaacccaatctatccacgtggagctctatcactggtcattcttaattctctggagttcacaaatttatgcaagaaaataaaaaaattgattttgaccgcctccgagtctttttacaactttttaattcgaattttgataacatctatatatacatttttggagctattttagtaaataaatccttaagttgggacttatttacagtggatgtcattgatatttaattattataactaattaatattcttaattattagcatttctttatctaatatatttccatcaattctaattacttttaaaaaggagaaatcttaggaatttattaatattatactttattaaaaataaatattatagttagttaaacatttaaaatatttaacggaaaaacgttttataatatttataatatgtgaaatgtataaaaattaaataatcatttgaaataaaacttttaaattgatgtgaattataaattttttaataaaaatattattcaaacaaaaaataaaaaaataatgtttaattttaccgaacgagattagatgataagacgggtttataatatttataatatatgaattttaaaacaattaaataaccatttaaaataaaacttttaaactgatttgaattatatatcttttaaattaaagtattattaaaacaaaaataacaaaataatttttagtttcgctgaacggggttagatggtatgacgagtttgggtcgataggtaatacgagacagtatagcatgggtgaaatctattagatatgtttaatttcactgaacgagattagatgatatgacggctttggatcgataataatacgagacagtatatcatgggtgaaatcatatatatatatatatatatatatatatatatcaaaatatcattatattaataaaattaatataattaaaatttgaattatttagttataatctaaattttaacttaataaactgtgtgttattctttctatattgttaaacagtaaaaaataaacatagtaattgtatactaaataatatatatatatatatataagagttgtacatttagaaaatattaaaatgaattatatttatttaatctactaaacaaattaactttttagtttttaaaaaagatataaccccgcggtataccgcagattaaaatctagttaactgataatcttgctgcataatatagccaccactaaatttacggtttactatcagaaatctgttttgttctaaattaaattaaattccaagatctttattttcctttacttgacacaatcgtttaattatttgtcattttattttcttaatttttaacctaaattaattaaaaaaaaagatgacttgacccttatttcattatttgtatcatattaattggtcggtcgtcggtgttatattttcaccggctagtcggtaaagataatgtgcttatatttggtgacaaggattcactaactttgatctttggtgcaattgaagatcagccatatgtatttcaaccttatattatcccccaaatcattccaacttttattttataaacattcgtggccttcatttttccactctgttgttttctcatacttttaataatttcttttgcccatttgtctttatcattcgaagaactcagaaacaactaactcttcattcttgattctcccacttaaacgacggcgtttttgcttaacgtttatgtatgcaagcaaatttacatacttttcgtgacctttggtttctgtgttgtgtgatatttactacgaaaccacttgtcaccaaaggttcttctttctgttagcgttgggttcgtgattccaagatcaatggttgtgaacttcactagttagagatactgaatcaaagagatgattcttccgagaattgggtaaatcttcgattctgattttctgggtaagaatgatcaagacccttcctttattttctttttttgttcttgcctaataattcttattctctgaatttgatttctttcttttaatgactcagaatcttccgtattggatgtttttgttcctgttcttgataatctctttatgactgtatctctacctctggattctcactgtcactgatgttcatgtctaatgaagcttctttaatttagtcttgttcgtgtcactgttcgatatttttaaatcaaaagttgctaactttgtgtcaatgatttgcttaagtaggactattttgagtttatggacatttgattcttaaattctgaggttgcatcagattagggaacttgaatcttggttactgtaaatttactaggagaaacctgagattgactattaactctgatatataacttatgtttgcttcttgcatttgatcttaacagattaaagaacacgtaacctattttcaattcgcgggtttgattccatagcttcttcagatcatacattctcgcaagtgttcgatacgggagtagaagaagaagagtctttctatgctcctgatcatgatgtcttgactctgcttcaacctaacttcaccagcaacg

SEQ ID NO: 5631 - DNA, 3000 bp, Unknown
  misc_feature (1)..( 3000): cDNA_ID_2785751_gDNA_ID_1620807_Annot_ID_168912 3000 nt of promoter + ATG
gatcaaatgcaagaagcaaacataagttatatatcagagttaatagtcaatctcaggtttctcctagtaaatttacagtaaccaagattcaagttccctaatctgatgcaacctcagaatttaagaatcaaatgtccataaactcaaaatagtcctacttaagcaaatcattgacacaaagttagcaacttttgatttaaaaatatcgaacagtgacacgaacaagactaaattaaagaagcttcattagacatgaacatcagtgacagtgagaatccagaggtagagatacagtcataaagagattatcaagaacaggaacaaaaacatccaatacggaagattctgagtcattaaaagaaagaaatcaaattcagagaataagaattattaggcaagaacaaaaaaagaaaataaaggaagggtcttgatcattcttacccagaaaatcagaatcgaagatttacccaattctcggaagaatcatctctttgattcagtatctctaactagtgaagttcacaaccattgatcttggaatcacgaacccaacgctaacagaaagaagaacctttggtgacaagtggtttcgtagtaaatatcacacaacacagaaaccaaaggtcacgaaaagtatgtaaatttgcttgcatacataaacgttaagcaaaaacgccgtcgtttaagtgggagaatcaagaatgaagagttagttgtttctgagttcttcgaatgataaagacaaatgggcaaaagaaattattaaaagtatgagaaaacaacagagtggaaaaatgaaggccacgaatgtttataaaataaaagttggaatgatttgggggataatataaggttgaaatacatatggctgatcttcaattgcaccaaagatcaaagttagtgaatccttgtcaccaaatataagcacattatctttaccgactagccggtgaaaatataacaccgacgaccgaccaattaatatgatacaaataatgaaataagggtcaagtcatctttttttttaattaatttaggttaaaaattaagaaaataaaatgacaaataattaaacgattgtgtcaagtaaaggaaaataaagatcttggaatttaatttaatttagaacaaaacagatttctgatagtaaaccgtaaatttagtggtggctatattatgcagcaagattatcagttaactagattttaatctgcggtataccgcggggttatatcttttttaaaaactaaaaagttaatttgtttagtagattaaataaatataattcattttaatattttctaaatgtacaactcttatatatatatatatatattatttagtatacaattactatgtttattttttactgtttaacaatatagaaagaataacacacagtttattaagttaaaatttagattataactaaataattcaaattttaattatattaattttattaatataatgatattttgatatatatatatatatatatatatatatatatgatttcacccatgatatactgtctcgtattattatcgatccaaagccgtcatatcatctaatctcgttcagtgaaattaaacatatctaatagatttcacccatgctatactgtctcgtattacctatcgacccaaactcgtcataccatctaaccccgttcagcgaaactaaaaattattttgttatttttgttttaataatactttaatttaaaagatatataattcaaatcagtttaaaagttttattttaaatggttatttaattgttttaaaattcatatattataaatattataaacccgtcttatcatctaatctcgttcggtaaaattaaacattatttttttattttttgtttgaataatatttttattaaaaaatttataattcacatcaatttaaaagttttatttcaaatgattatttaatttttatacatttcacatattataaatattataaaacgtttttccgttaaatattttaaatgtttaactaactataatatttatttttaataaagtataatattaataaattcctaagatttctcctttttaaaagtaattagaattgatggaaatatattagataaagaaatgctaataattaagaatattaattagttataataattaaatatcaatgacatccactgtaaataagtcccaacttaaggatttatttactaaaatagctccaaaaatgtatatatagatgttatcaaaattcgaattaaaaagttgtaaaaagactcggaggcggtcaaaatcaatttttttattttcttgcataaatttgtgaactccagagaattaagaatgaccagtgatagagctccacgtggatagattgggttccaaagtgggacggcgttaaatataaaaaggccggaagttgtcgaagtagtcttttttcccattatttctgttttcggttccttattttgttcctttgtaataatgagtgacatcaaaaatatttggggacgaattaacaggtaatgtaaatagaaagaaatagaaaattttctttgattttacaatttggattcggattgcataagcaatgacatcaacagtaatacatagctgagaggctgagatgcagtgtctctctctcagggaagatgacaaaaagaatctgatatacacgtacgtatgttgcgagttacatattgatatatcacatgtcataagtcacatgctaacgataaactaataaactaaaacaattatgtcaacatatatcggtgaattgcattatcatcgacctcggtcactgttccgcacatcttggtcgccacggaacatagacaatttttggattgtagtccaattaatgagtcccccaccaaagccgtagtaaaatcgaagtcgttctctaatccaatcatatatatatccataacacacaccaacaacacccacacaacaaaaactagagtcagtaacaacacaagattaaaaagaaggagaaaatg

SEQ ID NO: 5632 - DNA, 3000 bp, Unknown
  misc_feature (1)..( 3000): cDNA_ID_1828969_gDNA_ID_1620807_Annot_ID_168910 3000 nt of promoter + ATG
agctattaaattggatgttggcaaagggtatagcgcctaatgcaaccacatttaattctctcgtgaagcaatattgtattagaaataacctgaaggcagcaactgcaatttataaggacatgtgttcgcgaggagtaggacctgatggtaagacgtatgagaatttagttaaaggccattgcaaggctaggaacatgaaggaagcatggtttttattccaagaaatgaaagggaaaggatttagtgtctctgtcagcacatatagcgttctcattaaaggttttttgaaaaggaagaaattcttggaggcaagagaagtgtttgaccaaatgagaagagaaggattagctgcggataaagaaatttttgactttttcagtgatacaaaatacaagggcaagaggccagatacaattgtagatcctattgatgaaataatagagaattaccttgtagatgagcaactaaggggagccaattagctggtggtaggtcagaactcagaagttaatcttagtgagaatgaatgtggttttcgaggaaacattgatgcctgtttccgagtagtagaagcatcaggtcgttaaggagctctttggattgacaccaagaataagcttccgatcaatctgttagcagatgatcctttttgtgcattaaacagctaccggcagcagttcaggaggattttgctgctctgccaaaaacgcaacttgcatctttagacaagagtatctgtgaactcctccttcaacgttcatgtttgttttcttatgtgtgaggattctgcaggttcacaatcttactgatttatcatttgctaaaaaagaactgatgctggtgcaactgctctattttggcgattttcatcagcttcctatccagatctcaagttctagaccctgttagtgctcttcgaggtaacaaaaagaaaacaatggtccttgaaattgaaatgacattcaaggatttctaatcacacaaaagcttcttacttatttgcttatccctgctttttaattgtagggatatgtttattaatcctgttgagccagcttctgatctcatggtacatcatgttgttaatgctcaccaaggacttctcagtgaagaagatgtaagagagcttaaactagttttatttcttctttttggtagtataagactataagttatgtctctatttttcaggactgctttatattgtataactctcttttcagattttgcagacaagagccacatcatctctccaggagtccttaaacctacatgaagaaactttcacattacacatttaggccaatccaagaacaagactttcttggtgtaagattttggacagagtgcgtgatgacgtgtagaaacagagcattatgcaaaatgtatttgtgatacttttgtcatatttgaacaaatgttacaattttaacattgttactaagatagtaagatgtcaaatttgggatacatgtattgatattctataattctatatagcataataatccgacagctccagcgtctctttctccgtcaactgctccggcaatcacatgccattagttgaaagtttctttattacttccataattccatttatatttgttgctgattttgtttttttagtgtatttttacttcaaacatatattatccgaatcttctaagcatgccattttttttgtttcttttagttattttacgctgaatgtcacaatttatctttaagtagttttaggttaaagaccattttttaacccaacaaagtataaaatcatcgcccaaatcgtaatctagattttggtaagaatagtttggttggtaagagttacatatataacaaaataatcaagcataaatataacttggcaaatataacatataattttaaaaaatgagctcatatatatagactttctgtaattttgtttataatgattaacgatatgattgaattagtttcaataatgtgtgagatagttaatcacatgatttcttagggtcaacatctagttaatcacatgttttccttgggtcaacatctagttaatcacatgacatgtgatatattttgtgtgcgatttcgtcatgtacacatatatatttacccctttttatacattttaaaacatattttaaaaattcacaactaacggtataataaccgttaaaaaaaggcttatagatatggctaattaattacattggccgtgacgtgtatataatcgaacgattgcaaagattgctcaagtccagaattgtatatcttggattttacttagagaatcttgattgtaaaagtgttcctaatattttcaaaacagaaataaggaaatgctgtaatgatgcattccatgatcattctatagtaccttcgtgtagaaaaaaagatgtacactaggataaatatttattaatttaattttgttacttcttacattttaaagaatttcttgctttctttgtaattcttttaagagttcgtattttatcgataaattgatgctatgacactaaagcaatagaacattttatccataacaggtttttgggtctgcagttgattttctatttatgtttcataagtcaccgttgagtaaattttggacgcgcttcaagaaaaaataaaaataaaaatagaaatagaaataattcatatatacaaatatatgataaatatgtgcaaaaatgtcattgttgataccacgtcctttgctcctagaaattcgatatcaaccatgtgtcccaatgattaattggaaatgttaagctctttttatctatcatgaaaaaaaaatacacaaaccccttatcatataaatcgcacatgtattgttttttttttttttgataaaaacgtaacgcacatgtacttaattgtaccatagactccaataacgaaccaatcatgctctctctcgctttatatagatatatacccatgcatgatgcatcaaaatcaattcaaacacaaactcaaactcacatataagaaatg

SEQ ID NO: 5633 - DNA, 3000 bp, Unknown
  misc_feature (1)..( 3000): cDNA_ID_3077945_gDNA_ID_1620807_Annot_ID_168909 3000 nt of promoter + ATG
cagcactccaccggggtcacattcaccggaagcaccgttcagaccggagatgattgtgttgctatcggccctggtacccgcaacctcctcatcaccaaacttgcttgtggcccgggtcacggggttaggtatacacaacacacgctcttaattttcataatgatctatgaacaaattgcaaatagtataaattattaactctgagaaaataatgaatttcaaactcaagttagcaaataactcatatgattatgtgatgacgattgcatttgcagcatagggagcttggcgaaggaactgaaagaagacggagtagagaacgtgacagtatcgagttcggtattcaccggatcacaaaacggcgtgagaataaagtcatgggcgaggccgagtaacggattcgttagaaccgtcttcttccaagacctagtcatgaagaacgtcgaaaacccaatcataatcgaccaaaactattgtcctactcacgaaggttgccctaatgaggtatatatccaatatccatatcgcattcttttatcagatcaatccaaatatgttataacgacttagtcaaataactaacgattaattatgttttcgtatgtattagtattctggggtgaagataagccaagtgacatataagaacatacaaggaacgtcggcgacacaggaagcaatgaagctggtgtgtagcaagagcagtccatgcacaggaatcacattacaggacattaagcttacttacaacaaaggaactcctgctacttccttctgtttcaatgctgttgggaaaagtcttggtgttattcaacctactagttgtctaaaccgatgatatcaaattaatatcttggtgtaaagttatttaatttgttgtaagatgaaatggtaaaatgttattagggatttgacctttcatctttcaattgtaatgttaccgtgacgattattagattaattagaacggtgattcgatgcaaatcagttttggatatcaatcggtttgagagtaccaaaggttcttgtttctgtaacaactgatcaacttttcaaaaaaaaaaaaaaaaaaactgcagcttacaaaattacaatttttttttctcaacaaaattacaattttttttatttttttttgtcaagcaattacaaattatttagctatattttcattagtaaataaaatttaataactgagaaactggaagacgttgacttatcacaataacattgtacagtacttgtttttttttccggtcagcagagagctggctttaaaagcaaaatataagacaaatctagaagaaactgagaaaaagaatttttgccggagcttctgcttccgttttttgtaatccgagaagttgtattggcccgttacaaagcccatttgtgatgattatatattttggaaacttttttttttaattaataaagaaaagaaaaggaataatgtgtatgtatatggttgctaaatagtttaagagctaaagatggtcacactcttcagggcttaggactaaaagaatctcacatgggaatcacctgcttcctcggtctctctaccttgtagcagattctccgttcgactgttgtctcttctctcgtcttacctcttattcattctgtagatacaacaacaaccaatcaatgaattcaactagagcggcgcaagaatcatatttagggctgttgaattcaaaatgtcaacaactacaattagctaatatatataatattgactttctgtaattctgatcagaatgattaacgaatatgattgggttggtttcaataatttgtgagctagttaatcacacgtctttttttttttcggtcaactgctaagttgatcacatgtcatctcatataaaaatgaggtgatgtcgtcatttatacatattttgatcactttttacctacattttaaatttaatttcacaatattaccgttttgtatatggtcgttaaaaaaaaagagagtataaaatggctaactataacaacattcacccgtaatgtgcatatatgtacaaatcgaaagattgtaagatttgctcaactacttaatgtttgtttatattggccttcgatcagaaaatcttggttctgaaagtgttcctaatacttccaaaacataagttttgcatatagctgcaaggaaatggcagatgacaaattgttcttttaatggattatattgttcttctctttgttgaaattttgataaaattaaagtttttaaggattttgttccatgatcattttaccttcttggagaaaagtaatactttattgataaaaagaatactctaaagattaggatagatattattcatttaattttgttactactattttttttataaagaattcctatttttatggtagttctttcaggagtttgtaaattttgtgtcgataacaaaaaaaaaaaaaaaaatcaactctgcactctataggggttttggttgagtttctttctcttagtttatggctgagtttctatttatgcacaaatgatagttttcttcatttagtattgttggttctctatagaattaacgttatatacggtttatgttctaatcaatcgctgagtgggtttccacgtatttattttgttcatcaatatataaaaacaacatgtaccaagaatataatacatatacacatacgtatatggcccatgttatatgggaaattgataatgtgcaaaaatgtcatcgttcatacaacgaccgttgctcctaaaagtacgatatcaaccatgtgtgcacctaatgattggaaatgtaaactcttttatcaatcataaaatattcacaacctcttatcatatagatatcacatgtacttaattgtaccatagactccaataacgaaccaaaataattatgctctctctccctatatatacccatgcatcaaatcaaatcaattcaaacacaaacacaaacacaaacacaaacataaactcaaactcacatataaaaaatg

SEQ ID NO: 5634 - DNA, 3000 bp, Unknown
  misc_feature (1)..( 3000): cDNA_ID_1828981_gDNA_ID_1620807_Annot_ID_168908 3000 nt of promoter + ATG
tgaatcttggtttacgaaaactctgggaaattagagatctgagtttttttttaagcgtttgactttacttaagagagctatcatgagtttattctcactggatttgatgatgttgtagatgatgcaatggcgatattcgtagctttaaattcacctgaagttgatgtcattggcctcactactatctttggaaacgtgtataccactctcgccactcgaaacgccttgcatttggtaccatttctacaccatttttctcatatggatctcattacgaaaatgaagtcaataacatttcttggttgatctaatcatcattgttctatatgcatatctactagttggaggttgcgggtaggaccgatattccggtggctgaaggaacacataaaaccttcttggtatgtttccactttatggcctttgatatgtttttgtgagaaagatggatgctatgtaatgtgtttgagattcaatatatgttttctagatctttagtaagaataataattcacacaaatgtgtttagttccaatctgtgttataaatcaaatggtaagttatattgtgtctttttcacatgtcataccacttagattttttagcattgataacttgttgtcttttcttctctaaagaacgatacgaagcttcgaatagctgactttgttcatggaaaagatgggcttggcaaccaaaacttccctccacctaaaggaaaaccaattgaaaagtctggacctgagtttttagttgaacaagcaaagctttgccctggtgaaatcacggttgttgctttgggaccactaacaaatctcgcgttggtaagactttctcatccgcaatttttatattccggttcttacttatctctgttcctatcatcttatcggagatttcattaccttgataatgcaggctgttcagcttgatccagagttttcgaaaaatgtcggacaaattgttcttcttggtggagcatttgcagtaaacggaaatgtaaatccagcttcggaagctaatgtaagttccttcacccgttaaagtaatgtgatattcatacacataacacatcactttctatcaaaaactcttcttttagttttcacatctgtttaaccaattttttggttagggtagatttttggcgatcccgaagctgcagatattgtgttcacatgtggggccgatataattgctgtgggaatcaatgtgacccatcaagttattatgacaggttatcttggataatcttttttccttatttgatgttttatattgaaaatatacaaatgctgtcaacagaaccgtgatgatcctgattgttgcctttatggctcgaggttttcattacttgttgcgaccaagaacataatttagttaaacagagctttctaatggcttttttcccggtgtttctgctggatttagctgatgacaaggacaaactagcatcatcgaaggggaaattagctcaatatctctgtaaaatccttgatgtgtactatgattatcatctcacggcttacgaaatcaaaggtacgataatgataatcatttgtatgtgtgtttatttcatttggtaataagttcagttgtacacaaaattatataacaagaatttccacgactacgtatttttatcttaacctcttcttttttgtgtgtgtgtggggcaggtgtgtaccttcatgatcctgcgacgatccttgcggctttccttccttctctattcacttatacagaaggagttgctagagtgcagacaagtggtatcactaggggactcactttactgtacaacaatcttaagaggtaagtttttttcatacatacaatacaaacattcaaaatagacagttgtgttatatataatagaggatgtaaatgtcatgtgtggtgatggaaaaaaacttgttgttgtgatgtgaaccaggtttgaggaagcgaacgagtggtcagacaaaccaacggtaaaagtggcagtgacggttgatgctcctgcagtcgtgaagctcataatggataggcttatggagtcttaaaccatcttgggtcgttaattagttatctctttctctttgatgtttcactattgcgagccatttctcttgttaaaaataaggctcctcttgctgcattatttatttattgtttaatctttattaaaacgaatattattatgttaccaattaccaataataaagttaagatttttcctccgattccatgactcttctactacattcaaatctgtcacatgattgtcccacttgatcctagtaaggaacatgacaagtagtaacatttaagacattttgatattaactacaacagctggaatagaagaaatcttgagaaaagtcgttacacattcattacttaactgacgaatgatattatgtgaaaagaaaacattaatagtactatcttaagataaaaaatgcaattatgaaatttcatattgcctgccaattgaaaaataatgttacctattgttgaaataagatgccatgcattcgcattttgcacgatctgcatgtaaataattaacaataaaaaaaaacgagagaaatcagaaaactaaaggacctaataataaattaataaaaataaaacaaaggaacgtgacaaggactgagagtataaatatataataattatctgtctctctctctctcaactttgactgcgtcttccttggagaatcacaaaacaaaaacattcgtttttttgttgttgttgttgttgttgtttctcttgagaagctctctgaagaagaagactcatggaaaccaacaaagaccaagactttcgcttccgtacacttgtcgtcttcatatttctctctccctcttctcttctctttctctctctctctctcccaccaccacgacgtgctctcctctcattatcattctctctcactctcccttttctcttcttcaccattcgtccccattcccatattctctcgttcttgaattcctctgattgtcg

SEQ ID NO: 5635 - DNA, 3000 bp, Unknown; identical to SEQ ID NO: 5627
  misc_feature (1)..( 3000): cDNA_ID_1828988_gDNA_ID_1620807_Annot_ID_168905 3000 nt of promoter + ATG

SEQ ID NO: 5636 - DNA, 3000 bp, Unknown; identical to SEQ ID NO: 5625
  misc_feature (1)..( 3000): cDNA_ID_1829000_gDNA_ID_1620807_Annot_ID_168903 3000 nt of promoter + ATG

SEQ ID NO: 5637 - DNA, 3000 bp, Unknown; identical to SEQ ID NO: 5624
  misc_feature (1)..( 3000): cDNA_ID_3077956_gDNA_ID_1620807_Annot_ID_168900 3000 nt of promoter + ATG

SEQ ID NO: 5638 - DNA, 3000 bp, Unknown
  misc_feature (1)..( 3000): cDNA_ID_1829007_gDNA_ID_1620807_Annot_ID_168899 3000 nt of promoter + ATG
gacccctcttcatcaacagcgcaaatatttcagtcaacttcgattcccagtttattctcaaacggaagcttggaaagaaaaagcaagtctcttcctcttaaagttattcttctctcattattgtttccaccacagtggtgcatttgatctctttggcatgagggatgtctaagtggtttgtctgctttcctctgtttttgttcttttgcagattaagaggcttcatcttttgcttactgtcaaggagtcagctatggatgttccatccaacttggaagctcgaaggcgtcttactttcttttcaaattcactattcatggacatgcctcctgcacccaagatccgcaacatgctttccttctcgtaggttccagtcacgatggacatcttctcgtaggcttactatatcttaacatcttccattttgttttttcatagggtccttacaccatacttttcagaggatgttcttttctccatatttggcttagaacagcaaaatgaagatggagtttctatactcttttacttgcagaagatcttcccaggtttcacttttccatctgttttaattttttcatatggtactgttactttgtttgagctatcagctgagtccatggcttacatcagatgaatggacaaactttctggaacgagttaaatgtggcaacgaagaagaactaagagcaagagaggatttggaagaggagcttcgtctttgggcatcttacagaggccaaactctgactaaaactggtagactttagtctcctctcttaatcggttgaattctgcttcatttttctaacctgacgaatttatcttttgataaacttgttgtgcctgatttctgatctgtttcaactagtgcgaggaatgatgtattaccgaaaggctttggaacttcaggccttccttgatatggcaaaggatgaaggtgcttgaagaatcttctctgtgattcttttcgattcttaaaaagtatgaaagcattccttaaactaccttgtttttgttctagaattattaaaaggctacaaggctctcgagttaaccagtgaagaagcatcaaagagcggagggtcactttgggcgcagtgtcaagcacttgcagatatgaagttcacctttgtggtttcttgtcaacaatacagtattcataagagatctggcgaccaacgtgctaaagacatattgagacttatgacgacgtaatatcttcattctttcatcctttatctttccagttggtttgttatttagttcttagcctcattagttaagcttgctatttcctcatggcaggtatccgtctattcgtgtcgcctatatcgatgaggtagagcaaacacataaagaaagttataaggggacagaggagaaaatttattactcagcgcttgtaaaagctgctccacagaccaaaccaatggattcttctgaatctgttcaaacactagatcaggtataagttgagaaaactaagtaaaatacttaacattttggtgctcctttttttcccaaaatacgaggatgagtttaatcctatgcagtgaggtcagaggatatagatgctgctgttcaagagagactgagttatatttattttctgtcagctcatttatcggattaagcttccgggaccagctatactaggagagggaaagccggaaaatcagaaccatgctatcatatttacccgtggagaagggttgcagacgatagacatgaatcaggtgcgatgcgtagttttcttttgtctaacatgtgtcgctaatgaatcacatataatatgcttaaaattgttcaaagaataatcaccgcaggagactcttaacctctaaatatttgaccttaggacaactacatggaggaagctttcaaaatgaggaacttgctgcaagagtttcttgaaaagcatggaggcgtaagatgtcctacgattcttggtcttagagagcatattttcactggaaggtactaacagaatgatcctatttctgtcttctagatttttagtttctgtgtgcatactgatctcctatgtttgtggtttcttgtgaagtgtgtcttctcttgcatggtttatgtcaaatcaagagaacagttttgtaacgattgggcaaagagtgctagctagtcccttgaagtaagtttcttccctgttctgaaatcttgtcagggtattgtagttgtcaaaattgatgtgctctttctgttgctgctccagagtacgattccattacggacatccagatatttttgatcgtctgtttcaccttaccagaggtggtatctgcaaagcttctaaagtcatcaatcttagtgaagacatatttgcaggcactagcttgatctcatattctttggtggtacacatatgatctacttcattttttacattttttctcatacctttttactggtttcaggttttaattctactctgcgtgaaggaaatgtgactcatcatgaatatatacaagttggtaaagggagagatgtgggcctcaaccagatctcaatgtttgaggcaaaaatcgccaatggaaatggcgagcaaactttgagtcgcgacctttataggctaggacaccgatttgatttcttccggatgctgtcttgttatttcaccacaattgggttctacttcagtaccatggtaggttgagattctccctttttatctctcaatcactagatatatacatggcaggtttgtttttctttctcaagactgaagccattatctgtgtgttttgacagttaaccgtgcttacggtgtatgtgtttctttatggacggttatatctagtacttagtgggcttgaagaaggattgagtagccaacgagctttccgtaacaataagcctcttgaggcagctcttgcttctcaatcatttgtgcagattggttttttaatggctttgcctatgatgatggagattggacttgagagggggttccacaatgcattgattgagtttgtgctgatg

SEQ ID NO: 5639 - DNA, 3000 bp, Unknown
  misc_feature (1)..( 3000): cDNA_ID_3077964_gDNA_ID_1620807_Annot_ID_168897 3000 nt of promoter + ATG
gtgttatttgctaatactgtcactttgtaatatcaaattcaattaaaacataaaatttactccatctagataaatatgttttttgaataatggtcaattacaaaacatgtttgattgaatcacctttttgagactctccaagcaagcgtgttcgatcgatgggcgtttagccattttctacctccgttgttcttccgattaggtttcaggcgagcccgtattgtgattgggccatctcttttcgttttgttttcttgttgggctttcggccctattgtaattttctattacaaaaatcaaaaccttttgacagaaaaaaaaccactcagccttgccaaatagaaaggtccaagatatttagaaataattatgactagaattagtcctaaatgtatttagacgcttagaccatccttaatggttggatccaaacataatttataattttaatattggaaaatcaaaaatttagacactttcagtgtttattagttttgagacagcccaatggtggatctaaaaattgaggatctaaaatttcaaattttgaaaaatgtgtattcttgaataacttgacatacactctaaaaaaactcgaaatgtacacaagcaataaactcaataaaacacacaacacaacacaagcatttacttgatcacaaacataacaagtttaatttaggaaacaagaaggaatccaatgaaccactgagttgttgcagtctttatgatccaaataaatgtctaaatatccaaatttggatcaagtctattgttttttttggcaattttgatttaatgtttagatctttttgtgtttggcaccctacttagacctcccttataaagcaaagtaaaaagaatcagatattttcaaaaacgttacagcatttatattattatacaatatatttatttagaaaaataaaacatttgatgcattagaaataaagcataataataaagattttattttattttggttaaagtgtataactttgtcttgatcatagtccttaaattacatttacagagaatgtgggtccgttttatttatttgaggatttttacatttacaagttcacttcttctctttctccccatcaacaccaaccattatgcactatgccagagccagaggcagacatctcttcttggcttttaagttttaaccaaaaaagtaataacttaactcaaccttatagttattactattagacatcttcctctttcttctatcaatgcgtccacataatgtactcggttattatagtccaattttttttattttttcttaaagtttgttttgatcatattccttagtttacatttacggttttgataacgtggttctcatataatgacttgaggattttactattatatacctaacaggctaacacatattagtgtattactcagttaatttatgatagcacatgtgatgtggggtcacaatctccactgttatagtcatagtgcattacagttcatatctttctctatctccccatcgacaccatcttcttcttcatgcagagacatctctttctcggcttttaacccaagattccattactcaacccttatagaatctgtgccctctctgcttgttttgcatttcagtgaacaatagaggaaactgaaaatgaattatcatcctctttctcccatgaaaatttattatacatcttcctctttctcgtctcattacctatataaaacctcttctagatatctaaaatctaaacctaaactcaaacacaaacaacatacatagtcatcgtgaagaagagtgctctcttggagtatatcatcgtgaggactcctactgacgtctcccagaatatgacttcggagacggtctacactgtgcagatgcctcaggatggcggaggtggagccagcagctccaagtcaaccaaaaaatagaaaactagctactgtattaagtattatgttatgtaataaactatgtcgtttgactctcttcgatcggtttgttgtgtgactttttttttctgctttgttaacttattgtgagactgttttctaatttaatatctattatgctaagttatatattcttgtttttttttttctctttctaatatgtttttgtctaggaagtgtgttcttgccttcaagatgaggtggagcatgaagcggtgaccacggctacgcgacacggcgaactcaaaacaattttcctttttagtttcttacacttttctttaaattttaaatcccataatttgtttgcttgtttcatttctctcagtgtttttaaatattcaagttactctttaaagaataaaaaaaaaaaaaaatatatatatatatatatatatatactgcataaagaatggggaaactaggagtagtgaacaagagagaaaaagacattttggggaaaaaaaacatgaagctcagagtcgaaacattaataacaagacgtgtaggcgtctagcatcaacgcttaccaatcttatcggggtcgggctcgcttgtctaatgtggttcacttggtttatctatgtggattatatttattaatcaatgagtttctgtacgtgtaaaaaagtttttgtcgaacaacctaagcaatgtatgaattgtgtggttagtttttaagtcacgtgaattatattgtatacttgttttttcttttattttggtatacttgtttccttgtcaacaaatttatcgtaggttttaccagtggtccacgatagactgaatattgcgtaataaattaaatatagaaagtgaagaaaaaatatagaaaattggaggattcgattagtctgttttaaccaaaaaaggaaagaggaagaatgctatgtaaaccaacaaccaagccttggtttgctttgatttatttgttgatattgggtatcgagaatttgagatactcaatttctaattcatcaaaacattattagccttttaaaaaaaaaaaactctgttttgtggtctcttgaaacataatttctaatg

SEQ ID NO: 5640 - DNA, 3000 bp, Unknown
  misc_feature (1)..( 3000): cDNA_ID_1827914_gDNA_ID_1620807_Annot_ID_168896 3000 nt of promoter + ATG
atgagtcacctacaacatgaatctgtgcaagacacgttgtgacgatatacatctataaaaacatattattaaattgtagttacgaaatatacccaacattgcatgctgattgttacatttgttttaccctcctctgttttataaaacctcaaaacagactcttcacaaaagcttccacattcttgtccgaagatcctccttctctacccgcttcagtcgctaaacgcttccatttctctgcgttttccctcagctccaccgatttcgcctccatcactgcttccaaacaccgcattatctctcctctctctactaaaccttccgagttctctctcaccctcacacctgtcttccatatttcttccaaaagcttcgcatttgctggctgatccgaccacatcggaaacgccaccactggaacgccgagaaccaaactctccagtgatgagctccacccacaatgagtcaaaaaacaacctatggctcggtgtctcaaaacctctatctgcgaacaccacgagacaatcatcccaacctcttcaagctcgtgtctaaaaccagctatcttctcaatctctgtctcttcttctccttctattttcgcttctctgttgagtttatcagttataacccacaagaacggtcttcccccttctatgagtgctctcgctagttcctctatctgtttcttcgacaactcaaccattgttccaaaagaaacataaataacagaggactctgttttcgagtctaaccaaagtgtataactactactttgatgatctcttgataaatctttacctgattcgcttccagtgaaaatctccgcaggaagtaaaggaccaactgccaccatttctatattcggaatagctgttaagaactctggctccagcgaatcgaatgtgttgacgagaattttcgggttagattcttctttgagaaaatccatcagttcttgatatactgcttgtgcggctttgttcgtgttggaaggtgagaggaaagaaggcagatcgcggatttcgagagaaggtagattcgggaactcgaaaacggagttgtttcctgtagagtaattgtaataaatgtcgaaagcgaaggctggttggatccagagatgaacagagggaagatgaaatctacgcgccacttttggaacccagttgggaagaatcgtgtagatcaagcaacttacgggagagtcaccattctgattagcttcgatgaaatccgatagagctttatcgccattacgttcgaagtgtaccaaccggttttggacgtcgtcggtgttggagatgactccgtcgtcgaatccgtcggagaaagtaaggaaagagagattttcgacgttgttgtggtttgggatcatagagcggtgaatgacagagagacacgtggcgaaagttacacgtgcgccagttgttttgatgagccgacgagcaaaacggagagatgggttcacgtgaccttgcgccggaaacgttaccagtagaaaatgcggttgcgccattttttgaagtgactttcttaatacgtacgaggtgtgtctcctcgtggatttgtgctgttatatgtatataaatggaaaatatattagatgagagtaatgggatttcatttggggtcatgtgacatgagataacatgttttaccgcttttggcgtgatccacgacgtacgccatgatggagatcataataagtatcatgctgaatatactatataatttatttataaaaaaaatagaacgaaagaaaaagtatcatgctgtcaaaaagaaaaaaaatatcatatttttatagagaaaaaactcgaaaaatatctgtttaatatctatagttgtttgaataatatctaaattaattttatgtttttaaatgcttttttaattcaaacattcaaattcatgattattatattttaacggatgttctaactgtggttgaaatttaactcatgatattcacgaaatgtataatctattttctaaagtttacaaatatattagtgtaatctaatggttaaatgtggattgattctcttcataaatctaagttcgaatcccccttctttcctaattaatccaaatttattaagatagtcaatccctctttgtcctaattaatccaaatttactaagatagttagtcaatccacgtttaaccaccatactaacctaatatatttgtaaagtttagagaatagatagtatatatatttataaataccatgagttaaattttaattatagttagaacctccattaagtaccaaaatttaaataaacgaaagcttttaaatttgggaaaatttaataatatatgtattaaatggacaaataaaagttagatgagagtttttttaaattttttattataaaataatttttttgcatgaaattgtttttaagataaaattttgacataaccaaatattattttccgccacgaattgagtctacgagagatgtcctgtctttaaactcgtaaagttttggtcttacccaacccaatacccacaaaggtaaacgacataacggttaataatattctaaccggtttataagtttacataaatcatttactaatccgcgtgtaattaagttttatgaaatgtggttattttgtaggtcacgtgaaatttattaattttttagtacttgtttttcttttttgggttcaactagttacttttttcctttgacatcaaaattattgtagacgagtggtccatatatagatggtgaaatgaaatgaatattgagtaataaataaatatagaaagtgaacaaaaaaaattagtggaaaaggtaactggaaagaaaaggcttattggcttggcaagattccataagtttatttcaccaaaaaggaaagagtacttggccttgctctctctctcttttaaaatggtaaactggtaaagataggagactcaatttctagttcatcaaaacatatttggcgttattatttctgtggtcacttgaataata

SEQ ID NO: 5641 - DNA, 3000 bp, Unknown
  misc_feature (1)..( 3000): cDNA_ID_1827922_gDNA_ID_1620807_Annot_ID_168894 3000 nt of promoter + ATG
tttgtccatttaatacatatattattaaattttcccaaatttaaaagctttcgtttatttaaattttggtacttaatggaggttctaactataattaaaatttaactcatggtatttataaatatatatactatctattctctaaactttacaaatatattaggttagtatggtggttaaacgtggattgactaactatcttagtaaatttggattaattaggacaaagagggattgactatcttaataaatttggattaattaggaaagaagggggattcgaacttagatttatgaagagaatcaatccacatttaaccattagattacactaatatatttgtaaactttagaaaatagattatacatttcgtgaatatcatgagttaaatttcaaccacagttagaacatccgttaaaatataataatcatgaatttgaatgtttgaattaaaaaagcatttaaaaacataaaattaatttagatattattcaaacaactatagatattaaacagatatttttcgagttttttctctataaaaatatgatattttttttctttttgacagcatgatactttttctttcgttctattttttttataaataaattatatagtatattcagcatgatacttattatgatctccatcatggcgtacgtcgtggatcacgccaaaagcggtaaaacatgttatctcatgtcacatgaccccaaatgaaatcccattactctcatctaatatattttccatttatatacatataacagcacaaatccacgaggagacacacctcgtacgtattaagaaagtcacttcaaaaaatggcgcaaccgcattttctactggtaacgtttccggcgcaaggtcacgtgaacccatctctccgttttgctcgtcggctcatcaaaacaactggcgcacgtgtaactttcgccacgtgtctctctgtcattcaccgctctatgatcccaaaccacaacaacgtcgaaaatctctctttccttactttctccgacggattcgacgacggagtcatctccaacaccgacgacgtccaaaaccggttggtacacttcgaacgtaatggcgataaagctctatcggatttcatcgaagctaatcagaatggtgactctcccgtaagttgcttgatctacacgattcttcccaactgggttccaaaagtggcgcgtagatttcatcttccctctgttcatctctggatccaaccagccttcgctttcgacatttattacaattactctacaggaaacaactccgttttcgagttcccgaatctaccttctctcgaaatccgcgatctgccttctttcctctcaccttccaacacgaacaaagccgcacaagcagtatatcaagaactgatggattttctcaaagaagaatctaacccgaaaattctcgtcaacacattcgattcgctggagccagagttcttaacagctattccgaatatagaaatggtggcagttggtcctttacttcctgcggagattttcactggaagcgaatcaggtaaagatttatcaagagatcatcaaagtagtagttatacactttggttagactcgaaaacagagtcctctgttatttatgtttcttttggaacaatggttgagttgtcgaagaaacagatagaggaactagcgagagcactcatagaagggggaagaccgttcttgtgggttataactgataaactcaacagagaagcgaaaatagaaggagaagaagagacagagattgagaagatagctggttttagacacgagcttgaagaggttgggatgattgtctcgtggtgttcgcagatagaggttttgagacaccgagccataggttgttttttgactcattgtgggtggagctcatcactggagagtttggttctcggcgttccagtggtggcgtttccgatgtggtcggatcagccagcaaatgcgaagcttttggaagaaatatggaagacaggtgtgagggtgagagagaactcggaaggtttagtagagagaggagagataatgcggtgtttggaagcagtgatggaggcgaaatcggtggagctgagggaaaacgcagagaaatggaagcgtttagcgactgaagcgggtagagaaggaggatcttcggacaagaatgtggaagcttttgtgaagagtctgttttgaggttttataaaacagaggagggtaaaacaaatgtaacaatcagcatgcaatgttgggtatatttcgtaactacaatttaataatatgtttttatagatgtatatcgtcacaacgtgtcttgcacagattcatgttgtaggtgactcatgggaacctgactcatgtatagttgagtttacaaattatatgcaccttcattgattcaataaaacttgtattactaacgttattgtgatccccgtttaaatttgttgcatttaatttgttagtctaatatttaatttagatgtgggttacataaagttgctttgataattgggatatgtttttttctgtctaatacacagataaaggcaaatatacgatcaatcacagttttaattatttttgttttttcaatgaaacaactctgacaaagaagatttggattggccaagtgatctcacatattctaaaatgtgagaaaaacaaaacagtattttgaattttttttatttaatagaagatttggtcaattgttaacataagttgatgatgaattagttgccaaaaaacccaaaatccattataacttttgcaattaattactctgttactttttaaccctaaaaaagcatgtatgtatgttattagagacagacgactctctctactcataaaatctctctcacatagatagatccctttccacagtttcgtctctgcttttgattcttctgaggtcccctgaatttacagaatcacaaagaccaaatttttcattccaatttcggatctttacccttaaaaaccatgtcagagatg

SEQ ID NO: 5642 - DNA, 3000 bp, Unknown
  misc_feature (1)..( 3000): cDNA_ID_2159919_gDNA_ID_1620807_Annot_ID_168892 3000 nt of promoter + ATG
ttctcggtggtttagtttctgaatcttgttgtctctttctctaggcttggttaagctagaaccagacctcttataccttaccaaagccttcctttccactaaagaaactctcttgattggtgaactggcctttctcaagtcatcatcatctctattatctccaactacctcctttacatatgattcatcgtcactcgaggaggaagaggaagatgaagacgacgatgatgacgatgatgatgatgaagatggatcctcagaagacaaagactccaccgttacattatctttggtgttattatcttcactatcttgattttcttcttcctcttcatcggtttcacttgagctatcttcaccatcactgatagactctacaattctgctactttcttcaaatagcttcttcttggctgaagctcttcttctagcttcagtttcagactcagaatctgaaagaatctctatttcgccagggactgatttttccaaaaccaaacctctaatctcaggggaacacttgtccttcaaaaatctgatttcttctgacacatcttttaacacagaagagctcggaactgatattacaagatccaaatcagcaatctcaggagaactcttctgcatcagacatgtgttcttctgttcagacacatcctttaacttagaaaatctcggaacaggtatcccaacatccaaatctgtaatctcaggggaacatttcttctccacgcccaaatcactaaccctaaaagacctctctttcagacatgggttctgctcagacccatctgttaacctagaggagctgggacctgatttcttctccacattcagatctctcattatcctagaaaaactctcttttacagagttgttaggtacagagtacatgttactgacttgaggaggaggaacactgtcgttgcaagttggtgtgatgtcctcaatgtcggagtcatagtttttaggtttcttctgccgtcgtttctttgggggagatgtcaccggagctacagtctccatcttcttccgcttgttaacagcctgaagacgctgccagctccgggacttcactctcttcccaatacactccattaaagcaaacacaaagatctgaaaaaagaaagactgttagaaatctagagaagacgacaatggggtctgtaaagaaacagagagagagaaaggtaacgaacctttagatgagaaaaaatcgaatctttcactcactcacacgggtctgagaagaagatgatgaagttcttgagtttttagagaaatttttgattttcactggtttcagaaagtggaacagagagagatgggcagagagagagagagagaagggcatgaagaaagcgtgatggcaaagccaaaccatgctatttcaggaggtctctcataccgccaaaacggtactatttttccacacactctgctttttggttttggtcaaaaaatttcttacatttcgttaaaaaaacagctcattaatcagtttccatttcaagcattgtttttttctgttctaaattacctttttgaccactctgaaattacagagtcaacacgtcactcaaaactgcaggaagagaagatatttcattacaagacaaacaatgtgtaataaattatgtcttactgcttctaatttttttttctgtgttttccttttgcttttgttttgaaatgtaatctttttagtttaccaatctagatttgttataacaatttaaatgaaaaaaatcgaatcatttactattttataaaagaatctcaaaccctttctttgaatgggattggagattggagtattattgaaatcaactaccttcctcttgctggcatttaattccactattagacctttatattatttttaaactaaagaatattgtgtttgaaagaaaaggcaaccaaaaatgattacttacaaacatatacaaacaaaggtttttagaatataaagtagcaaacaacatcattccaaggagagaaaacagagaagaatacttgtcattaatagagagaggtatgagttcttcacgcaaagtctttttgatattggaacttggtcattaatttacatcaccaacaagttctaaatatgatgaaagaaaatttatgtaccaacttcactttaagtgcccaccttttatctaatcgcagtaatgaacacatcacgtcctatgaggctttgacaaattaggaaaaaggctaaactgtgttagtcagaagataataacttacagaggggaccattattaatctcctaagtttatgtttttgtgacaagttacaaattcctcagaggattattagagaagcaaatatcgaaaactgtataacaaaactaacttcttaagaccgtaccgtcacataacatcaatgagccattaccatagccgaaaccagtcagctacacgagtacaagacttattatggtatgtagtcatctcatgatttaagggtataatgaagtatcaactgttagtcccccaagatcctaattgcatatgatcagaactctggactcgtttcttaagtgaggatttgcaaagctcaatctttgtcattgcgattatgttccggtgacgatgttcaaaatctttccggggatttagttccatcactgtctttcttttctatttgtttttgtctttaacaatgtcaaagtcaaaatctcaccgattctgtaaattccaagttatatgacgtgtcattgtattattggtgcgagcgatagcacaacctttgcgtctgcgtcggtagcgaactcttcggaaatatataatctgtaattaaaatgagactaatcccaatttaaaatcaaaaacctttttatttatttttgttttcctatagagatttcttagaaaagaaataaattacttctcttttatttttcattcggtttagctcgtggaactgaatctggtgtgtttgttgatcagagtaatacggacattgcaatttttctaaatccggcgattaaat

SEQ ID NO: 5643 - DNA, 3000 bp, Unknown
  misc_feature (1)..( 3000): cDNA_ID_1827934_gDNA_ID_1620807_Annot_ID_168890 3000 nt of promoter + ATG
tgcctttataagctcagaggctgcctaaaactccaaatcgaatcaaaagaggacaaaaaaaaaaactcctttaagaaacaatatctttatccataatacaaataacatatctctacttgaacgaattagacaatagaaacatacctcatcaacataaggccagatctttgtcaagtgatggttgagccaagtcaactgaagtaaataaaaagccaaagcaacaacaagaatcagtcccaagtatgaccaaattctaaaactttcgtgttcttccaatacgcagaaagagagagatgaaaacacatcaatatgtaagtaatgttgtaactcaacttctgacgctcggagaagacaacccaggaaggataaaactcaggaggcaaaagcttcctggaatcctccaccgtcatcctcgcaaaagcagccaccgtattcgccttataaaacagaaacaaaatcccgattaagaagaaaaaaaatcgaaattttcaatccgaaaaagggagagtggggtctcacaagttcagagcgaagcttggatcgagaattctccaacttgacaaagccgatgatgattgcgattccgacgaggagtccgattacaacgccgactatgaaacccatatttaatcgccggatttagaaaaattgcaatgtccgtattactctgatcaacaaacacaccagattcagttccacgagctaaaccgaatgaaaaataaaagagaagtaatttatttcttttctaagaaatctctataggaaaacaaaaataaataaaaaggtttttgattttaaattgggattagtctcattttaattacagattatatatttccgaagagttcgctaccgacgcagacgcaaaggttgtgctatcgctcgcaccaataatacaatgacacgtcatataacttggaatttacagaatcggtgagattttgactttgacattgttaaagacaaaaacaaatagaaaagaaagacagtgatggaactaaatccccggaaagattttgaacatcgtcaccggaacataatcgcaatgacaaagattgagctttgcaaatcctcacttaagaaacgagtccagagttctgatcatatgcaattaggatcttgggggactaacagttgatacttcattatacccttaaatcatgagatgactacataccataataagtcttgtactcgtgtagctgactggtttcggctatggtaatggctcattgatgttatgtgacggtacggtcttaagaagttagttttgttatacagttttcgatatttgcttctctaataatcctctgaggaatttgtaacttgtcacaaaaacataaacttaggagattaataatggtcccctctgtaagttattatcttctgactaacacagtttagcctttttcctaatttgtcaaagcctcataggacgtgatgtgttcattactgcgattagataaaaggtgggcacttaaagtgaagttggtacataaattttctttcatcatatttagaacttgttggtgatgtaaattaatgaccaagttccaatatcaaaaagactttgcgtgaagaactcatacctctctctattaatgacaagtattcttctctgttttctctccttggaatgatgttgtttgctactttatattctaaaaacctttgtttgtatatgtttgtaagtaatcatttttggttgccttttctttcaaacacaatattctttagtttaaaaataatataaaggtctaatagtggaattaaatgccagcaagaggaaggtagttgatttcaataatactccaatctccaatcccattcaaagaaagggtttgagattcttttataaaatagtaaatgattcgatttttttcatttaaattgttataacaaatctagattggtaaactaaaaagattacatttcaaaacaaaagcaaaaggaaaacacagaaaaaaaaattagaagcagtaagacataatttattacacattgtttgtcttgtaatgaaatatcttctcttcctgcagttttgagtgacgtgttgactctgtaatttcagagtggtcaaaaaggtaatttagaacagaaaaaaacaatgcttgaaatggaaactgattaatgagctgtttttttaacgaaatgtaagaaattttttgaccaaaaccaaaaagcagagtgtgtggaaaaatagtaccgttttggcggtatgagagacctcctgaaatagcatggtttggctttgccatcacgctttcttcatgcccttctctctctctctctctgcccatctctctctgttccactttctgaaaccagtgaaaatcaaaaatttctctaaaaactcaagaacttcatcatcttcttctcagacccgtgtgagtgagtgaaagattcgattttttctcatctaaaggttcgttacctttctctctctctgtttctttacagaccccattgtcgtcttctctagatttctaacagtctttcttttttcagatctttgtgtttgctttaatggagtgtattgggaagagagtgaagtcccggagctggcagcgtcttcaggctgttaacaagcggaagaagatggagactgtagctccggtgacatctcccccaaagaaacgacggcagaagaaacctaaaaactatgactccgacattgaggacatcacaccaacttgcaacgacagtgttcctcctcctcaagtcagtaacatgtactctgtacctaacaactctgtaaaagagagtttttctaggataatgagagatctgaatgtggagaagaaatcaggtcccagctcctctaggttaacagatgggtctgagcagaacccatgtctgaaagagaggtcttttagggttagtgatttgggcgtggagaagaaatgttcccctgagattacagatttggatgttgggatacctgttccgagattttctaagttaaaggatgtgtctgaacagaagaacacatgtctgatg

SEQ ID NO: 5644 - DNA, 3000 bp, Unknown; identical to SEQ ID NO: 5634
  misc_feature (1)..( 3000): cDNA_ID_1828981_gDNA_ID_1620807_Annot_ID_50562 3000 nt of promoter + ATG

SEQ ID NO: 5645 - DNA, 3000 bp, Unknown
  misc_feature (1)..( 3000): cDNA_ID_3077945_gDNA_ID_1620807_Annot_ID_50563 3000 nt of promoter + ATG
tcatcaatatataaaaacaacatgtaccaagaatataatacatatacacatacgtatatggcccatgttatatgggaaattgataatgtgcaaaaatgtcatcgttcatacaacgaccgttgctcctaaaagtacgatatcaaccatgtgtgcacctaatgattggaaatgtaaactcttttatcaatcataaaatattcacaacctcttatcatatagatatcacatgtacttaattgtaccatagactccaataacgaaccaaaataattatgctctctctccctatatatacccatgcatcaaatcaaatcaattcaaacacaaacacaaacacaaacacaaacataaactcaaactcacatataaaaaatgacaaaatcagctataacatttccacttatcttcacacttctcaccttcatcgatgtctcgagcagcgcctccattgttttcaacgtcgtgagcttcggggccaaaccagacggagtcaccgattccacagcagcattcctaaaggcatggcaaggggcttgtggctcggcagcatcagccacggtggtggtccccacggggacatttttgttgaaggtaataacgtttggagggccatgcaagagcaaaatcacatttcaagtgaccggaaccgtcgttgctccggaagattataggacctttggcaattccggttcctggattctcttcaacaaggttaacagattctcactggtcggtgggacttttgacgctcgaggtagtgggttctggtcttgccggaaatctggccagaattgtcctcccggtgttagggtacatatgcttctcctctatctatagttattgtaaataaaaacaacaatctgacattcatacataagcgccaccagaatgcaaaagagcaacaaatagctttaatcattattgattagtaataactaaataagtcaatatattttttttaatagtcaaataacatatctttattccaatcatttacttacgattaaaaaaaaaaaggaattagttgatagttttcaactatattaattcaggcacatttaattttcaatatgatctatccatgccatttttaggaatttattttataagcatataataactattatgataatgatttttggacaaggaaatggattctttggtcaaaataaaatgaaatatttataatcttattattaatctatggcgtttatatattaattactgtagtcaatatcgttcaactccgcaaaagacgtgatcataagtggagtgaaatcgatgaacagccaggttagccatatgaccctcaacggttgcaccaatgtggccgtccgtaacattaggctggtggctcccggagacagcccaaacactgacggcttcaccgttcagttctccactggagtcacattaaccggaagcaccgttcagaccggagacgattgtgttgctatcggtcaggggacccgcaacttcctaatttccaagcttgcttgtggcccaggtcacggggttaggtatacaccaccgtctaattccttagagtaaattatgtaaatatatcattaattgttaggaatcatgaatttccaacaaaaaaaaaactagcaatattgccttcactcactctggtcacaactcatatgatgatgtgatgactggcagcatcgggagtttggcaaagcagttaaacgaagacggagtagagaacgtgacagtatcgagttcggtattcaccggatcacaaaacggcgtgaggataaagtcatgggcgaggccgagtaccggattcgttagaaacgtcttctttcaaaatctaatcatgaggaacgtccaaaaccctatcataatcgaccaaaactattgtccgtccaaccaaggttgccctactgaggtatatccatatcatatttttgatcaatttcagactaatcaaatatgctatatcaaattatcaacttagtcaaataactaaagatttattatgtttatggtatgtattagcattcgggggtgaagataacccaagtgacgtacaagaacatacaaggaacttcggcgacgcaggaagcaatgaagctggtgtgtagcaagagcaatccatgcacgggaatcacattacaagacataaagcttacttacaacaaaggaactcctgctacttccttgtgcttcaatgctgttgggaaaaatcttggtgttattcaacctactagttgtctaaatcgatgaatttatttggggttaagatgatatcactgtgaaatgttattaggaaactgatttttcaaatagttttctgtaacaaggtatatgatcaccaatttctgtaacatacaatttttttttttttattaataaaatattattttcagtaaccaacaaagtggaagactttgacttgttgtcaccatcacattgtgcttttgctttttggtctttgatttggacaacaaaaatataaagaaattagagaaaagaagctttaactggatataaagttttaaactggagataattgacatagtaattaagaatttgttgcttcaaaactcaaaagaaaaagtaatcactaatattactaaagattttggaagtttagcgaaattaataaagaaaacagctgaagatgcagtcactcatcacagtctctctctctatctctatatcctgagaatcttacatgatttgcccacaaaaagcattgagatttacaaatcaatctattgggtttcagctacactctactgaaatcagctgcaaccttttttttttttctctctcttctttcatcacatcggtttgaatctttacaagaaatctggaaatcacagggaagtcagggttttccattttcaagctggttctgttattacgaaacacgggttgctggaaaagagctcacggattcttcaaacaaagttggcatctttcagatttgggagaaaaagttgttattcaagatctttgtgtaatctaagggagaagcataccatg

SEQ ID NO: 5646 - DNA, 3000 bp, Unknown; identical to SEQ ID NO: 5632
  misc_feature (1)..( 3000): cDNA_ID_1828969_gDNA_ID_1620807_Annot_ID_50565 3000 nt of promoter + ATG

SEQ ID NO: 5647 - DNA, 3000 bp, Unknown
  misc_feature (1)..( 3000): cDNA_ID_1828965_gDNA_ID_1620807_Annot_ID_50566 3000 nt of promoter + ATG
ttatttcaaatgattatttaatttttatacatttcacatattataaatattataaaacgtttttccgttaaatattttaaatgtttaactaactataatatttatttttaataaagtataatattaataaattcctaagatttctcctttttaaaagtaattagaattgatggaaatatattagataaagaaatgctaataattaagaatattaattagttataataattaaatatcaatgacatccactgtaaataagtcccaacttaaggatttatttactaaaatagctccaaaaatgtatatatagatgttatcaaaattcgaattaaaaagttgtaaaaagactcggaggcggtcaaaatcaatttttttattttcttgcataaatttgtgaactccagagaattaagaatgaccagtgatagagctccacgtggatagattgggttccaaagtgggacggcgttaaatataaaaaggccggaagttgtcgaagtagtcttttttcccattatttctgttttcggttccttattttgttcctttgtaataatgagtgacatcaaaaatatttggggacgaattaacaggtaatgtaaatagaaagaaatagaaaattttctttgattttacaatttggattcggattgcataagcaatgacatcaacagtaatacatagctgagaggctgagatgcagtgtctctctctcagggaagatgacaaaaagaatctgatatacacgtacgtatgttgcgagttacatattgatatatcacatgtcataagtcacatgctaacgataaactaataaactaaaacaattatgtcaacatatatcggtgaattgcattatcatcgacctcggtcactgttccgcacatcttggtcgccacggaacatagacaatttttggattgtagtccaattaatgagtcccccaccaaagccgtagtaaaatcgaagtcgttctctaatccaatcatatatatatccataacacacaccaacaacacccacacaacaaaaactagagtcagtaacaacacaagattaaaaagaaggagaaaatgagagaaggatctcatcttatcgtcttgcctttcccaggacaaggccacataactccaatgtcccagttctgcaaacgcttagcctcaaaaggtcttaagctcactctggtcctcgtctccgacaaaccctctcctccatacaaaacagagcacgactcaatcactgtcttccccatctccaacggcttccaagaaggcgaggaaccattacaagacctcgatgattacatggaaagagtagaaaccagcatcaaaaacaccttaccgaagttggttgaagacatgaaactgtcgggaaatccacctagggctatcgtgtacgactccaccatgccatggcttcttgatgtagctcatagttatggattgagcggtgccgtgtttttcacgcaaccttggcttgtcacagctatttactaccatgttttcaagggttcgttctctgtaccgtctacaaagtacggtcactcgacattagcatctttcccttcgttcccgatgctgactgcaaatgatttgccgtctttcctctgcgaatcgtcctcatacccgaatatactgaggattgtggtggatcagctctcaaacattgatcgagtcgacatagtgttgtgcaacactttcgataaattggaggaaaaggtacagaatataaatccatatagaggaacatgtctctgtcttttgtaggaagtgttttaagttttattttctctgcttgtagttgttgaaatgggtccaaagcttgtggccagtcttgaatattggaccaacggttccatcgatgtatttagacaaacgactgtctgaagacaagaactacggttttagcctcttcaatgcgaaagtcgctgaatgcatggagtggctaaactcaaaggagcctaattctgttgtctatttatcattcggaagtttggtgattctaaaagaagatcaaatgttggaactcgctgcgggtctgaaacagagcggacgtttctttctgtgggttgtgagagagacagagacacacaaacttccaagaaactatgtcgaggaaatcggtgaaaaaggacttattgtaagctggagtcctcagcttgacgtacttgcacataaatcaatcggttgtttcttgacacactgtggatggaactcgacgttagagggattgagtttgggagttccaatgattggtatgccacactggactgatcagcccacgaatgctaagttcatgcaggatgtgtggaaggttggggtaagggttaaggcagaaggtgatgggtttgtgagaagagaagagattatgagaagtgtggaagaagttatggagggagagaaagggaaagagattagaaagaatgctgagaaatggaaagtgttggctcaagaggcagtttctgaaggaggtagctctgataagagcatcaatgagtttgtttctatgttttgttgaatgatttaaattgatatgttcaaaagtacatcgtcttttgcaagtccaattgtaattcttgttgttgttgtagtaataactaataatatagtttctcatttgtcttcagctctctattaattccaagttccaaatgataacatgtgagttaaaaatccagggtttaataaaatatccaagccggataaaattttgcataactctataaaaattcatctcatttttttttaaaaatgaaatatacactacacacctaaagctactttaaatgtgacggccttatgcagtcaaaggtcatatggtaggttgaattatcatcgatgtctatccccacacatcttggtagccacgtttgacctttttggatagtagtcacaagaaaagtcgtaaaatcaaagtcgtcctctaacccaaccttataaatacacacacccacacataacagagtcagagtaagaacgaaagacaaaaaaaaaaaagatg

SEQ ID NO: 5648 - DNA, 3000 bp, Unknown; identical to SEQ ID NO: 5631
  misc_feature (1)..( 3000): cDNA_ID_2785751_gDNA_ID_1620807_Annot_ID_50567 3000 nt of promoter + ATG

SEQ ID NO: 5649 - DNA, 3000 bp, Unknown; identical to SEQ ID NO: 5630
  misc_feature (1)..( 3000): cDNA_ID_3409372_gDNA_ID_1620807_Annot_ID_50568 3000 nt of promoter + ATG

SEQ ID NO: 5650 - DNA, 3000 bp, Unknown
  misc_feature (1)..( 3000): cDNA_ID_1828957_gDNA_ID_1620807_Annot_ID_50569 3000 nt of promoter + ATG
ccccaaatcattccaacttttattttataaacattcgtggccttcatttttccactctgttgttttctcatacttttaataatttcttttgcccatttgtctttatcattcgaagaactcagaaacaactaactcttcattcttgattctcccacttaaacgacggcgtttttgcttaacgtttatgtatgcaagcaaatttacatacttttcgtgacctttggtttctgtgttgtgtgatatttactacgaaaccacttgtcaccaaaggttcttctttctgttagcgttgggttcgtgattccaagatcaatggttgtgaacttcactagttagagatactgaatcaaagagatgattcttccgagaattgggtaaatcttcgattctgattttctgggtaagaatgatcaagacccttcctttattttctttttttgttcttgcctaataattcttattctctgaatttgatttctttcttttaatgactcagaatcttccgtattggatgtttttgttcctgttcttgataatctctttatgactgtatctctacctctggattctcactgtcactgatgttcatgtctaatgaagcttctttaatttagtcttgttcgtgtcactgttcgatatttttaaatcaaaagttgctaactttgtgtcaatgatttgcttaagtaggactattttgagtttatggacatttgattcttaaattctgaggttgcatcagattagggaacttgaatcttggttactgtaaatttactaggagaaacctgagattgactattaactctgatatataacttatgtttgcttcttgcatttgatcttaacagattaaagaacacgtaacctattttcaattcgcgggtttgattccatagcttcttcagatcatacattctcgcaagtgttcgatacgggagtagaagaagaagagtctttctatgctcctgatcatgatgtcttgactctgcttcaacctaacttcaccagcaacgatgtctagtagtaccaagaacattccaaaacctcctcctcttccttgtattacctaccagcgttttcaatctagtacaaggaaaccttcgagcttaatgcgccttgtgcctaaagaagcacttgaaacttgggataagcttttcaaggaaggatctggagcagatacatatgttgaaaccgataacaagtctcactttcctgcccattcaagtgtcctggtgagttttattaactggtaattgagctcattttccgggcttactgatcaatattacaaggtttttgtcttctgcaggctgcagcctcaccagttatagcgacacttctgaatcaatcgagggataagaatgggaatacatacctcaaaatccatggagttccttgtgaagcagtctacatgttcattaggtttctatactcttcctggtatgttctatgtgttacaaatgctttcgtaatgcttgtttctcctttgaaccatgcctgatattaaaacctacagctacgaggaggaagaaatgaagaagtttgtgctccatttattggttctgtcacattgctactcggtcccatctcttaaaagactttgtgtagagattctcgatcaaggatggattaacaaggagaatgtgatcgatgtgcttcaactagcgagaaactgtgacgtgacaaggatttgctttgtatgtctttccatggtcatcaaagacttcaaatctgtatcttcaacagagggatggaaagtgatgaaacgctctaatcctttgctcgaacaagagctcattgaggcagtcatcgaatccgacagtaggaaacaagaaagaagaagaaaactggaggagagagaagtgtatttgcagctctatgaagccatggaagctcttgtccacatatgtcgtgaaggttgtgggacaattggacctcgcgataaggcccttaaaggaagccataccgtgtgtaaattcccggcgtgtaaagggcttgaaggtgcgctcagacatttcttgggatgcaagtctagggcttcatgttctcattgcaaaaggatgtggcagcttcttcagcttcactcttgtatctgtgatgattctaattcttgcaaagtttctctctgctggtaagttatatcgcacatttcagacaacgccaacaaccttaagatacagatggtaatcgttttcttaaccttgtaggaatttcaaggagaaaatgaagaagcttagcaagaaagaacaatctaaatggcgattgcttgtagaaaacattattagggcgaggaacagtctcgggcccttctcgtcacgttcttctggtttgatatagaaacaggttttagattttagtgtatagccagttagacacaaaaagaaaacgtacataggcgcagggtatagtgtatattgcgcaccaatacggcgcacaatagtggttttgaacaaacattgtctatatcaagttggttgttatatacatgccgagtcgtgattcgtgacagtaatgtgaagaagtttttgcatcatcactcattttatgttagaaattcaaatcaataatattggtcctaaacgactttatttagaggcagacaaaaaagatatacattaatgttatttatatcatgattgtcatgacttaacatatttcaagttgagttatctagtgaaaatatatatatcctagttcatgaaaaatgaaaatcaaccttcttgagtgttatacttctttttgtaaggataataattgatatatacggcgggtctctcgttgacttttgatggtgatttgactttgcaatgtcaccaagagcaagtagctaatttaaatcacttttaacttccaatttgtttatgtttggtcttcagactttacgtcagaataattatttttgtgtctttaaatgaaaacttcaaacttcatcacatcaaaaatctcaaccccatttttagttgtcttctttttccttgtttttcaagaaaccagacgaaa

SEQ ID NO: 5651 - DNA, 3000 bp, Unknown; identical to SEQ ID NO: 5629
  misc_feature (1)..( 3000): cDNA_ID_1828953_gDNA_ID_1620807_Annot_ID_50570 3000 nt of promoter + ATG

SEQ ID NO: 5652 - DNA, 2865 bp, Unknown; identical to SEQ ID NO: 5628
  misc_feature (1)..( 2865): cDNA_ID_2992610_gDNA_ID_1620807_Annot_ID_50571 3000 nt of promoter + ATG

SEQ ID NO: 5653 - DNA, 3000 bp, Unknown
  misc_feature (1)..( 3000): cDNA_ID_1828950_gDNA_ID_1620807_Annot_ID_50572 3000 nt of promoter + ATG
ccttgtaccctatgtaacatgtcttgttagtataaattttgggtcatgttgtgttgatgactctttagcgcatttcttattgacaaaaggtatggaattctctagagacgctggaatgatgatggagaataagcggaatgtctgctctctcggagaaagcagtatcaaacgccacaagtctgatctctctttcagttccaaggttttgcttatcctagctagttttcatggatttctcggtcgaaatagtcttcggtacaacaaattgcatggtaatgatccgtccatctttgttctcttaatggcaaacaggagaggaaggacaaggttggagaacgtatttcagctcttcaacaaatagtttccccttatggaaaggtaactttgttttttttggcaagcaaatcaaaagaatctgtctctcagctcatacttttctctaatgttcacagaccgacactgcatcagttcttctagacgcgatgcattacatagagtttcttcacgaacaagtgaaggtctgcagttcaataccaagcatgattcattcatctttatctgagttcccatgttcttttgtacaggtgctaagtgctccgtatctgcaaacggtacctgatgctacgcaggtgagtatgatcttgaatctcaacttcatttatacttagttcactagttctactctgcatctgacagatcttcacttggaacttgaataccttgcacggactgattttcccgtcttttgtaaccaggaggagctggagcagtacagcctgagaaacagaggattatgtcttgttccaatggagaatacagttggagttgctcaaagcaacggcgctgatatatgggcgcccgtgaagactcctctatcaccagctttcagtgtcacatctcaatcaccctttagatgaccaattcgactaatcacctactacgatctttgtgttaagcctaaaaaagaatgaccaattgttatttttctgatgatgcctctgtaacatatatagacagagagcacatgatgttggtttagaacagctcatggttggcaatgattgttattattattcgactgcttaatgcatccccttactttggacttgtgtaatatgcccaaacaggaaccaaatgattttaatgcaaagtaatctttatcccaaaaaatgcctcagatatcttaagcttttctttgtgtgattcttacctacagcatccaatacattattctagatctaaagacccaaggcaagctttctttcagtgctgaaggtatgatcgtggatttccctaatacatatagctttctttcagtgcttgtaatagtgccaaactgctgaccacagaattaagattatcctttcataagaacattggattaaatacattaccactgagaattgcaaaggttcagaacatacagactgttgataccaagggaccaaatagcttggacaaagataagataagtcggtcataatgtgtttttaactactagattgcaatgctttggcatatgtaaatgtgacagggaggatcatcctcttcagctctacatgggataaaactaacttgctgcagtaggcttgaccttctctcgcatatactgcagtagatgttcgcgtttccagttgtcgattctgcaaaacaagcaaatcaagaaacaaagaggtcagctacaaccttggaggaatgaagttgtgttgctgatagaggatgaggtgttaaagacatcacttattcatgctcacaacgagaaaatcctttcaaaaaccaatttaaactagaggtctaagtaaatgatacagcagaatgtaacagagcaacgagagagtgagaatagaaactgctgcagatccatggatagttatatttttatctaccaagctaacatggatatatcaggtcaccttgaacgtcttaaatcaggtcaactcgttcccccacccaaactctaatactaaagattctagcaaggagttgagcaaagggggttataaagcaacttacctaattgattccttatgttcaccgtcttcgtcgagcatgatcaacttgggtggtgagttgaaaatgtactgaactttgacgctagggaacttttctttctcttcttcaatgaaaccaacaatttcaggatagaaaaccaacttcctcatacacacctctaatatagcgccagaataggtaacctgcaatggcaaaaaaatgtaaacttctcttcattcatatccatgttataggagatgtttctgtattcatctaatctattcccattaaaattcaaaagcactacaaattacatgcctagtgatcgtaccttgctcatggaatcctcagaatcatcagcacaacatttcaagcaatcagataccaactctgcaaacaagatcaatcaatataagataaccaatttagtaattccactcctcaaaaccaactttagagagaatgatctagctcataaaatacacaaaaactaaaatatagaatcttttgggggaaaaaaagcaaaactgcagtaattgagatcaaataaagcacgcatagaaaggcacgaaccttggtccttaacgtattcagagagtgagtggcaatcggagcagagtgcaagaccgctaaaccctagatcctcacattctttagtgctgagctgctcttttgctgagatcgtcgatgccaatatcaaaatcatcatcgctgataaaacaaccatcttcgccatctctctctgtttcatcaacagatcaaagtcttcgcagatccgacgctactctaactaatgtcgctgccttgctatgatccgatccggtcaattccggttttttaagtatccgaaaaagcaatcttggtatagaggaaaccatctccggttataaataaaaaagtcttaaccgacgtgaaaagtgttaaaaccccaattcacattagcctgttgcgatctaaaacctctaaaaccctagaatcaaaatcgcccattcgagatcgagagagacg

SEQ ID NO: 5654 - DNA, 3000 bp, Unknown
  misc_feature (1)..( 3000): cDNA_ID_3076789_gDNA_ID_1620808_Annot_ID_168931 3000 nt of promoter + ATG
aaagttacaagtgaaagaaatcagtaattttttatttattttagaagtgaatttggtttgagacaaacacgaacaataaacttataaatctacttaattaattttctgcttagctgaatgagtttctaaaaaaatttggttgcttattaaagattaaacaaaatgccgattgcagatctttcacgtggttaatcaatttataaatttttaaaacaaaacaatcgaagttcaattttatttttgtcgtaatcgaagttcaattgttggatacaggtctgacgcgatcgtgataagattttatatgctatttaaaagaaatcatgtggcctggccaaacacacaagtgttattagtaaaaaactatcttcagacttgttttatataaatacatttatttgtatcacctattatgaattgttttttctccatatatatacgttgggttatatcttatttcaagtgggtagcttatactctctctgttcctttttgtttgattgtttagaaaaaacacacatattaagaaaatatattaaatgttgattataaatgtattatttttagtgttttacagttttctataactctaaaccaatgatagttaactatttttcttgaaaattacaattcaccaatactaaccaataaatattacatagaaaacttaaaaaattaatcttttagaaacaatttttttttctaaacaatcaaacaaaaaggaacagagggagtatttaattgcatcagttacaattttgagaaactctcttactaaaaataatataaacaattaataaataagtagagagaatgacaaaaataaaaaatagtttctctgcagagaaactttggagtaatgatggaaaaactatatgtataggtatgtgtttataattggacagaaactaaattatattaaatatatattttttttttttttgaaaaacttttaaagtatatgtaaatctattggtgagatggctaagtttctcttcttctattttttccttctggatattaagatctattatctcattattatatgtttaatccaagataatcacttacctgccggaattgattctcgttatatgtaaatcatcatgttaaacagttaaaaaaattgtgatatgatcaagtcctataaaagtttgaaatgatgatcaaacccaaacaaaattaagcttacaaaaagagaaaaaaataatatataagccttatgtttaacaaaatgtttagttgatataagtcgtttttaggatctgattggtgcacattttagctgaagaaaatgactcttaacgtcagctcaaaacataccaatcaagtaaaaagacaagagaaaataactatgctagctctactcttcatataactgtaaaaagaaagagatgttttcaccaatacaataggatgaaaatacttttcttttttgtttactccatttaaaagagttacttttactctatatttattatttataccaatgaaatcagacatttatatcagtttataagaggaaataaaactttaaagaaaagagagaaacatagcttttcgccaattttcactgtgtatctgtattcaaataattagagtaaaacaaaaaaaaattatacccaatcttaacataattattttcagcctttatttttcagctaagatgatttaccaatcaatttttaggtgagatagttatgatgcctaataaattggaggtgcaaagttcaacaaaaattttacttttatgtttaattgaaaaagactgcttctcagtttaagaactatggcccatttatagatactgattaaaacgtggattgtaaaatgtgggcaatcaatattattttaaaaatgtggagccatagttattaactgtgattaaatttccccctcctccactttcacgcaaactaatatttaaaacagtcttaactgtgattcaagtaataagatttttcttttattattatttgacagtacttcctccgtatcattttaagtgatattttaggaaatgtttttagaatgtagagttgtagaggaaaaactagcagaaaaacaaaaatgcaatttatatatagtacagaaggttagtttaattgtgtttcgagttaaatctcttttttgatatggaaaattattctttaaattaaaatatttaacatttgactttggataggagaagattaaaagctgaaaagctggaacttcaacacttttgagaaaagtgagctacaatagtattaatcttaccatttactgataaataaatatatactttctgttcaattttaatagttttcaaatttattcttgttgcacataaacaacataggatatataatttttttagttaggaaatatatgcttttacgtttctatgaaaattctagatatgattataatttactcttaaaatatgaaatagaaaaatggagtggaatattattatttagaaagatatatatatatatatatatatatatatttgtttgtatgcagaatgttagaccaatataattagtggacatttctataaaaaaacaaaaaattgtggaatggatgggataaaaaaaaaagagagatcaaagataacattttaagatgtttttctttctttaattttcaacaattttaggcaatttagtagtagggggaaatgtatttctatgaaaatccaaatatatgctaatgtatgcaacaaggaaagatatagtaaccaaaactccacttcatattacaaacaataattatttttataaaagtattgacttgtcgtctgcaaacgtgattacgtgaaccttactggtaataatacaaaaatcacagctctaatttgccaacccaatccagatctctctagttctcaacttctcatataattattcattaatatatttattttgagattttggttgattttttgatatataaatattggacttgccattttctattacaaccatcaaatctcaataaagcaaaacgaacaagaaa

SEQ ID NO: 5655 - DNA, 3000 bp, Unknown
  misc_feature (1)..( 3000): cDNA_ID_3077974_gDNA_ID_1620808_Annot_ID_168932 3000 nt of promoter + ATG
atgcgaaaaaactttaattattttttataatgatgatattatttttcgcaaaaatagaatcatataaagatgagaaatgaactataataattaataaaaaattaatatgataatttagatatcaaatctaatttgttgattttaataggttacttttttggaaattaataatgtatttcgtttttctaattaaattaaattaattaaaatttagatatcaaatcttatatgttgattttgattggttattatttttgaaaattaataatgtatttcgttttttaattaaatttaattaattaaattagtatttgactttttaatctttaaagagataaattaatttactctttaaaattttatttctaatggcatacatatgtaattacttacaaaaattaaggttatatttaaaatgtacttcccaaataatatagtaggatagtcgtcataaataaatttccaatttgttcaaattttttatataaaaaattaccaattgactttaatttggattgacttacacatttttagttgtcttgatgagaattaacaagaacaacttgcaagaagcttgaagagttatgaagtgatacccagagaaaggagtgtgaatgagaagtaaagatgtcatggagagaccggagacgattagtgcatttgaagaaaaagaaagtctcatgccatgtttggctcgagaacatacatatatagagagacaagccgtgttgaaaaaggaagataacaaaagcgtgctttgtcttttggtattatcatatatttataatcataatgttttctatcaagggaggcagaagaaactatactgtacgacgttaaagttacaataatgtttcctcgaagtcattagctcaatgtagtagtagagacaaaatcttttaactatattcgaatatgatactatgtttggagatggctgaattgctatataatttataaatttgttagcattatcatatatcgaaattgtagatttttttgggtcagaataaaaatctggttccaaaaatagaaagatgcatgcatcgaatgttttttttgtttctttcttttttcacttattaaatggagtatttagattctatctaacttatataaaattttctacgtttttggatttttttttccaatgttttttaaataatctatactccattagctatgaataacatcagttcatttgattctgtgaaggaacatcattattcgggcgtgctctttgggattgacatcctacaagattccggtctaagcgaaccccttcgataatatcgactttttattgcatagaacaattaataaaaattgaccattataataagacattgatctcaataacttagggagcattattatgtgagacaaaaccatgtgaccttttttttttttggtaggcaccgggaggtaaacacctccctgaatttatttatgaaattaaaattacatccgcactagtcttggaaccgaaattcctaactcatcatccctcaaaatcgagtctaaactattcgggggagaagcaaaagcatgataccctaaaggtaaatcgaacgcatagttagccaacccgtccgcaagacggttggcctccctatacacgtgcccaatccggactatccagtcccttgataagaagccatggcacatacgtaccaagaatgacagcgggtgggaagaaccaattcctgtccttaaaaacccaaccaccatctcggagtctacctcaagttccagccgcgtaatcccacgatcccacgccatgaacaacccgtaatacactccccataactccgctaaaggcgccaagcaacgaccaatattcagcgcaaaaccaaaacaccactcaccatactcgtttctcaacgctccccccgctgtggctaaacccggattgccatgagaagcaccatccgtgttgagtttacaccatcccaagctaggcttactccaccggacttgtctttccatccgactcctggaattgttactaccgctgccacaattatttgcctttgccacctcctgtgcgatgtctttcacaagcttcacacggtccctacactttctattctctccaaacacattcccgcatctccatttccagccccaccaacaagctatagcaaaagtagttgcccacgagataccattccatacaaaaccatcttgaagattctcaaagagccactccaataacggtttcaagaaaaaatcccgacgtttctgcgcaagactaacaaattttatacattagtgaccttttatcattagtgtttttctttttaacaaaaaagacatcagtgtttagggcgtacgtttacgccacaaatgataaaacccaaaatctcttcagggtttttttatagtaaagtttattaatcatcagtactacttacataaattaagtcacgggttatagaaaaacgttagtttgatattagcaagactaacaaatttatttaatgtatatgacaaataatcaaggactcaacaatgcaagtcatttgtttgatcatataatttggcgcatgatatcatggatataatcgtataaatcattttcataatgtactacgtacagtatccctaaataaatattctctgatgggccttattgctaaacaattgggcttagaaaaagcgtataaaagtaacgattttatcttaattcatgcttcagcttcacttgccccgctttatcagaacgaaaccctcatagagcaaatctgaggtaaattggttctctctgttcctcctgtacgacttttctccattggtaacgttttcttcttttcttcgaatcataatcttgtgttgtgtagcgtttccgtgttcctgaagcaaatttcgttgattgtttagattttcattaaaccattaattcgattaacctagaaaattgttgaaattgcttagaagagtttctaattttgtgaaattgatggtgttttataggttttggtttggacaaaaagaatg

SEQ ID NO: 5656 - DNA, 3000 bp, Unknown
  misc_feature (1)..( 3000): cDNA_ID_2170990_gDNA_ID_1620808_Annot_ID_168936 3000 nt of promoter + ATG
gctgcacaagctctgtcttgggcaatatcagaacataacatcagtaaaccttggctaaaacgctcagttgacgctagaatccgagatgcccaaagagaagtagacgatataccagagagcattgcggagctagagaaatacgcagaagacacagtttccactcttctgtacaatacactccaagcaggcggaattagttcaacaacagctgatcatgcagcttcacacattggtaaagccagtggtcttgtcttgctgcttaaatcattaccgtaccactgtaccagaaaccgtcaccagagttacatccctgcagatctcgctgagaagcacgggttgctcgtgaaacaaggtggacgattagaaattcttctggataacgattcaagagaaggactaagcaatgtcgtgtttgagattgcatctgttgccaatgcacatctcctgaaagcccgtgaactggcgggaaaggttcctgcagaagctaaaccggtactgcttcattctgtgccggtacaagttcttctggattcgttaaataaagtacaattcgatgtgtttgatcccaggattcaaagaggagttcttggtgttcctccactcttgtttcagtttaaactcaagtggtattcatggagagcaatgttttgaaaacttgtctttatctcccttttcttgcctcttttatttctggtttcaaagactttacattaaactccagcttacttgtatttcttttgtaataatacaaaattacaaatggtgatgaatacaaaataaagaatttgttttttacttacaaataatatacagttttcatatgttataatggaagaagcccatcttcttgcatttttctgtacaacaaatctgatttatcccattggcgtttcctacaaaagcctgagatcatcgtagtgtaggacacaacatcaggcttaagtcctttgcaagaaaggctacgaaacaagtcccacgcatcttcaacattaccaatcttgcacatcccgtgaatgacgatattataagtagtaatatcaagttctatttcactcttttgcatattctcgaataacaccaatgctttctctaccctccagttcatacaaagcccatacaacaaaatgctgtacgtcctaatattgggacgagaatccatccgactgaaaatttcttgcgccgcatctggtctacccgcttgaaaatagccctggattatagtgttgtatgtgatagtgtcaccaactaatcctctttgagccatctcgcggaagagtttcgttccttcatcaaccctcttagacttgcaaaacccgttaatgagagtattataagtcactacatcggggagacaacccttagttaccatcaaatcaagcatttgtttggcctcatctacccgaccgtgcatacaaagaccgttgatcaacgaattgtaagtgaaaacatccggatctacacaccttcgtgtcatctcctcgtacaacttcatcgcctccgaaaacttcccttctttcacaaacacatcgatcaccgcagtgaaagtaatgacattaggaacaatatccctcattaccatatctctcattagccgagctgcatcactccatctaccagaacaacaaagaccggccacaagagagttataagtaacagcatcagctctaaccccatctctttccatccgatcaaacagctccaccgcgtcattcaccaacccgatcttacaagaaccgtcgatgatcgtgttgtagataacaacatctggtctaaatcccatttcctccattttactaaccaaatctatagcatcaaaaactctattcccttgacaaaatccattaatcaaagaactaaccgtgacaacatcaggctcgtaaccaaacttcatcatcttcccaacaacagataaagcaataacaaatcgagagcatcgacataaacaattaatcacaatgttgtaactataaagatcatgaccaattccacaaacttccatatggtgaaacagagagatcacaagatcgtaattcttcgatttggcgattttactcaatactttactgaaatcaactattgaaggaagaggacgagattgaatcattttacagaacaaatcaatttcttcttctaaattcatactcgatctcttagtagaaaaagttcttccccagaaacggctaatgaaaggaacaattacaggattacctttctggagaagacacagattgagaaatttatttgcttttgatgcaattgagatcgtggtcgatctccgcatttgaattattaacctcgttttattcgtaatctatgtatctgtaaatgggggctaaaaccctagcataaaccctcttatctcctccatgggagagagacgatgatgagagcgagatatgaagaccggttcaattccggtttactattttctaattaaactgggttaatagtctaatttcaaaattattttagagctctgggttaattaattagtgccgttgtaacggtgaaataatatcggttgtgggtccattaagtgtacacgtgttcggactataatttgcatgttctctgttgtgtcgcgaagcagaccaattcgttgattttatgagatcagcagagtaatattccaaaatattcaatcgtcgacatcacaaccattttaattcgtattttttatatttatttaatgtaatataacttagttttagaggaaacatatcaaaattaaataattaacacgttaaaattacatcggtataatatgtataggagtttataaaattaaatttatcataaaagcatatgctaactttaattaagtgctttctttttaataatcaggtggcattaaatataattagacaattgatttgtttgattatattttggtgacaaataaattattaacaccattgtctaaccatcctttgcttttatagttctctttattctctcaaaaagcctctctttctctctcttttgtttctcgctgccatg

SEQ ID NO: 5657 - DNA, 3000 bp, Unknown
  misc_feature (1)..( 3000): cDNA_ID_2171006_gDNA_ID_1620808_Annot_ID_168940 3000 nt of promoter + ATG
actaaattcttcaaaggtcaagcctctcttacggtatttatggagttcatatagataactaattattacaactaataaatacaataattaataaataaagtaaaaatagttttatcacctcaatttgctttcttagattactaataaacgtgtatgcctaaattaatcaatatctaacattttcttagatcttaataaaactttaagtatttcataacattctacttaaattattttcatatcgacccattgtatggaagaaaagttccattgctaaaatttcacgcaattattaatgtatgaaaaatacttatatgtgaaaaatacttaacttaataaattcaatttaacaacttcatatacaataattatttatattcattttcataaattatttataatcaattaacgatttcttccatactttagaaatatgggaatccatactcttcggccttaaagatatatatatttggtcgtttatgagtaaaatatgttttttgaagcatatgtgacaaatccagaatacgttaaacattggagccggatgtaattggtaagctttcccaccaaaaaacctcagcttcaatcaagtaaaagttattagatatgattgagttattaatagactcaaccaattttcttttcacaagtttccttttacgtataatttattattatattatatcacatgttctatatatacacacactatatatacatacatgcacatgcccattagtttcacctaggccattcctcttttaaagcaatcgacgacccaaaaaagaaagcacgatacaaaaatgaacatcttatctcaaacccaaatccttcatctctctatagctattcttctcttcatcacaacatcatcatcatcattatcaccatcatcatcatcaccatcattatcaccatcaccaccatcatcatcaccatcatcggcaccaccatcatcattatcaccatcatcaccaccaccactatcattatcaccatcatcaccaccaccaccgccaccatcatcatcacctctatcatcattatcaccatcattatcaccatcaccaccatcatcatcaccatcatcggcaccaccatcatcattatcaccatcatcaccaccaccactatcattatcaccatcatcaccaccaccaccgccaccatcatcatcacctctatcatcattatcaccatcatcatcttcatcaacatactcaaatcaaaccaacttagattacatcaaaacatcatgtaacattacactctacaaaaccatttgctacaactctctatctccttacgcctcaacaatccgttccaaccctcaaaaactcgctgtcatcgccctcaatctcaccctctcatccgccaaatctgcctccaaattcgtcaaaaacatatctcacggaggtggtctaacacgtttggaagtagttgcggttgctgattgcgttgaagagattggagactcggtgacttcgcttcaagattcgataagggaattggattctatcaactataaagatagtgcaaagtttgagatggttatgtcggatgttgaaacatgggttagtgctgctctcacgaatgatgacacatgtatggatggtttcagtctagttaaaacggccgtgaaagatttggttcgacgacatgttgttgaggtagctcggcttactagcaacgcgcttgctctcattaatatgtacgcctctacgcaagaaaacttttcttaattaaatgttttcatacagaaaaaaattgttttatacttatactagaaaattaaaaagcttatgattggatgtatgtatacatgtatgtcacaccttgtacttgtcatataggtaggtattgttgatttttctgtataaatcgtatgtgaatattttgtatattattgaaagatggtgaaaaagttgcaacaccttgttgccttgttggactctttctaaggcccacaaatatctgcttggtaagattcattagtaatacaattagagaatcataatcatagacattgtctattttggtaattaagcaaaacctagttatacttgtacctttgtctttttttattttatttttcaatgttccttccgtctgttgtgaactagtctgtatgtgtttttgttttgttttttataacattagtttgagctatattaattagatttgagaacttataaatatggttatgagagagtaattggtctatacaagtaggacggaatcataaatgaaacacgagctatattgagaaatgagaatgtcttagacgtgccagcttttcgactactcagttgttatcgccaaatcaagtttgccatacttgtgaattcttcctttaacctaagtttgataatgagctagtgttgtgaggaataaagctgtactgttgttatatatacaccattaactaaaatacgcaatccatataaaaaaaaaacgcaatccaaaaatcgaacaatatttgaatatatgacttaaatggattgtcttttaatttggaattttaatccaaccaaaaccacaaaatataaaataaaagaaaactaaaatttctctgaaacgaaaaataaatttgaatcgaaattgttaatatattcactttacctttagatactaattatttgcccttatttctaaaccaaaaatcttaaaagaaaaaaaaaaaaattaatccaaaatccggattaaacacatagacggtgacgtgtctccttatccatttggaccaataaaaacttcagacaatttatagaccatataaattttaaaaccgacgagagaaataaaaaaacaatttttaaaccaacggttcagaaacaaaccacgccaagcccaaaaggcttcgttatccccaagccatacgagagattacgagtaagtgatacgttagccaaagagtgtcaccaattgattcaatatcccaagaggaagaagaagaagcaagagaagaagaagatagaagcgatttttataaaaatg

SEQ ID NO: 5658 - DNA, 3000 bp, Unknown
  misc_feature (1)..( 3000): cDNA_ID_2171020_gDNA_ID_1620808_Annot_ID_168944 3000 nt of promoter + ATG
ttcatgaaaaatcttagcttcaaaatgaaaattatgtatttgcaggaggataagcatggcaagtctaagttcgaagacagtgcctcaactcgctgatgctatacatgctgttgttactcgcatcgcctaattaaatttgcgattctgttcttttgttgtttaatttatgaacacaattagagaataaaactgcgttcttggtttacatttaataagatagcacaaagaagcaatattatggatgatattgtttctagttggtagtcaaacctaccaaaatgaggattgggacctttaaaccaacacagttttttatattttgttttcattttcaatttatataataaagattacatcaattaacaacacagatccacactcaaatcagatatgcaaatgatagagtccgattataaccggtaaatatactaacatgggactcaataatgaatcaatgataatacataacatgtgaacaaaaaatactttttgtttttctttaaatattaaataagttaagccaaaagcaaacaaatctcgagaatttattgagctaataataataaaaccgggtaaaggaattcagaagaagatggatgagatcaaagacaagatcacggtggtgactccataaccggcgagcttgttcccagctccggcgtcttttttggtattccctgctgaatatttagaaacccatccatataatataagacaaatcgtcaatcagcaaataacaaataaaaaatttataaaaaaataaaaaatctgacaagtttcattttttagtggttttgtccgaattattcaagtcaatactcgagacaaaataaagtacacaagtaaaagctggcattcacactctgtttatgttttttatatagaaaacaaaaaaagagagaaaaatctgggaaaattataagatcgatttagagtatcaattgaataattgccttgattaacaccatttgatttggttaattaactctactaatcaaatcaatcgaataattcaattaatacacaatcaagtcgatcaatatttcatttttttttttttttgataacaaagtattcaaggaaataattgtaaggagtaggtgaagagtttggttcatacctggagctggaggaggtaaagaagcttttggcgatggagctcctttagctaaacaaaaaacaaaaacatgattaatactgatatatgaaattgcaaatctctgtttcataatctcaacaagatctaaaaaatgttagcagtagacaaaaaactatgctaattttcttagtcacattcacattaatcagaatccacaaatccattcataatgcatgttgttgacaaaaaaattaaaaaatcggagatcggagaaaatgaaattggttaccggtacaagcggagagatcagtggtgacgttgcaacgacggctaagaccgagagctttctcagtggtgacgttgaactgagcgagcaaacctggactggtgtagattgtacagagacatgtaagttccttctccaccgcttctttaatcgagtcgcaacattctttcaccggcgttgttgtcgtgttcaggtcgttgaagcaagggactagcttgctcacgcactcagtttgtgcttcaatagtcggaaccaaaagcaaagccatcaccgtcatcgccgccgcaaagatcatcatcgtcttcgtcattttttttcttttcctctctctttgctttttttcttttggggttacttgtgatttttggttttgcttttgtttttggctataaatatttataaacttgcttaaggaacctttcgtattttactctttcttttttttcttgttaatactccattagtttaatagtatgtatcttttcttttaatgttaaaataaacgctaaggggacggtaactttccgtctaacacttataacaattagttgaggccgtctaacgcctataactattcgttaagatctaaacgattttagaataaaacaatatgtacttatatattatataaaaagttgaaaaacattatcaaaaagcctaaaattatcaaattttttgaaaataaatttaaatttaacattttaaaggaagataaaataaaataataaaaagtatagttttttttaacacaattatatatatttttaaaaagattcaaattttttatcaaatattataacacatttaaatctacacaatccatctaatagtcgtttaattcgcttaatgaccgcataatccaccaaaaatatttcatcgtctataaataccgaaatggtctaatagcgtttagtgccgctttcttaaagacttctttttcatgataagtttttatttctcagatacttcaactagaagattgaatattttttaggtaatttaataaattttattgaaaatgatgtttatattaattgccatttgacgtaaatctctagattctaggatgagttaatcacgttttgttttcttgccaacttttgttctttgtacacttcaatttgtagctgtcaaaaataaaaattatagcctatgctaatatagtaataaaacatctaccaaatttccataaattttgttgaattttcttgtggtaggactaggtcaacctgaaatactttgatcttcaagtaatttgcaagactaaatcatttcataaattttggatccaaaccagcattaaaccatatggataaccagcgcgataagaatagttctataattgggctatagaaaggccttacaaggttttgattaattgggcctctgcacatgtttaaaaggacctccttatattgccacgtgacaaacatgtgatcgtcagatcaaaacgtttaaacggttacgatctgatcaaacgtctctcagcacttgtaaattcaacggtcacgaatagtcccgccattaaaacagataactagataagagaagtttagagataacgtagctaaccaaaaaagcagagctcacacttagaaaacaaaaaacaaaaatg

SEQ ID NO: 5659 - DNA, 3000 bp, Unknown
  misc_feature (1)..( 3000): cDNA_ID_2171025_gDNA_ID_1620808_Annot_ID_168947 3000 nt of promoter + ATG
gagttgagaaatgaatacttgcgtgagaagttaggacttgttcctgtcgaaaggaagagtctttctcaagaaggggaatcgatgatctcttcactcaaagctgcaagactgaatcgacagatctttgattagtagtaaaatagatttagattaaaattgtattcagctgcgtctacgttgtaaattgttgttctaatcttttttgtacttaacgcaaaacattttggaaaacaaagctttgttacttatttgacgtgaagtgaagtttacttttcttattaaaattgaatgattaatcttcacatgggcttaggaagcccatataattggaccattgatcttaagcaaaaacgacgacgtattattgtttctctgattctctctttctctaaattatcaaaaaaacgctacacagtcgtcgtcaagaacaaagacgattcgattgaattctccataagaggtccgacccgaattcgaaaacccgtaagaaccgaatcgaagatgagcaaggatggtttgagcaacgaccaagtctcatcaatgaaggaagcattcatgctattcgacacagacggcgacggcaaaatcgcaccgtcggagctcggaatcttaatgcggtcactcggcggcaatccaacagaatcacaactcaaatcaatcataacgacggagaatctctcgtctccgttcgatttcaatcgattcctagatctaatggcgaaacatctgaaaacagagccgttcgatcgccagcttcgtgatgcgttcaaagtgcttgacaaggaaggtactggattcgttgctgtggcagatctgagacatatacttacgagtatcggtgagaaattgcagccgagtgagtttgatgagtggatcaaagaggttgatgttggatctgatggtaagatccggtatgaggattttattgctagaatggttgctaagtaagatctaaatctgtgaaaatttgaattctttagattagaacaaatcttaggatttgttcagaaagtgtttaattgttaatgtaattgggaatttggtcataattaagctgtgttatttgaaaagatggttcctttatgatattgaattctgcaaatgttgtatatgttcgtttggtgcttgaacttggttctttatgttctgcatcaaatcgttgctcctttgaggttggtttcgagttttcgttcacgatattagcgttttgttggtttcttagtttggtggaacttagtatgatagttttgttggttaggaacttggaatctttggaatggtataagtgatcttgtgtttgatcgtgagctttgtttgttcaaatatctttggaatgaatggtctagttatgtgtgttgggtgttcgggaaaagattatttattctgatgtgcagatcaatgaaacacagtaagtgtttatttctttttcttctgtgttgttcttcttattggcactgctaaggaacaagtgtcttgattctctggacattatgttgcaatgacttttggttagagttcttgttgtggttgttttgtggttcgtgtctagctcgcttgggtttgtttagaaggtgaacttccgataggaataaggagggggtttctttttcatgtgtactgtcgtctaacaagtttaaattaaatgatgcgttttatcaactgtgttgatcacttaatagcgtaagggtttatttgcgcgattcagtacaactggttattttgaaattgcaaatatcatacttttttttttggtaggccacagggagaagaatgtctccctgcattttattaatgaactataaaaataaatcaaattcggacatgcctcggaaaacctgttttatcgcacatgccaatgttatgcttttgcttgttttctaattaaggctccttttggaaaacctgtctgaatccgctatagtgaaaccactgagggagagaatcttattaaattaagatcgtgtaaggaaagtaggatctcgaggtctatcgtacgaaaagacaaaagcaataatggaacttattagtgagcgagagagaggacatggacacgtagtgtcgtattaagagaagataagaccaagtggctgagagattataaaaagacaagagggtcaaattttcactttggttgatagagtcaatcacgccatgagtagcatagtgcggtggcttctgggtagtctactttagctgagctttctaggtgtagcatctaacagccacttctttttctttctttgatgatgataatacaagtttgagtttagatagtgtgcatcactaaattggaggcgagaaccaaatattgtatcgtttaggaatttaggaggaagaaatcttttagcatcataaatctccacgtttaagtttcaactttcaagtaagaactacattaaacttataaatactatagtagctaattagtctttaaatactgttttaattgaatggataacctctatgaccatctaagttgtcactccatcaaaaaatcaaaaaccaatcagaaatatatttagagatgcgatcaaacacactctaattaaaaaaaaaaaaaaaaatttggtaaactctagatgcgatcgtaacttgactaaactctagacatcatgaataaccttggccaatatttaattacgttgacaaactagcttagggtagtttcgttgtgaagttctgatcccaacaaaaagctaaagggatcttatatagtcgagccaaatttaaacttttttttcttttaaataacctacattagtttattgcgtttgtaatgacatgaacatgttataaaacaaataacctaaaccaattgcatggttagaataaattagtaaaatatctcatagatgcgatcaagcgtacaggactttgaaaagcgttaattattgtttatttcttatttaacatgttgtttaactggactaagtaattatttatctcagcttttataagtaactttccaaaagatagtcaaaaactctcactcaatcgatg

SEQ ID NO: 5660 - DNA, 3000 bp, Unknown
  misc_feature (1)..( 3000): cDNA_ID_2171022_gDNA_ID_1620808_Annot_ID_168946 3000 nt of promoter + ATG
ggttaagtgggctaattgggttttccatgttaaagctgaccaacgagccggtatgatcatatctcaggccacggttcgtgactccgagacaggtatctaacaccataattcaaatatttacatttacaaaaaaaaaaaagtgtctaaatctatgttgatcatttgtcatgaaaagtattttaggttaaatggttcatttaatattatttaatgatgaaatttgactacaacattctttttcgaataacgtacgtctcacgcatgctgtttatttatgtggagtaagcaggtgaaccaagaagtgtgatgtacaaaggattcccatcagagttgtttgtaccgtacatggaccctgaggaaggatggtactacaaaggttatatggatgcaggcgagctcggtttaggacccacggcaatgccgctcgtgcctctcaacgattgccctcgaaattcttactatatagacggtgttttcgcctctccagacggcaaacccattgttcaacctaatatgatatgcttgtttgaacgctatgcaggcgatatcagctggcgacattctgagatcctttttgccaatgccgatgtatgtcctttgtttttttatttactaattaagttttatgaactaagggtattagatctttttaaggtatagttcggatttttaagaaagctatttcgtcgttttcttgccggagttcgctagccgttcaatccaagctaccaaatcggatatagtacgtataggtttaatatgattgagtttacggtttaggctttgtttttagtataagataactttttcttaaaaaacatgttttagttcaatttgtttccctttctaaccaatctaaatagacaaaaagtataactataataagcatataagggttaatttggttttcggtccctattttctggtttgattcggactggtttttatttgctttttggtttgaatgataattgattcataaattgacgacttaacagataagagagtcaaggccaaaagttacattggtagctcgaatggcaacttcggttggaaattacgactatattttcgattgggagtttcagactgatggtttgatccgtgttacggtatgtgaacacatttttttctgtatatgaatataatttgtttttttatcaagtttcctaagtttaaagctattgttaggtcgcggcttcgggaatgttaatggtgaaagggacaccttacgataatgtagatgacttaggtgatagggaggatgatgctggaccgttgatctctgagaatgtgattggagtcgttcatgatcatttcataacgtttcatctagacatggatattgatggaccgatgaataattctttggttaaggttcatctagagaagcagagagttccaacaggaaaatcgccaaggaagagttacttgaaggtcaagaaatatatagccaagactgagaaagatgctcagatcaagttgagcctctatgacccatatgaattccacattgtgaacccgaaccgaaaatctcgggtaggaaacccggctggttacaggatcgtaccgggtggtaatgcagcgagtttgcttgatcacgatgatcctcctcaaattcgaggtgcattcactaataatcaggtatttaattttaggctatgtttttatatataagattctgattagctataatctcggtttaggacttaatgtgtccaaatgttcatttaactgatgcaattggttttatcggtttagatatgggtgactccatataaccggtcagaacaatatgccggaggagttctaatttaccagagccaaggtgatgacacactacaagtttggtcagaccggtacgaaactaatttatgaactataccaattgagacataccgtttatggtttgaaacatttctctgatatctttgttttgtggtgaaacagggaccgttcgatcgaaaacaaggacatagtactgtggtacacactagggttccatcacgtaccttgtcaagaagattatccagttatgccaaccgttgcggctagctttgaacttaaaccagcaaatttctttgaatccaatccgattcttgggtctgctcctttcttcgaaaaagacttaccggtctgtagaccatttgcttcatcttgaccggttctgttctgactaatactctaatagtatacaagtagagaagatcaaatatccggtgtagccaaacacttgttgaagtttatttgccggtttttgcaataataacaaaacgtccaatatctgtaatccccgacgtaacataataccaaaaatcttcagtttcttcagagagaagttgttcgtgttcgagttattgtagagccagcatacgggctgttgctttgttgagtttgcttctcttaacgaagcagagaaggcgttggaaacgaagaagggtgaaactttttacagtcgtaagattattcttgacgtggctgagatggctccagaccctttccgactcaagtacaaccttgtaaagaagctttgttaccaagactttcaacaagaaagaccggaaagacagcagataaaatccctgttctgcggtaagaagactatcatctcttctgacgactgatagaagctcctttggtgttttttagttgtgatatctattccagttacgaagaccttcaatgcaagtatgcaactgtgctttgttacttcgttttttcttttcttcttgttaagtttttgtcttaattaaattaaaatatgcttaatttttagttatttacctaaataattaaaatatgcgaattgaactgatttggtaaataaataattaaaatcacaatcaatacatagtatgattcatgtggacatgtggttggacaggttggtgaacctaattatgctttaatttctcaacactttgttcaataattggttttttttttttttaatgaattttggggtcaaattcatttcaactgattcaatcaattctcatg

SEQ ID NO: 5661 - DNA, 3000 bp, Unknown
  misc_feature (1)..( 3000): cDNA_ID_3077987_gDNA_ID_1620808_Annot_ID_168943 3000 nt of promoter + ATG
gtgacactttacccataaacacaaaaacattttatgatgatttcatgagatgatcttgagacattttgttgattcttcttttgatacagttgttggatatggtggagaaaaaccaaatcaacagatctttgttggcacttctcgacgaaaacatagccaatgcatacaaaggaaaccaggttagacccggttaataattgagttgacaaaagaaatttgttctggttcgaagttcggttaggtttgattcgggttctgtttttgattaacatatgtatttcggttcttgctcgaacccatttttccaaaacgtgaaactcaagtaacccgaatcaaaccggaaaatcgaatgccaaaccgtaaaattgactatatgataaagcttttaatcatcgtatgaaattcatatgtatttgttgcagaaagaagcaggagattacatggagaagatacgctcttcagttcttaagtatttgacagtgtaggatcatatgagtcttcgaaagatttctcaagcttttgaatgttttctattatcggggaaaattgtatttatatttttgtttgttgagtaaaatgtattttctttttttccgaacgatgtttatatttttagggtcatttcagatcttcaagtaataaaaagaatttaatgaaataatagcgatgacaaaatatgaaatttcgtatgaccgtataatgcaataaaacaatgaaataaaggaccaaaattgatgatatgtcaagtgttttattttccaactagtatctcgaaaaatctacgtttgtaagcttttcttcattcattgcatgtctgtttagtatggaacaaagttcgctgtaacaatcaaatctcttttcttcgtaataaatgaaaccttttgttttagaaaacaaaatacatgaataagtatgggaagtgggaacctacaaaaggaacaataactaagaaaaaaaattatcaaaaaaaaaaaaattatatagaaagagaggtgacatttatgaaattgataactattggttccaagttccaagcaccactgttacataattatccttattattatcttcacatgcatatgtttgtttggttatatacgtaagagtaaattaagactagtataaataattaaagactatagtaaaatcaaaatgactcgataaatgaagaaagagaacatgcccacttgttcttgtattgtgttagctaccgacgtacgggttttggaatttggacaagattctttttactttctatcggcgtttacgagtagattcatgtgagttttttttcagtcaaccatgtaattattcttataaccgtagattcatatgaaacttatatggatgagttttcacgtgttcactaacgttacgtactacacatatttgtgttggcgtatatttcttcattccattttattttaagaaattttttcataggttttagaaatcaggaaattttcatatgttttagaaattttattttgggttttactttatttattttttaaatatttgttctggttaaggaactgtcatttctgatgagtttttctgttcatatgaaaagtgagagtaactacgtattctgttcatgttgaccaaagacaaattaaaattaagtaaatatctattcaacttccctgattactcggatgaatgctcatccgtgaactgaaaattaaatagtaaccaaagaaaacgcatgagagaccattgtcgtttgtatccattatgatctggataagcatctcaaataaacacaataatgcattgggaaaaaagtaactaattaaatactacaaaaattgcaatttcaattttaaaaaaactttaaactattgccagtgtaacttatggcatgtggatatgtgttgctcgtctgatcgatgactcatcttgaaacttaatctgcacattaacacatgtaaatagtactttttaaaaaggatcagaatgtagagttagatttggtcagtgggattttaaccaaagtgattgagatattttatttagttgtattttaatgatttagcacataaattaagtttatatatatatatgtttcattatctatttaaaatcaatttcaaccaatggaaaatcaaattacagaatttcaagaatcacaataataaaatagtaataattttacataaaaaaattaaaacaacaataaagtgaaacaatttttttttgtttaaacaacacttattaagaaacaaaagaagtatatacaaaaaatattacctctgctttattttacgtgatgtttaaaatttttgatacgcatattaaaaatcaccaaaatttcagtaatttatcttttttacataaaaatattaataactacaactaatttaataaataaaaatatatactgtaaaatgttattgaccaacaattattaattataattaattttacatagaaaattgaaactaccatttaaaatgaaacagaatgtttttaaaacatcatttaaaattatactgagaaaatatatgcaaaacaaaataaaaaaaaacttttatattagggatatggcctaacttagcccgaaagctatctcaagagttaaagattgtcacatcctttatatattacccaaagatcttaatcctaaccaatatagaacattttaataggcttttccgagatgcgtgtgagaaacggtccaagcctagaaatacaacaagacctatcacttgtgtggccatataggtaaaaaaccatttttgtaggaatttgtttgttggaccaaccataagctctgataccatattagaaacgtagtctaacttagcccaaaatctagcttaagagttaagaattgttacatttttatatattgtgcaaagatctaaatccaaatcgatataggatattttaataatttattttgacctaaatcaaaccctatataaacagcatccactgatacaccttctcttcattttagaaaaaataaacaaacaaacaaaccaaaacaccatg

SEQ ID NO: 5662 - DNA, 3000 bp, Unknown
  misc_feature (1)..( 3000): cDNA_ID_2171002_gDNA_ID_1620808_Annot_ID_168939 3000 nt of promoter + ATG
agggaatagagtttttgatgctatagatttggttagtaaaatggaggaaatgggatttagaccagatgttgttatctacaacacgatcatcgacggttcttgtaagatcgggttggtgaatgacgcggtggagctgtttgatcggatggaaagagatggggttagagctgatgctgttacttataactctcttgtggccggtctttgttgttctggtagatggagtgatgcagctcggctaatgagagatatggtaatgagggatattgttcctaatgtcattactttcactgcggtgatcgatgtgtttgtgaaagaagggaagttttcggaggcgatgaagttgtacgaggagatgacacgaaggtgtgtagatccggatgttttcacttacaattcgttgatcaacggtctttgtatgcacggtcgggtagatgaggccaaacaaatgcttgatttgatggtaactaagggttgtctccccgatgtagtgacttataatactctcattaacgggttttgcaagtctaagagggttgatgaaggaacgaaactcttccgcgagatggctcaaagaggattagttggtgacactatcacatacaacactataatccagggctattttcaagcgggtagaccagatgcggcgcaagaaattttcagtcggatggattctcgtcccaatattaggacgtacagcattttgttgtatgggctttgtatgaactggagggtagagaaagcattggtgttattcgagaatatgcaaaagagtgaaatagaacttgatattactacttataatatcgtcattcacgggatgtgcaagattggtaatgttgaagatgcgtgggacttgtttcgtagcctttcttgcaaaggacttaagcctgatgttgtgtcctacactacgatgatctcaggcttttgtaggaaacgccaatgggataaatcagatttgttgtacagaaaaatgcaagaagatgggcttcttccattataacatatgaaaactgtatattatttgtaagtaaaaaacaaattctttattttgtattcatcaccatttgtaattttgtattattacaaaagaaatacaagtaagctggagtttaatgtaaagtctttgaaaccagaaataaaagaggcaagaaaagggagataaagacaagttttcaaaacattgctctccatgaataccacttgagtttaaactgaaacaagagtggaggaacaccaagaactcctctttgaatcctgggatcaaacacatcgaattgtactttatttaacgaatccagaagaacttgtaccggcacagaatgaagcagtaccggtttagcttctgcaggaacctttcccgccagttcacgggctttcaggagatgtgcattggcaacagatgcaatctcaaacacgacattgcttagtccttctcttgaatcgttatccagaagaatttctaatcgtccaccttgtttcacgagcaacccgtgcttctcagcgagatctgcagggatgtaactctggtgacggtttctggtacagtggtacggtaatgatttaagcagcaagacaagaccactggctttaccaatgtgtgaagctgcatgatcagctgttgttgaactaattccgcctgcttggagtgtattgtacagaagagtggaaactgtgtcttctgcgtatttctctagctccgcaatgctctctggtatatcgtctacttctctttgggcatctcggattctagcgtcaactgagcgttttagccaaggtttactgatgttatgttctgatattgcccaagacagagcttgtgcagctggatggtttatgggctttttggtgtagagtttgtcaattgcttcttgccaccaaagtaaccgcatcaagccgattttgggatcagatgcaacatccatggctcttgcggtttctacattaaaagcccggagagcaaatgctgctttacgcatctcagttgggagttcaaggagacagaggtagtgatgatagtcatagtttcgtacttgctgcacacaataggacaatgctgaacgcaaactactcgagcctcctccattcatcagtataactccaactgtgtttctttctcttatcctacaaccatataaaccacaaacaagatcagttcataaaaacaatgaaaaactctggtttcttctatcactccattataaaacagtaacacagaattcatctacaaacacaagagaaaatcctccaattatcaccacttcaaataaatatactgaataattctcactaatccagaggttttgtgaaccgttaaactcattcaggaattaacacaaacacttggtggacaaagcactggaattggtatttaacaaacaaaatgagaacttttcaacattgcttaacacacaatcataaacccaataatcacacatggataacaaatgagatcactaaagttcacagaaactttccaattagtaatgtaaaatcgctggaaaccattaatgtcgtccaacaataacgaaacgagcaaaaaacaccttaccctaactcgaaaaactctgagattcaagtttcctatgtttaggaactgaatctaccatccaaaatccaaataaaatcaacctttcgacccgaaaatggaaatcgaactctgaacaatcgtgccggagaagaagcgttgggtcaatgtagagaaatacgtcgtcgattaatataaaaccactaatgttattacacgacgtcggttctgctacagtgtaacaggaagtcggttttgttataaaatgacacgacgacgtttttatgtaaagaactgtttaatgaataaacgtgattaggatagtattaacccgaaaccaaacactcttatatcgaacaaatatatatacactcgtatttattcgcctaaagccaaaaacccattagcccctcaaggtatcttccagaagcaacgagaagacctgcaagagaaaattttcagattcaact

SEQ ID NO: 5663 - DNA, 3000 bp, Unknown
  misc_feature (1)..( 3000): cDNA_ID_1829034_gDNA_ID_1620809_Annot_ID_50574 3000 nt of promoter + ATG
ttgaagaaaaatcttaggtttgctctcttctctctgatcttgatttctcttactttattttcttttccgtcacaattcccccgtgattttgataggttgtgattttgccggttagaaaaaattagttttctgatctccatctctttagtgatctcccgaggcattttatgagcctttcaaactccatcaacttagcacaccgcgatgatcttcctcctattcacaagcaaaaaatggtttggagtccatccgacgacaccgaggcgaacatctcgaggttagatagcgatgcagaatcctcgtcacatgtcccataggaactgagcagttttgtggctcggtaggataccctagcatacatggctcagtaattagattgcttgaggatgtcgagccgaagcctcttcagaaagaaaagtcgtcctctagtagtcgtcgaagcttgggcttctaactggaaggaagcgccctagcttttagctctctccgaggtgaagcttaaagatatttacttcgaaccggataagacgaagaagcttctgcaggctgcgcaagcgctttaaatggcaaaggctcaaaagaaacccaagccacctaatggacttgagggctcgtctcgacttcactgatggagtcacccttcgctgatggagtcacccttcgccttcctaccctaagccaaagagcaaacgatccccccgagggatttttaacattgtacgaggggttcttctacttctgcttcatgttgtttccgatcttgaggttgttcctcgagtacgtgacctcatacaagattgccctttctcagtttcctatgcgcgccctaaggcattgtatggggattattgtgcggagctatgaaacaaagacaaatgttatgctcgggcacctgaagaactacttagagattcactgaactccgagtccgattgataggtactacgcctcgcttgccaagaatgagccatatattgaccacttcttatttgtggcccccgacgactcttctcttcatgaggaccttctcgggaaaatcatgtcgagatggggaatacttggtagatggtttgtcaccgagcctcctactcttaatactaaccctattttatttattttctacagatcgtaccttcaagttccttgaatactgccttgccgacctcattcaagctcaaaaggaattatctgctcagaagtgcaattggcagaagcatttttgtcgagaaagggttaagagggctataaagttatcacatggcgtttcctgttcatccagctcagcatcctctgatcatcaatccagattctttgtcgagatgcagaagacaaagttgatgctttgggggttgaaatcccagaagaagaaaaaggaggccgaggcaaagcggcttcttgagacggatgttgggacgtagacagttgctcacgaggcgacaattaaattcaaaaagtcgcacctgaggcgacttctgtagagggaaacaaggttgtgaatcctccttccttggccactgaaccaagtcataccgaggcgaatgagaaacgtcaagtttctaaaactatcgcccttgaagcaggtgtgttgccgatcgtcacccccgaaggaacggatgcgtcgatggtgatggccttgccggttgatcgcaggccaaggcttccgggaagcgccaaaggagcaaagatcgtgaggcgaagaaaaaaaataaaaagaagaagagctaggaggaaggcctgccaatttacgaggataggatcgcctcggtgaattttatcgccttctgtacggggcatcttcttcccctacagagaatcttctagaggttgtgcgatacgacgaaacatcgtcatgttttctgaaggtaaaacatgttcttcttgttcctgaactgaattatactagggtgaatttctgttatgacatccctttgttttagttttcaataggctttttcctcaatgaacaaaatggtccgagcttacgactctgtgatttggagttgcttagatacataccagaagttggccaaggaaaagctggccgttgctaagcgcgtttaagtcgtggctagagcgaaggcaactgaggcgagtttgacaaaggagaaggccgaggaggacgtgatcgatcatacgattaaggcaggaaaggtagccgcgcacaaccttaaaaagaaaggataagtaggccgccgaccttgagcaccttaagcatatgctcagagaggagaaatcgttttgagaaaacaaagtagctcagacacgcaaggccacaaagcgggaagtctcggtgaagagaagtgatctatatgctaagtctgtgaaagactctcaaagaatcagaaggtttcaagtcgagctgaggagatcgcgcacgtggctcaatctcagtcgttcatctctaacggaagaatcttatctttctcggttttttcattttgtttaagttgctttgtaatttttgtttcgtatcatcatgattcagagtttttgaatcgagaggttagagagagagagagtagaacaattgtaaagagagagagctcagttttgagctaagaagtttagtggattccggagaaatctccgacgagacgtaggattccaaattagaatctgaactcgtaaaattctcttgtctccattctaagtttctcggtgtctagtatcaaacgagtgtgagagaaagtgagattgatcggtgttcttgaggatcaaaagctcacaaattggtagtagagccaggtagtgctaaggttttagatcgaatcaaagatgttgaacaataagctcaagatatctcagttcgacggatccggcggcttctctctttggaagacgcgaatgttctctcacccaagagtaatggggttaacagacgctttggtggaacaagctccattaccaccaatgaaagcagaagaagaatcagatccagccaagaagaaacaacggatcgaggaagaatgagcgaggatcgatatagatgagaaggcgatg

SEQ ID NO: 5664 - DNA, 3000 bp, Unknown; identical to SEQ ID NO: 5663
  misc_feature (1)..( 3000): cDNA_ID_2170541_gDNA_ID_1620809_Annot_ID_168964 3000 nt of promoter + ATG

SEQ ID NO: 5665 - DNA, 3000 bp, Unknown
  misc_feature (1)..( 3000): cDNA_ID_2170557_gDNA_ID_1620809_Annot_ID_168968 3000 nt of promoter + ATG
cacaaatcaatcttagaaaatatcatcgccccatgtaactcgtctagcaacagctcaattacaggaataggaaacttatcaggaattgttgctctgtttatagcacaataatccacacaaaacctccaagaagagtcttttttcttcaccaacaacatcggactagctagagaaaggactagtacttggcctgataattccagttactaacataacttctaccatcttctccaagaccacattagtagcatgtggataacgatatgaccggacaatgatagaagagacacccggcttcaatgaaatcgaatgctccagccctctaaacggaggtaattcaatatgtatgtcaaagatggtgggaaattctgacaacacaacctctaccactggtaacatctccattgtggccaaggaagatagacttagagacccttcagtcaaatcagactcatgaatctcaaccagcttgggaactgctagagattttaatgagacatttgacttatgtaaagatggatctccccacaaggtaacctgctgacctagataagtaagactccactcctgagttttccaatccacttctcatttacccaatgtttctaaccactcaactcccaacacaacatccacaacaccaagttccaaagacataaagttacctccaaattcaacaccaccgagccagaacagcacccctttacaaactccagaacaatgcactgaaactccattacccaacatcacctccaaattgttatcagcacacaacttcagcttagaacgatgtgctactgttggagtgatgaaattatgagacggcaccagaatccaacagcaccactactgtgctcctgccaatcattctcaataacttagtagttttgggagaatgacaccccaaaaaagaattatgagataaacatctcataacaggagaacaaggagcacactctacttcctccacctgaaaatcctcatccaaaacctccaattccagcccatccactactgttaaaatctgcaactcacgcaaaggacatacatgaccacgagtgtattttcctttacagttaaaacaaattcccttacttctcatcgcatcacgctcctctatagtatgcttttgacgaggttatgctcgttgaacctcctgacctggtgccccactagtaatcaaaaacggcttagtatacgacttgttatacgtacgagcagcaacaacattcttactccctcgttcactaaccatctgataataggcactagactccattctcaacaccgcaactttctgatttggtaatcctcgagactccttcatcttaataacttctttcatttctggttttaacccattgtagaaaatcttctccaagtgtgacacatccaaacccacaacttgagtagaaagatcctcaaactctgtcacataagatgaaactgatccttttggcgtattgcgaagaatgtgtttcccggatcatcctcaattgattccccaaaacgcagaaacagacgttggcgaaaatcctcccaagatcgaaactcatcgttaaccattttccaattaaaccacttcaaaacatcacctgtcaagctcaacgagaccaaattcaatttatcatcattatgataccttcccacacgaaaaaattctctccacaattgaaaaccatttgtaaggattagacccattaaaactggcatttcaatcttcttcaacaatccaacacaattatctaatggcaaaagattatccaaatacctttcatcctccataggagcacgacgtgaatggatcgacgacgaaccaacctttggtgactgatgaaagtcatgtggctgctccgacgctttaccagcacgaatctccgtacgttccaatgtagaaatcaccgatctgaccaacctgtccagattctccaatttctcttcatgttgagccttcgcttcacacaatcgttcgaaatttccctacaatccgagaatatcgtgctccatcacgttcttctccacatgatccgccacatacaactccgactcagcttcaacacccatcgcgacttagatcggaccagtttcaccgcaccaatgataagtttaagctactccgattgtaaaccaaaactttccgatgatcaataatatgatatctacaaattacaaaggttgtaactgcagaaatcacaagatacaatcattcttagctctcacacaaagacgattacaagagatcagcataaatctctctactggcacatcaccaggctaaaagtctcagcataaaaacatgaaatgcaacaataaagcctcaacagctatttaagcatctttgataacgacaaagtctctctctccgtcagagtcttcttccttctcttctttcttgaagtctctctttcggtctgagtctttgcccattcctgcgttgaccgccatgtcctcaatttctttaactccaatatgctgacgtgtcctgtcctctgcctcacataagcctgatgaatcgtatcaccaaaccaatactaaataattgatacaagtaccgaactgtaacgcccgtgaaccagaaaatgggttagggtttgtttttaaatcatccggtttaattggttgggttaattggaaaccctagagtgtgcctataaaagaaggaaactcgaaattagggctttatttagacacttttcgttttataaaagagaaaaagagagagaaggagaaggagtagaatcgttagggtttgggagaaatcagtttcgtcatatcaaatcgtggtcaaaggtaacgaaatttggtagagttattcccaagtcttttatcgttgttctccagtttttagaactggtttttgatttaaattggttgagttattcgaagtttcgtaagacacattttcgtaagacacgttttttcagacgcgaattaggaccaccggagattgacactgagatcgtggtctcgtctgttttccgatcggcacgagattttatg

SEQ ID NO: 5666 - DNA, 3000 bp, Unknown
  misc_feature (1)..( 3000): cDNA_ID_1829019_gDNA_ID_1620809_Annot_ID_168983 3000 nt of promoter + ATG
tgcattattgttggtatgatcgcatccgtaagtacatgcaatgcaatcgtatttatactttttggcgactttaggaaccattcgccgtggatcccacccgctatgtatggataacccatctagtctcaaacaggcttgatacatgaaaaaatgtgaaaacaacgtccaaacaaataattttggtcccgtaatgtagcacggaacgaaaaggcccaaaaaagtacctaaagatcaaaatttgtagtcgaaaaaaaaacaatggtattggcttgcttctttcgtcggagggctctcattgggctttccgaaaaactatcacatgccaagttttacattacggtttaaaagttatagagtcaaaaagttttaaccaaaaaaaaaaaaaaatagggatgcaacacgaggatttcccgggaggttacccattctagtactactctcgcccaagcgcgcttaactgcggagttctgatgggatccggtacattagtgctggtataatcgtatccgttaggacatgcaatgcaattgtatctatactttttagcgactttaggaaccatttgtcgtgggtcccacccgctacatagggataccccatcaggtcctaacgaggtttgatacatgaaaaaatgcgaaaataatgtttgaacaaataattttggtcccgtaatgtagcacagttcacgaaaaggccgaaaaagtacctaaaggtcaaaatttggaaccaaaaaaaaaaacaatagtagttaccattgtcttgcttctttcgtcggagggatctcattgggctttctgaaaagctattacatgctaagtttgggcgcatagtttaaaagttaaagttttaaccaaaaaaaagaaaagaaaaggatgcgacatgaggactttctgggaggtcacttatcctagtactactcacgcccaagcatgttaactgcggagttctgatgggatccggtgcattagtactggtataatggtatccgttaggacatgcaatgaaatcgtatttatatttttttggcgactctaggaaccattcgccgtgggtccaacccgctacgtaaggataccccgtctaggtttgcgaggcttgatacatgaattttttttgaaaacaacgtccaaacaaataattttggtcccgtaatgtagcacagatcccgaaaatgcccgaaaatgtacagaaaggtcaaaatctggagtaaaaaaaaataatagtacatatcattgtcttgcttctgtcgtcggagggctctcattgggattttcgaaaagctatcacatggcaagtttggcctcatgattttatagttatagagttaaaatgttttaaccaaaacaaaaatgagggatgcaacacgaggacttctcgggaggtcacctatcctagtactactctcgcccaagcacacttaactgcgaagttctgattggatctgatgtattagtactgatatgatcgcatctgtttgtacatgcaatgcaatcgtatttctacttttttagcgtctctagaaaccatgtgccgtggatcccaccctaatgtttggtcatttgatgtcttacaagccaaatgaagttatgaagtatcggctattgctttgggtttttgatgtttggaattgtcacatgtagaaattattaggctcattagtttttgaactctttaatgtttggttatttggtgttttgttggatacagaatttggttctgtcttaaacttctactttctcgtttagactagttcaaagacttttagatgttttttgctttgtccttaattcatttcattggttatacaacttctacttctttatatgagttcgggttttctatagtttcatattgattttgggtaattactttatgttttgggtacatatgagcaaaactgaacccaaactcgaaacatattttggaattcggataacacccatgcccgatctgaacccgatgataatttattcgaatccgatccgatgtctataaatatctgaacgatcctatacatgtacgccagaatacccgaaacaccttaaccgaatccgaatgagtacctgaatgcccatgactacctagaactatacaaaatcatcttgttgatcccaaaaatctgtttagaataacaacattaattttctcaatgtttcttcttagcttaaggagaaagaatatcattttttgacaacgaaaagtcgtagtatcagtgacttaaaactactccaaattcctaaccaattaattttgtttcggtggcattaataatgaattcattgatatttatattctgcgattattaataaatatctcatcggcggtctcaccacatttggttgattcaaaagtctccaaaccctttggaatcttcaagttgttcttcatcaattccacaaacccagaaacaatctttcttccacagagataacccactaatcaatttctctccttttccaattcactcaggtaaaggaacaatctttctatcataaactccattgttgatgaaaccctcgatgttggttgattcaattctgtgtaaattgcttttgaattgtgttatactttgagttttacaagtaaagcttgatcctttcgtagtgggtaatctcattctcgagctaaacgtgagacccttttgttccatggtgttctcgttttgtataaaactgtttaccccaatttccgatttctttaatactttaatttgattctctcttttggattttggtatataaagtgcagctaactttctgtacctaaggatttgactggttgttgcttcaagctttgattcgtctgtgtacagcatttgccaggagagccattagcatcactatggttgaataaatgtataagaatagtgaaattctttgagtgtgtatagatgttcttttgtggagtttgatccatatgtaggtggtttgttgctgcagctgattgtgtgggtttaggcagtgagagctgtttagttgaattcagtttttaaaggtgatg

SEQ ID NO: 5667 - DNA, 3000 bp, Unknown
  misc_feature (1)..( 3000): cDNA_ID_2170561_gDNA_ID_1620809_Annot_ID_168969 3000 nt of promoter + ATG
atgggcctctacaccgtccactaataaggtccctacacaaacctcatgtgctaataaccctaacattcatcacaaaacaatgatatctaaaacaacagaaataattcacaaagtctgagtgtcagaaatcataccagtgatcgctctgttgctcgtactgcctatctcacgcgtagtgtagccctgcggtgccgctccaatatgtgctaactgctgtacattttgctgcactccctgctgcacctgcgctccttgctgcaccgccggttgtactactgccacaaccatcagctgcagcttaggacaattcggcttgaggtgtcgtctctccctacagtggtagcattccctcgtctcagctcgcagctcgctgcgtgcaatccgctactttgtggtcaaggctcccacaagaaaaacatcccgcacgaccccctgtctagctttagaaggatgatcccacttcctcttctgcccctgcgcagggttgccgcccttgctaggtgccacctgccgctgagtcttcttcggttgtaccgctagactcactgccaccacttgcttctaaaggtcctcctctacctcagcagctgtctccaccagtgccgcttttgtggcgtactgtgacactctacaccgcaccctccagtccggtcgaagtcccctcaagaacctcctcatctgggcctggtcatcctccatgccccgacccgcatacaccaaaagtcggttaaactcccggtcatactcccgaaccgaccgctcaccctgtgtcagctcaagaaaacgcgcctccatacggtcgagcgcctcttgcggacagtacttggcattaaactcagccacgaaatctgcccaaaacatatccgcctgcctcctcttggcagtcacactccgccaccacaaatgtgcatccccctctagaaaatgcactgccagatccaccagatactccaccgagcatttgctcgaaccgaagttccgctcaacccgagacctccaactatcggcctcctcaggactagtaccaccagaaaaatatccggtgccaatcctctgcaactgctccatcatcctcaaataagatggaacctcctcagcaactgcagccctctgctgcacctccgccactcgtggcgcaactggagcctgcactggtaccacacctggtaaccgcttcaacaactgtctcagtaggcccgccaaaccaacctctagaacctgggctcctccggctgcggcagccaacactcctgggtcctcagcaccaacgacatgcacaccgataccgacaccagctccactagcccccactttggctgcaccagctatatcggcaccaagaccgtccccaaccccggctccacaaacctaggctgcgaacccagagtctgctcaactgtggcactgtgcccatcactctcgccggtaccctcgaggactcgtcctctatcgcgaccacgaccacgaactccagctactcaagaacaaaaggctaagaatatagaacaaacgaatatatcacaaacaacttaccatggaatctcatttaaggctcagagaagatgatgctaggactccaacaacacacaattgactaaacactccataatcaatcctcagtatgctaacatcctagctcatccaacatcaatcattaggaaaataaatcatcaattaatttttctacacatcttataactgtgatcgctctgataccaaattgaaacaacctgacccatttttttttaaaacataattaaatattcccataaatatctaattaaaccaaccaataaaacaacaattaaaccgcaagtcaaaaatattattttatgaataaataaataattcgaccaacaaaaccaaaaataactaacaatcctaaccgggttccaataaccaaaacacaaaaataaaacaaacgagttcctagatcatcctctcttctttgtcatgattccacgatcacactttatctttacctgcatcaacaatacaatgagatgcgtaagtattatcataaatacttagtgaggcgatcctcccatctacgagctatacacacaagcaaataaaagggtataaacacaaatacaacacaaacacaccagtcattgaacaattcaccaaaaaacacattcaccgtatctacatattatcacacaaaacaaatcatacaacccaatcgctcagataagctcatggtcatgcactcaccttaacaaattgattctaacaataaataaacccaggaaagactctccttgcgtctgaaacagtccagaaacgtcctacaacaagtcacaaccaaaagcaaccttgaagcaaacttgacatgaaaaatagaaacaaacaaccttaaatacaaaaccctaaaatacaaaccaaccgttaactatcaaatccctccggtgaaaagctaaccgtagacgtcacgaagcttcccataaaatctcgtgccgatcggaaaacagacgagaccacgatctcagtgtcaatctccggtggtcctaattcgcgtctgaaaaaacgtgtcttacgaaaatgtgtcttacgaaacttcgaataactcaaccaatttaaatcaaaaaccagttctaaaaactggagaacaacgataaaagacttgggaataactctaccaaatttcgttacctttgaccacgatttgatatgacgaaactgatttctcccaaaccctaacgattctactccttctccttctctctctttttctcttttataaaacgaaaagtgtctaaataaagccctaatttcgagtttccttcttttataggcacactctagggtttccaattaacccaaccaattaaaccggatgatttaaaaacaaaccctaacccattttctggttcacgggcgttacagttcggtacttgtatcaattatttagtattggtttggtgatacgattcatcaggcttatgtgaggcagaggacaggacacgtcagcatattggagttaaagaaattgaggac

SEQ ID NO: 5668 - DNA, 3000 bp, Unknown
  misc_feature (1)..( 3000): cDNA_ID_2170549_gDNA_ID_1620809_Annot_ID_168965 3000 nt of promoter + ATG
actcatgtgtttctctatattaataaaacactgattgtggaagtcaaaacttacacaatcgaaattatatttagggtacgtctgtgggatgatactttgcgagattttaaagaaaagtgattgcaaacaacagatagtgttcttgatattattgataaatagatgtgtttgattgtacaagtgattagattatgaaaagaaaagtgttttgccttcaaagtcagagctcttgagtcgtctgaagttgagggcgttatttgtgtgtctctcttttatgcgaagtccttgagtcgcttcatatagacttgataaatcgcctctcctgcaatattctcggaagatttgaatatatccttaagtcggttccagaacctttctgccttaaggaaatattccttattcttcagggacttcgggaagattttctgatttgatataatccttgaagattcttccatatcatttctgtgattctcgtaaatgatccggtttccctggaaattatcctttgagcgagacaatattttacaagtctttgccttgggtgttcttgatgttttccctcaggatacttcctctatgttcggtgatcgttcgagaggtggcttcggggtatccggcgtgttttggctcgggtgcggtgacgactgcatgtagcaaactatctcccaaggcgatgtaggctttccccgtagcgttctcataatcggcttgggttactgatatatccctattttcactgattttatctaagttttaagtataagattttgagtctttatgttgattctcgagtatttttagtgtcttttcaggtattctatgcagtgggacaacaatggaaatgaggatacattttgcagcaaaagctaaggaaaagggaagctaatgatgattttggactcaagaatcaagaggagtgtcgttcgacaccagtttcggcccaacaaagtccatgacgctttcaagtttacagaagagaaaatttgccccagaagacttccttatttgcattattagtccctggacgttttatagggtttatatacatttttttagaccctagtttcgattatcaatcttttttgcaaaaccctgttatagagagacataagctattcatccattgttttcagagattcattcagttttgaatacagtgaagagattctttctttctctcatccttattgatgtgtttatgttttcatactcaattatgttgtttgcttcaatcaatatgtctgagtaatctgcttgtcaggaatagggtttctcattagggattcatatggtttagtagattgcctcctctgctaggttatctgtagagttcttcatctttaattatgcttaatgctagatctagagaaattaactagatcttgaatccagacaatagatatgcccaccataggtatctgtagttggatctattatttgatgagccttgtttataggtgtgtaataagaatcagcctatctactaaggtgaacaatcgaactcgttaagaatgcatatttaggttaataatctttcggcttctcgggttattcttagctatagatatagggagtttcgcggaacaccaccggttattccattattagagtttgagtttaagaatggttcgataacaacctatctttcattagatctactaaccaatagtttccttagaataccctgatcctagctcttttcataatcgtttacaacacaatcaacttgctctctttttactttatttacttattatttcaatcatcacctgctagcttaatcttgacattgaactcattgtttgaacaaaagcattttgtgaattcgatccttaaatactgcaactgatctcttatttgagagagtagttcttaggataatttgaaccgtatcagttacgttgtgaagttagcacctacccattttgtgaacttaccccgaggcggttgaacagacaaaggacccaaggcgttttgacatggctcggggcaaacacatattttaccccgaggagactattagtcttcaactgtctggctcggtcttgcctgtgggggaattcgaccccaacaattagcccccagctcgttggtttaagagttaatgcgacgagcttcatggatggttcagccgagccaacaacttcttctttgaaactgattgatcgttgtctcctaacgcttcatcttccctgacggtcaaatttatgttgcgtgtgacgtttgtttcttgagaagaggaagcgtctcgcgtattctcgaattttcagcggatgtgacgcgtttcactgagctcacgcgcatttgatgcgcttgaaactctatcaaataacgagctaccccttcaaaaattcactttgaagtttttgaagaaaaatcttaggtttgctctcttctctctgatcttgatttctcttactttattttcttttccgtcacaattcccccgtgattttgataggttgtgattttgccggttagaaaaaattagttttctgatctccatctctttagtgatctcccgaggcattttatgagcctttcaaactccatcaacttagcacaccgcgatgatcttcctcctattcacaagcaaaaaatggtttggagtccatccgacgacaccgaggcgaacatctcgaggttagatagcgatgcagaatcctcgtcacatgtcccataggaactgagcagttttgtggctcggtaggataccctagcatacatggctcagtaattagattgcttgaggatgtcgagccgaagcctcttcagaaagaaaagtcgtcctctagtagtcgtcgaagcttgggcttctaactggaaggaagcgccctagcttttagctctctccgaggtgaagcttaaagatatttacttcgaaccggataagacgaagaagcttctgcaggctgcgcaagcgctttaaatggcaaaggctcaaaagaaacccaagccacctaatggacttgagggctcgtctcgacttcactgatg

SEQ ID NO: 5669 - DNA, 3000 bp, Unknown; identical to SEQ ID NO: 5666
  misc_feature (1)..( 3000): cDNA_ID_1829019_gDNA_ID_1620809_Annot_ID_50580 3000 nt of promoter + ATG

SEQ ID NO: 5670 - DNA, 3000 bp, Unknown
  misc_feature (1)..( 3000): cDNA_ID_1829011_gDNA_ID_1620809_Annot_ID_50582 3000 nt of promoter + ATG
acatattggttacaagtatgggcaatagagaagaaagggccagtattcactgcactatacactcctttagctctcatccttacttgcattgtctcatctttccttttcaaggaaacattttaccttggaaggtttgtcttttttttttttttttttttttttgctaaagtatgtaaacataagttccgatctacatgtctttagaacctgatattgagaatgtttgtgtttggacttggggatataaactggtgcagtgtgggtggggcagtgttgttggtgtgtggactataccttggtctatggggtaaaactaaagaagaggaaatacaaagatatggtgaaaagcaaagccaaaaagaaattatagaagaagttatcatcgtctaggattgcatctcaaaaggcatcagtacacccatattccacgtcctttgatacttttattgtcgcagttatcatatgaataatgtctaattttcatgtaatgtgtaaatattaatgtggagttttcttttcctcaacgtaatgttttattgattaaataatgaggtaacatattgggtatattagtgacgattagaggcagtagatttgtagccattcaccaactcaaaaagttgaaaatgaaggagtaactacctaaattgaagctatttatcgttccctttaaaatattctcatatatctagatgtagaatatacttttttccgatctaacttagttttcctacttactaaaaataccattgtaacaagactttgtcactacatgctttaacaatttcatagaaagaattaatagggacacatcaacacctttggctatagttagcgagtttttgacatctaatccacatccttagtaaatccaccgtctatgcatgagtactcgtgtcccttggtcagcgaatcataccaaaataaaaacatttaccttatttcaagattaaattttaaagttgaaaacctacacacaatttccacatgtatatatttattcttctctaaacaactaggaaaagaaaatgattacctttttcacccttaacgaatttcttaaaatattcttctttgtaatagcattttacataatattcaacacgtttaaagtttcttagcttataaaatgattttaatttaatattattagattctcataatctattgtattgtaatagcattttacatcatattcaacacgtttaaagtttcttataaatgatttttaattaaagtattagattctcatatctggttgtatcagattctacaataatcttactttgttggtttaacttagttttcttacttgttaaaaataccattgtaacaagactttgtctttacatgcgttaacaattttacaaaaaaagaattaattgggacccttcaacaactttggctacaattagccagtttttggcatctaatctcacatccttaaatccaccgtccatgagtacttagtggcgaaggcagaaatatatattacggagatcaatattaatatataattaaataattatattatatatatatatatctaaatactattaaaaaaaatttataaaacaagttttctatataaaaaaatagaacaaaaaatgatatcactagtgttgtaacttcataaattattgttgtttttccgacaaaatatagtatgtactatgtaactttagaaatacttaattttttgtttgtggtaaatacacgagtagtcacatgttattcatcattttctatttaaaaatttactaaaattttggtgaaaaatggtatacatcttttttgttattcgaaatttttaatttgtttatctaaacgtaaggattagtacccacattagttaattgttttgtatatctaaattcatgtttttaggggaataatataaccagttaccaaaatttgatatattaggaaaatatttaatataggattcaggaaattgatagaagaagaataagattgatatataaaaaaatatggcaattgagtgggggtgcaaaaataggatttgaacttcgagtaaaggttggtcaattctataaataccatttgttgttggtttaaacttaattttcctacttgttaaaaataccattgtaacaaaatttgttctttagtctatgctttaacaatttcagaaagaagaattaataggggggacccttcaacaccttggctacaagccaatctaactcgtgtcattttggttaccgaatcatacaaaataatggaatgtatttttactgattaagaatcacaaataaaattactttttacaaaatataaaatctaaacaaaaaatcttggcaagctcataaaattgtgctgtatttaaataaagtcttgaaatccgcgactctttacaaacaagaaatggttagctaactaaactgagaaaaaacagcaaagaaaatcagagagatcaaaaaaaagaaaaaaaagaacagagattcttttgaactaacgaagacatatgtaagtcttctttgatctgtgtttatatctctttgttttgctacccactcaaagatatgattttgcaaagaaagcttagtcttttgtgttcttgaaatcttaggtttgtgttcttgaaatcttcttaggtttatgttcttgaaatcttaggttatattcagctttggaattcagtgaggtagagaaaagaataagtttagtacggttgtcaaaagacattgatttcttgaaaaacaattgttggaattttaagaatttctgtggttgcgtggtgattttggttagttctaaccttaatttttctcaatgtttcttggtcttcacatttctataattacatttcttctatttcctattctctaatataattcataaaatatatattatgtgttgaattagtgtttctcatagagatttgaggactatatgttaagtttatactaagaaaatggttttggtatgtttttgcagcgtttctctaaagtagaatctttggtattcggaaaaatg

SEQ ID NO: 5671 - DNA, 3000 bp, Unknown
  misc_feature (1)..( 3000): cDNA_ID_2053625_gDNA_ID_1620810_Annot_ID_168994 3000 nt of promoter + ATG
cgaagatgacttaagggttgatgaagccaaggttgatgagagcaggcagatggattttgcaaaggttgaaaagcgtgttagaacaactggtggtggtagcacaggaacggttaggtatggactactcatcattcttcatctacaagatatcttatctcttttcacatattggctgtttgctttaacttgatgcactaatggtgtcatcctctcttaattcaggaatctgcgtatcagagaagacactgcaaaatacctgttgaacctcgatgtcaactcagctcattatgaccctaaaactcgttctatgcgtgaagacccacttccagatgcagatccaaatgacaagttttatctggtcagttgatgatcatcatggatcatgtggttgtatcatatcttttgatggtataaaataccaaccatctgttttacttgtatcatgtatgcagggagataatcaatatagaaatagtggccaagctttggagttcaaacagctaaacatccattcatgggaagcatttgacaagggacaggacatgcatatgcaagcggctccttcccaagctgaattgctctataagagctttcaggttgcaaaggagaaactgaaatctcagacaaaggacacaatcatggacaagtacgggaatgcagctacagaagatgaaattccaatggagcttttacttgggcaaagcgaaaggcaagttgagtatgaccgagcagggaggattataaaaggacaggtatggtttctgatggtttccttcttgagtcagttgcctgtagcattcttattgtgatatgaacagctatgatacgtttattttgtgtggatctgtttcattcttaacgtgtttgttgtgtacaggaggtgatattgccaaagagtaaatatgaagaagatgttcatgctaacaatcacactagtgtgtggggatcatattggaaagatcatcaatggggatataaatgttgccagcagatcattcgcaatagttactgcacaggttctgctggaattgaagctgcagaggctgcccttgatctgatgaaggctaatattgctcgcaaagaagcaactgaaggtctgtgtaagctctattccttatgtatttttggttgcatttaatggaaaaaatgctcctgaggaatgtctaaagaaacgtatttctgcatatgtaatgttgttttacaccatgtaacattggttttgtattttggtgatcagagagcccaaagaaggttgaagagaagagaatggcgtcatggggaactgatattcctgaagatttggagttgaacgaggaggcacttgctaatgctcttaaaaaggtaaagagtctcattcattctcttgcacagacgtttctttgtcctgcagttttatcttaagcacttgtgtttttttgttttgcacaggaggatctcagtaggagggaagagaaagatgagaggaaacgcaaatacaatgtcaaatacaacaacgatgtaatgatcatctaaaccaatcttaacactctaataacattttgtatcatattcttgatttagtgttgattaatcaaaatctctcatttcatcgcaggtgactccggaagagatggaagcttacagaatgaagagagttcaccatgaggatccaatgaaagatttcctctgaaagaagttggctttcattcccttttaccatgtaacctgaagaaacaagcttataatgttacttgtagtagtagtgttagtatgttgacattaaagctttgtggaagttttgctactactggtactaaaagctttttgttactgtcttaaagaaggcataatgtccaacatcgtctcttcttgactgaactttatctgattcgcttcttcattcgttactctatacgacagtttaatcacatatgtaggtactgcactcaagtaagatgttccatcgctgagtacactggcttgcccgcctgtggcgtatagggtcgagtatattagccaaaccaaaaaatttactagtgcatatgaaattaagaaccactcaatcaaaactaaactatggatcaacgtagtgattattttgcaaattagccaattaaccaacttacgaatatgaatttggattcagttttgttatcgtatgttttttttcacatatatgaattaagggtccaacgataagattacgaacgaacccacgaaccagagactaaaccaggaaaagcaacacgacaaagcgactatttaaaacaaaaataaaaatataatcgagctctggcaaagttaaaccctaattcccaaattggagtcacgaaagcaatctccaaatctatctcattcggttcgaagaagcttcaaaggcgattcctttgctttagctaactagtaattcatcgttttcatctttcgcctccacaatttccgtcaggcttctactcttttggtgtattgttgcggtgcttataacgtgatcccttcgtgattttcaggtagtttcgtcatgtcttggtgcacgattgagtcggatcctggtacgttggtctcttcttagtgtttaatgtctcttaatggggtttgggtttgtgctttaattgatttctcactgcattgaatggtttattagaacttaaactcgatgctttagatgttaagtccatgttttttgtttgtttgatgaaaagttgtgaaatttatgctcctagtgaatagtgatgtgagaatatctgaagtgatctgtgtgtgtgggtttggtactattttaaacattgaagattatctcaaagttggggagtattttttaggggtctaaggttattttagctgcatctgttgaagagttcatagtaacctgtagatagttcatatccggcttgaatgatatttgagtttatatagtaaacaaaagtgttggtatttggtatagatctcttgagtggttttctgcacactttaactgtctgtagtctgttttattgagattctctggtgtagtcaattacaatg

SEQ ID NO: 5672 - DNA, 3000 bp, Unknown
  misc_feature (1)..( 3000): cDNA_ID_2053583_gDNA_ID_1620810_Annot_ID_169006 3000 nt of promoter + ATG
taaaaattagtcacaaaaagatatttttaagaaaataaatatagttcagctacatcctaatctgtaagaaatattagcaatcgtttattacaaatttgttacgagatatttttgtgagaaattttgataaaaatatcttgttactgtgcacgtcaatcttctgacgcagtactaactaaggcatatctatgcttcatcatgataccggaaaatgaagatattttagttacgttgcattgctttgtctataaagatgaaaagtaattattttattagagatgattggtactcttaattataaagaaagtaggtttaacctacacaagattcaaagaaagctaggaaaaaacatttcgaaggaactctcggaagattccgactttctggtgatactacttccattaccattgtctagctggaacaccttaggctctaaatcctcaatgaagtaaatagagtttgggaggcatccgtaatactcatgagccaaaaccgagaaacaagtatcggtagccatcacaaatgcattgtctcccaaggtcttaacttctacccatttggctaattccttatctatcttgtaaaccttgaaaccagccgttcttgaaaattgaaataaggtcgattttctctttcgagaattctctttggggaggcgtttgataacgtaaagctctccacagcaatccacaaatctcatgtaatatctcctacagccattagtcatgttttcatcgagtgaagtttcgtaccttgacatttcaagatcggaattaatgcaccaaacgatgccttttgaatccaagacgtaagttactcctttgtgaactataatgtcggagaagtgatgacccatttgtttgaatccgttcaagacatttccattccagtagttgattgttccatccctaccgattccgagaattccatgatgatgatcatctccttccttcactttgacaagagcacttctttggtatcctggattcggtagtcttcccttggcgtccttaagaaccgcataagattcttgaatctcggagacagtgaaatccaaaagatcaaggctctcggaagaaatacgcaatggaaaacgtgagagagggttgaggagatggaatctcccggagttggtgtccatgtcggatttgattatccagcccttactcggagaggaggagagagtgactcggaagaaggctgcacgtgagaggaacgcgccggggttgcagctgaagacatggtcctctagaagggtctcacttggggcgatggggttgaagtcaatgagagggcgcctatggaaaggattcttcttcacgccggagacagaggagtgccatgatacacagatgctgctgaaacgcttgtattcaactagggagaacgatcgggcggcgataaaatggaggagctcctccggtaaggtagaccaatctaccattttgctactttgattgtttgtgatttgtgagtcacataatatatatatactacgtatacttacctaaaagtcctaacattttaggttccaaatggttgtgtttttaacttttaaagaaacaataaaatataaaatcaaaattcactcattcccataaataagaatgaatacattgaacctaaatgaaaaatatgagttctaatttgctaaagaatattaattcatattctattcgattttataccattaatgattttcatggttcatcatttgttgaattgaaatttaatagcagtacttaaagagtaaatactctctccatttgtagacaaaaatattttgggttgacttccctaaactacaccaaaacagggaccccaaatagtgtttgtacttaggcaaaaagatttaattatgtttcataggtgattgattatatattctaaataaacaaaaacaaaagcccaacaaatatatgagactaagacacaacaaatcaaaaatgaataataaatgttacaaattttagggttaaagcctttgtaaaaatgacttttagaatgacaatttgaccaactaacagaaaattattgattagtgtggcacccaaaattattacataaaatgtggccttggcacaaatcgtgtattgtttttgcgataagagaacaaatccatagcaaacgtttgtaacgcagtgaaaggaagattattagagcatccttattgatggtctcttaacacaattcttatgttaagagatatgtcttataactaacaaatgtctcttattgacttgaaagtagcctgggtctagtgaagtcaaccaaataatttcgatgtctttttccttgtttcttaagagatttattttttgctttaccatgccttttttattaattaattatgacgaatcataaacttttaaaaaatattgattgtaaataatttattgtataaaattactattggtttaaagtaataaagaaacaaattaataccaaaaataatatttatatttaaatattaattaatttttttaatatatgtgaaaactcataaaatcaatcattccaaaacagagagagtagtaaacttttgcggacgtgacttgatttaatgttttctacacttctgttatgataccaaagatgaagatattgtagttgctgtgtgtgtctataccgaaaatgaagctgaaacgtaagcttttttattaaagatgattggtactcacaattataaagaaagcagctttgacctaaaacaaatttcagagaaatctaggataaaacatttggaaagaactctgagaaaatcctgacattgttgcgatattacttccatgccattgtctagctcgaacaccttaatctctctctcgtcatctgtgaagtaaatagagttttacatcatccataaagccaaaactgagaaacaagtaacagtagaatcaaaaatgccttgtctcccaaggaattaacctctatcgtttcacctaattcctcttcgaacttataaccttgaaaccgactgtttgggaaaccaagtgaggg

SEQ ID NO: 5673 - DNA, 3000 bp, Unknown
  misc_feature (1)..( 3000): cDNA_ID_3078026_gDNA_ID_1620810_Annot_ID_169009 3000 nt of promoter + ATG
tggcttaaaccctttgatacaataacaatttggtaaactgttcgagtcgcaataaccgaaattcccgcacactttgtagttatcgcataggtccttcggtgagtaccatagttgcttccaactctgtgttgtctcaaaccaagtcaatcgttgtaataaacccgcagagtttaagtataatctcgagtataagtttgttttgttgattcggtatgagtaagtcacttcctccttacttgctgtgaaattgtaaaccatgtaatcaacttgaattgtccctggtacgctgctaaaacgcattccattccatggaccgctgcggtatagtatcgactccttgctgcatatgtaaaactcagggaactcgctggtttcgagttttgtcgaaaactcaccgcttgatggatcatctgttgttttccaggatctcaagatcctgttgaatccggttttctgatcccatcccaatttcatctccgcaagtaaagtatctgtcggaaaatcgaaactctgccatagaagtctgttattggagtctctgagcaagaaattaccgttatcaagaagctctgcagccactggtgatctcacatctcctccggttatattcgtcgaccaaacaggcctatcggactgatcgaaaatgacgaggttattgccggatattttgagagttccgttggagctagagagaggattgtctctgtttgcaacccatacgtaggttcttatagggattatcttgtaccatatgccgagataccaacgcgaacttgatgcgggattgaagaaaccgagctcgaagatttgactaggagatataatggttttgttgcttgagatagtgagagattctgtggctgaaagagtgtttggagaaacagagaaagcaagaaacagaattaaaatgaggaaaatgaagaaagaatggtggtagtttggtacacttctcatctctctctaggacagtttctcgtgttctgttttctttcttcttgagggaattttatgagaatttgagaatttttatcttcggagattcatattattgttgatgtgtgccgttatttacacgattactctgtatattacattgttgatgatatttcattttcggctgtcttttcttggttttcttggttttcttggtcttcttgttcgcatttgaaatatctatagactctgtcactatagagttgacctagcaaatgacaagaaaataactcgttagatagacatttacttatcagtgtttttgtaattttcttagtaactgacctttcttcgtttacgcaaaaaagaaacaaatctcgtcaacactccttatttgtgtgtgtgtgtggccaggcctatgcgtgtctcagagagatataaaactaatttgtgtttttctcgttataaataatcttttttttttggttttctttcctttcctacgaatatcaattcatgaaagaaattaacttacaccaccaagcttcaactatttcattcgctagacaagtaaatcattaaccttagactacaaaatgacatttgtttggcagagcttcgtattcgtagtgctgtgtgtactggccatcgcatcatgaccggttcaattctatcatgggttctagaacaaaattgttttttggctgcccttataaatttcttttaaagattttacattatttaaaaaaaattgtatgacagttctaataaaatttagttattaaaaacaaaagcaatacacaaaatatttatgggcccttctgttttattatttataaaatttagttataaaatttattatttattacaaataatgagacttgttacataaacgattttacaacgtacaattcctttaaagtcaccaaaatattgtcaataaatattaggtgcaatcataggttgttgttattcttgatttgttttgtatgattcttacttgttcagatcgtataaactcatcaataccacttgaaggagttatcaatattttatttccatgctttatatttttagaactttatctttttatttttgcatagaattgagccatctcataacatttgctcttaattgatgcactctctctttaaatgaatcaagaaattgttaactgctatattaccttcaacatttttttctaattcatatataattttgtattattgtgtaaaattttgtctttataatattatttgacatagattttattttatgaaaattttgtcaatacaaataattattattaatgttgaagactatgcaaatgcaaaaaaaaatagaaatagattttagaatatactaaattctattgctttcttcttctctagcttctctctaaaacatccacgaacacatcctctttttttaaattaacattattgtcatagccttataggactatctagtcatgtttagcttatggcgtagataggctagattgcgaaagcgtgtaaaccggttaaatacgaaacgtaattactttacatagtagacccgtaagtaaacaaataactcaagaaagccccaaaattttaccattttagttaattacttcttctcctcctttccctccaaatccttactcatccatgtccttctaaaagaaacctctgttcctgtctcccaaaaccaaacccttcttcgtctcgaagtaatcaaactctgacaacaacaactcgaattcaaagtaagcggctaaaatttcattgcatcatcttcaaatttcgttgccacacgctctaatgttcaagccaacgttagaatttagggtttttcattgcgaatctcaaaatcctaagacgttgtttaccaaaaagaacaaagaagaaaaaaccttactttacctttcaatgatcaatggttctcgtaaaaatagttccttttgcttctctgttatagccaaaagtgtaaagttcgtacctttgagggttcacttgtttaatgggttttgttgcgttaatctttcagagtacgaaatcgagtttggtaactttaatataaatg

SEQ ID NO: 5674 - DNA, 3000 bp, Unknown
  misc_feature (1)..( 3000): cDNA_ID_2053559_gDNA_ID_1620810_Annot_ID_169012 3000 nt of promoter + ATG
agggaggtcaggatctttacgttagactagccgctgctgaactcggttagtttctttcttatttgcatttactaaagtggttcttactttttgttttgattaaaaagttatgacccaaagtcaatatatcttcccaatctgcggaccaagtcatgtaatattgtccctctcgaagcaaagttcaaactccctaatctatagaggctttggtcaacaaagtacattcttgatgtttggtcaatttgtttagttttttttttttgtcatctgtttttaattagagatcaaaagattaataagagtttagctagatccaataccattataccaaaaagaatttttgtttaagttaaattaattattttgtttatttttcgtattaattttttttaatcaaacgtacaacaaaggatatttttcgtatagaagtaaatatatgcctcgtttttattgcagaggacaagagaatcaaaaatgaaaaaattataggttcgagtattggagtgagcattttgcttcttttaagttttgtcatcttccatttttggaaaaggaagcagaagcgatcaataacaattcaaacacctaatggtaaaataaatcattagctttcatttcctttatttttgtcaataaattttgataatcaaatgtcttgattgttttttttttttttaacgcctgaatgaaacagttgatcaagtgagaagccaagactcgctaatcaacgatgtggtagtatctaggaggggttacacatccaaagaaaaaaaaagtgagtacctagagcttccattgttggagttggaagctcttgccacggcaacaaacaatttttctaacgacaacaagcttggacaaggtggattcggaattgtttacaaggtaaaagtgattcaaaacatattgaaaatctaccacagcacatggtttcattgtataatcacatgtgtggtaatagggaagattacttgacggaaaagaaattgcggtaaagagactatcgaaaatgtcctcacaagggaccgatgagttcatgaacgaggttagattaattgcaaagcttcagcacataaaccttgtccggcttctaggttgttgcgtcgataagggtgagaagatgttgatctatgagtacttggagaatttaagccttgactcgcatctctttggttagtgactcaaacagcttctgttctaataattgaacatttttgtgaaaacgttaacttgttgttggttgtgttggatgtgtagaccaaacacgaagctctaacttaaattggcaaaagagatttgatattatcaatggtattgctagaggacttctatatcttcaccaagattcacggtgtaggattatccatagagacttgaaagcaagtaacgtattgcttgataaaaatatgactccaaagatctcggatttcggtatggcgaggatctttggacgggaggagacagaggctaatacaaggagggtggtcggaacttagtaagcaatcattcttcaacaaaacaaaaaaagagcttttatctcaagtccaaatattttcttaaaaacctcataacatatgagtttatattttgttatgcagcggctacatgtctccagaatatgcaatggacgggatattctcgatgaagtcggatgttttcagctttggggtcttgcttctagagattataagtggaaaaagaaacaaaggattctacaactcaaaccgtgatcttaatctcctcggttttgtaagctaaaaacctcttcaattcgatattgttttgcattcataatctgattataacactaaagaaatattacatcctttatgcacaggtgtggaggcattggaaggaaggaaacgagctagagattgtagatccgatcaacatcgattctttgtcatcaaagttcccgacacatgaaatcttaagatgtatacaaattggtctcttgtgtgttcaagaacgagccgaagacagaccagtgatgtcctcggtaatggtgatgcttggaagcgaaactaccgctattcctcagcctaaacgtcctggattttgcattggtagaagtcctcttgaggctgattcttcttcaagtacacagcgcgacgatgaatgtacagtgaaccaaatcactctctcggtcattgacgctcggtaatttgtaacttacggcccaatctgtttacatgcatatcattttataggtaagtctaaatagattttattactacatatatgattcgatatcttgctctatctaatttaatttagacaaaagattcaccacatgtttcacatgattttgatttagagcgagaattataaaaaaaaaacatttagacaaagacaaaaaaatgcaagatttggagttgtcactccaagatttgaagtttgagaccgaaactcaattaagtgggaattcagtaatgattaatattcactttttgtacatactactgataatagaccaatactggaagcgaacataggactttatggctattacaacagaggactttatgaaacaaatcgaatatataccttaaacttttatgaattcatcggtgaagcattctcttgcatataacatttagtatgtcgccagcaacattgaaattttgtctattctcgtacacacacacacaaatggttgaggatattatttttttggagtaaacgaagaaaagtcagttactaggaaattacaaaaccataattatcaatttaacgacttttaaggtcattgactcaattctatagtgacatagtctatagatatttcaaaagcgaacaagaagaccaagaaaatgtagctgaaaatgaaatattatcaacaatagagagaaatcgtgtaaatgacgttcacacatttcaacaccaaacatgtcgtaatctccgaagataaaaattctcaattatatgtacataaaattttcataagaagaaaataaaacagaacacaagaaagtgtcctagctagagagagagagagag

SEQ ID NO: 5675 - DNA, 3000 bp, Unknown
  misc_feature (1)..( 3000): cDNA_ID_3078018_gDNA_ID_1620810_Annot_ID_169019 3000 nt of promoter + ATG
gataaagtcgtttcattgtttgtagagttccgttgacgcaaaacgtgacgagaaaccgacaaaatgagacacctacataaccacgtggaatgatatatgccggaactataatgtaaagttcgaaatggagaacactaaaaagacaaaagataagctataaacctctaattaggtataagttaacacagtgcaacaacgtgaacatccatttggccaatcgacatattatgctctaaatttactaaaagagtgaattactcggtaactatacttattatgagaaattgattagttggttagtaaaaattaatatgaacatttacattacataacttttatatagattgagtgttttttttatcattatataatattttttatgtgaacatttcatttatcaaataaatgtgtataaaaccataaatctgatattctaaaaaaaaattttcttagtaaattagatatcaacataaaatataacatgttacagtaaaaaaaaaaaaagctattttgtgaaccctacaaaatcaaatatcactatccatagattttcattgcctttgggtcatttccctatctgttgtttacctttttgacgggtttctttttgcggagaagcataaaaggatttgatcgcatattcgcattaaaggctcaattggtagaaattgaagactaattttaaattgcaaacaaagagacccatgccacttgtgacttgccccacgtaggtccactatgttgtctcttttcatcacacaacactataagacaaattctcttataagacaacttgatccctaccatcacctaatgaatgatatatttttcaatattatgaagaaaaagaattatagagtattcataatcaattgggaatgattgaagtagattatgattcttatatatttcgggtgatttttcttacaaaaatacaattttcaacatgccatgcaaaacaattttttttttgctttttttttttttctcaaatcagattttattttataattgacattgcaaaaaagtccgaccaatttctaccaagaatttagttcgaaattggttagaccatttttgatcgaatcatgaattgctatgtttaataaattaactacccaagaaatgatatctaaatgactgattgatcgataatgggtagtaatttcatcttagacaaaataagcatagtatactatttcccccaatattatagttacctaattaatctcttaaacaactgattaatcgatttaagcgatcgacaaaatataacataaaattatgtttaatagattacaaatcctatatatacatcaagttaacgcctaatggttgttgtaaaacctttaactgtgttttttttttaattggtcagatttgttttagcatatttctttaaatcgcatttgagtggcggccaaagtttaacagattaaggaccctaattaagacctgacaacttcattctttgaaaacaacaaacccgtggtattacttaatcgctgtcaccgagtgcattacgaaccccatatgtccacatgcttctttcaaactaatacaaaactgaatacgatttccttcatcaataattgagtataataagatcttaaatactctaactacaattattaaaagaaaaggttaagtttttgccaatagcttccacgcaagtggttgaccaattcaacttaactttctcaaaacaatgagattccacctaaactatataaatgacgtaggaattatatgtattacactaatataacaactcttatatattagttcatctctcttattctcgcaaagttttatttatttatatttaatatttaataataaattaagttttgaatgctatttgtgaatttttttaaatgaggagctatttttggaagatttttttttttggagctatttatgtcaatctcccaaaattaaaatttacagattttatgcttattgtttttgatgttaatttggtataatatattttccttaaaatagaccattacctcaacaaatatttattgtaactaatcctatatatatatatgcaatataatataatatcatattatttaatgtttatatataataaattaaaattccattgattttatgtttacatatttttataaaatttaatatagttaaacttaaattagtttatctatattcgtaactaataaaccaatgtcaatttttatatcagcaatgaagaattaatttatgatttatttttttaaccaaaaaaaaaaaacaataaataaggatcatgacctatcaagatctggaaaatctttcaactgttacatatatgaatatatgatagacaaaccataaacatatcaacatcaaataattaacgtcattagctgtttactatattaatcacacaattataaataaaggtaactaactaaagtatctaaaatggaaagaacattttgttgaccacataataaaaacaaaacaaaaaaatagagacaaaggggttttacgtcatttcaattcctgacgaaaaaaatctttaacacagaggggtaaaactgtcatttggatatcggctcccactataaaaagcctatttgcttcgtgttttttggtcaccaaacccttcatcttcttcgtttcagcttttttttctctcatgtttctcgtcttcttctaaacttttgtgaccacccaaaaaaaaaaacgtaacggaacaaaaaaaaaaatgctccgatcacggaattgtaagatctccgccgcgaacgaagccgttatttctaatcgtctttcaatttctaatctcaaagttttattcgtttttgaatcctcgccattgaataatttgattaatcgtttttccgataagcttcgtcgttgaacttatctccgatctctgcaaattttctctcaaatctctccgatcttcctaattgattagaaacttctccatcgtttgctcaattatttcggatttttctctgtttctttccaacaaaatcttca

SEQ ID NO: 5676 - DNA, 3000 bp, Unknown
  misc_feature (1)..( 3000): cDNA_ID_3078022_gDNA_ID_1620810_Annot_ID_169016 3000 nt of promoter + ATG
taatcaagctaagtcctaaagtattaattgtagaattacgaactaagcatgaacaccataatcgatattaatgcagtattgcagtttgttaaccttgttctcttcttcctacatcgtatcacacaaaacagtgtttagtgtctctggtaaaataattgcaagaaaccagaacatcccaattgtgattccgaacagaccaaattgccataatccattattctgagtttctgaccaacaaccaccatgatagcactaagaattcaccaccaaaaccaatgtttgtctcaccataatcgctaaatttctaaagcatgttggaaatagctcaattgtatatatcatctccatgttaaaagaagagcagtcactaaaatattgccacaagcccattattaactttatcatcatgttactttatcataaataaaaactcgattattgatttggaaaattttgcaaatcaataaagcatacgatatggaattttttttcattctaaaatatgacaagaaaaatgcaaaacataagcaatacataagcaacacacaagcaaacaaaattataagctcaaattttaagactttaaaacattgctagttatcaactacacaaaaatgtgtaataatataagagaccgaaaatatgtgttttaagactgtagatagttgtcattaattttgttttaactaaaaaatatttataaaactattctatataacacttctttttctatgtgttattcgcaatacatcatacaagattttggaactgtcggaggaggcgcagcgggcattacttcatttaccatcgcagagctcatctcgatcgtgtcgtcggtagcggccacgccttggggaaaggattcatccgctattcttgttaaccttttttaattgagtcttcgaattgtgaacaaaagccttttgtgttgtacttggttcgaattgtgaacaaaactcaatggttcaatctttataaggaatccttatcatttttaataaatgttttttgataattatgaagtttagagtttttgtagagtctctatattttttattatctaatagtggagtctttaagtaagtttttaaaaacaaaagtattttttaaataatttatttgataaaacttaaaacttattagaaatattaaaattgtaaatatatatcataacttaaaagcacaaaaaaaactaaaaaaaaacaaaataaaaggcttacaagaagaaactaaaatccaagattccctatctcggtgaagactttcgttgaacatgttgtgtgtactaaataaacgagtggagaatgcagcgacaaaacaatagattcgaaaattgggtttgaacttttccagagatggaggtctccttgttatcattgtgaatcacatttgattttcacgatttgatgatcaagagattgttcaatcgccatcggagttaacaagagaaaagagaaagaaacgacatagaaaaatgaaaataatacgttggcaaaggaaaacaaatgtttcgtccaaaaacgttaccaattgagaagttgacacgtatgcgcaccttaacattattaaaaatccaagcttaggaatgcacctaagtttatataacattttttatttaatttttgcccattttaccgaaggattcatacattagaaactcttaaggatcactaatgaaggtggtcttagatcggttcaccagtgggcaaatataaaacatctatcgtatattttcttctagttaccaaatttaggattgcatttttgtttaattattttgttattctatgactccaaatggatatgtccggtttaacggctgatcaaatgcggttcggttctaataatgactaatatatatatatatatatatatgaagaaaattttgttactacagtagaaactctataaattaataatattgggaccatgaaattttattaatttatagtgatattaatttataaaataataaatattaatttatagaaatatttacgtgaaatacaatactaaattcttcttaaaatgttttttaatttagtttttcttatgttttgttgtttgtatattcagttatgttaaaaaaaagttatttttctcttgacttttataaaacatgaggcttaatccaatttatctttgtacaaatcttagcaatgattaaaaaatgttacaaaaccaaatatgacggataaatacgcaaagagttatgtgagtataaaagagataataccaactgtactctaaaaagagttataattatggtttgaataaaagtttcatataaaattagtgttagaatatatgcttaagatttatgattattaatttatgatattattgagaccatatttttacatagggatttcaaaaaaattattatcttattatcttatcgattttggttaatttttacattggtccgacttggaaccggtaaagtttattaatttatcgtgtttattaatttatcgaatattaatttatagagtttctactgtatatgacttatcaccatgagattgtaataactcttatctaataatactcactcaagtaaaagatccaataatcttcaaacgaaagtagtaccaggtatgaaactccagcgttgatgatgtgagcttctcaatatctactagtcaaagacgcatcggatcgatcatcggagttgcatcggaatttatcgggaaagaatggattgggcccaatgtggaaatgataagtcgtatgggcctaaatcatttagtcgtaggcccaatatgagtttaagctctttgatatttcagagaatgttattcaatttattagtaattttcaaatgatataaattcaatttattaatcacttggttaaaacttatacacgtgaaaaaatgagaaatcattttagtacattgttgaccatctttttcgtatagactactatctctgatctcttgcgagttaagtcagtaactaggaaaattcagaagcgctctcaatctcaaaaatatcc

SEQ ID NO: 5677 - DNA, 3000 bp, Unknown
  misc_feature (1)..( 3000): cDNA_ID_2053565_gDNA_ID_1620810_Annot_ID_169011 3000 nt of promoter + ATG
ataagtctgacggtattcgcgtggtagcatcttctaacatccaaacaattcagtattgcatcttcttgtgaaggattcagcttgagaaaacgacgaggagcaagaccatcacttccttcttgtaaacactgaatgcaaaatccttcatcctacacaagcagaagccaaaaatgatatgactacaaacatcgaaagctattacagagtttatcaatatcttttacctcactgtttcttcgaaggactcttgagataagattcaagttcacaccttcatcaccaggatgcaatgcattccagatacggatattagtagttaaattgacgagatgaataccgaaaaggcgttctttcttctcattcttcttcctccttccatcctcaacgaaaagaggttttgaagccaagatagttacatcattaggcctatctggatctaccttacacactaaagcaactatataaggttcactggaaatattgaagccatcaacatggtttggtctttgatctgttagcgagataagatctctaggcatcaactttgtactagcctcattacttattccactcaaacgcactttatagaacaagtcattaggaagcttatattccgcagtttgcataatgtagcttatttcaaccacaggtgcttgccacaacttcctcatactcgacaataaagcggcatgtgtttcttcgataagcggaggaataaaggtcttgaagtagtctccggttgattcaaactccataggtatcttctccacctgttataagcaatcaaacacacaaaattactctctaggaagcttctctttactcaaatgggacagagaacacaagaaagtaaaacagaacctgtcctttataaagatcaacattgagaacttcgtcaagagaccatgagagcaccagatcgactaaatctcttccttcaatacgcattctcggcatttatattaaagttaccaaactcgatttcgtactctgaaagattaacgcaacaaaacccattaaacaagtgaaccctcaaaggtacgaactttacacttttggctataacagagaagcaaaaggaactatttttacgagaaccattgatcattgaaaggtaaagtaaggttttttcttctttgttctttttggtaaacaacgtcttaggattttgagattcgcaatgaaaaaccctaaattctaacgttggcttgaacattagagcgtgtggcaacgaaatttgaagatgatgcaatgaaattttagccgcttactttgaattcgagttgttgttgtcagagtttgattacttcgagacgaagaagggtttggttttgggagacaggaacagaggtttcttttagaaggacatggatgagtaaggatttggagggaaaggaggagaagaagtaattaactaaaatggtaaaattttggggctttcttgagttatttgtttacttacgggtctactatgtaaagtaattacgtttcgtatttaaccggtttacacgctttcgcaatctagcctatctacgccataagctaaacatgactagatagtcctataaggctatgacaataatgttaatttaaaaaaagaggatgtgttcgtggatgttttagagagaagctagagaagaagaaagcaatagaatttagtatattctaaaatctatttctatttttttttgcatttgcatagtcttcaacattaataataattatttgtattgacaaaattttcataaaataaaatctatgtcaaataatattataaagacaaaattttacacaataatacaaaattatatatgaattagaaaaaaatgttgaaggtaatatagcagttaacaatttcttgattcatttaaagagagagtgcatcaattaagagcaaatgttatgagatggctcaattctatgcaaaaataaaaagataaagttctaaaaatataaagcatggaaataaaatattgataactccttcaagtggtattgatgagtttatacgatctgaacaagtaagaatcatacaaaacaaatcaagaataacaacaacctatgattgcacctaatatttattgacaatattttggtgactttaaaggaattgtacgttgtaaaatcgtttatgtaacaagtctcattatttgtaataaataataaattttataactaaattttataaataataaaacagaagggcccataaatattttgtgtattgcttttgtttttaataactaaattttattagaactgtcatacaattttttttaaataatgtaaaatctttaaaagaaatttataagggcagccaaaaaacaattttgttctagaacccatgatagaattgaaccggtcatgatgcgatggccagtacacacagcactacgaatacgaagctctgccaaacaaatgtcattttgtagtctaaggttaatgatttacttgtctagcgaatgaaatagttgaagcttggtggtgtaagttaatttctttcatgaattgatattcgtaggaaaggaaagaaaaccaaaaaaaaaagattatttataacgagaaaaacacaaattagttttatatctctctgagacacgcataggcctggccacacacacacacaaataaggagtgttgacgagatttgtttcttttttgcgtaaacgaagaaaggtcagttactaagaaaattacaaaaacactgataagtaaatgtctatctaacgagttattttcttgtcatttgctaggtcaactctatagtgacagagtctatagatatttcaaatgcgaacaagaagaccaagaaaaccaagaaaaccaagaaaagacagccgaaaatgaaatatcatcaacaatgtaatatacagagtaatcgtgtaaataacggcacacatcaacaataatatgaatctccgaagataaaaattctcaaattctcataaaattccctcaagaagaaagaaaacagaacacgagaaactgtcctagagagag

SEQ ID NO: 5678 - DNA, 3000 bp, Unknown
  misc_feature (1)..( 3000): cDNA_ID_2053579_gDNA_ID_1620810_Annot_ID_169007 3000 nt of promoter + ATG
aatccctaatctaatacaatctgtaaatcaagttaattctgataataaattatatattaatgcttcaaagatatccataccacaaaaaagtaagtataaacaataaacactatatttggtgtttagggaagtcaacccaaaatctttcatctagaaatggagagaatattttgtaatgctacaaattttcaagtccaggccaaaacatgcatctatcccacaatgatgaaccatgaaaaccatttatggtataaaatccaattgaatttaaattattatttttaaagcaatttagcactaatatcttgcatttaggttcactctatgagaagaaagaaagggagtaagggttggatgcttctaaagctggatttagagaaggcctatgacagaataaggtgggattttttgtcagatacgcttgtcgcagcagggttttctgaggtctgggtgacttggataatgcagtgtgtttcaggcccggatatgagcttgctatggaatggtgagaagactacacctttcaagccattgcgaggtctgagacagggtgatcttttgtccccgtatttgtttgtgctgtgcatggagagactctgtcatttaattgaaagatccatcaatgctaagcaatggaaaccgattaatttgtcgcgtggggggccgaagctctcacatatttgctttgcagatgatctgattttattcgcagaagcttcagtagagcaagtacagatcgtaaggagagtgttggaagcgttctgtactgcctcgggtcaaaaagttagccttgagaagtccaaaatcttcttctctaagaatgtctccagagagttaggcaaattgataagtgatgagagtgggatacaatcaacctgtgattggggaagtatcttggaatgcctgttcttcaaaagagaattaataaagatacctttggggagatcttggagagagtttcatcccgcatgtctggttggagagaaaagacgttgagctttgcgggccggttaacactcacgaaagcagtcttatcctcgatgccggttcactctatgagtacaattctgttgccgcaatctattctgaatcgacttgaccaactatcccggaccttcttatggggaagtacagcagagaagaaaaagcagcacttggtaaagtggtcaaaagtgtgttcaccaaagaaagaaggaggtttaggagtcagagcggctaagagcatgaatagagcacttatctctaaagtgggttggaggttgctccaagagaagaatagcctctggaccttagttttgcagaagaaataccacgttggtgaaattagggattcacgttggttgattcctaaagggagttggtctagcacttggagaagtattgcaattggtctaagagatgtggtatcgcatggagttggttggattcctggtgacggtcaacaaataaggttttggactgataggtgggtgtcgggtaaaccgttgttagagcttgacaatggtgagagacctacagattgcgacacagtggtagccaaagatctgtggatacctggtcggggttgggattttgcgaagattgacccttatactacgaataacacacggctggagttgcgtgcggtggtgctggatctagttacgggagctagagacagattgtcttggaagtttagccaggatggacaattctcagtgcggtctgcttatgagatgttaacggtggatgaggttccaagaccaaacatggcaagcttctttaactgtttatggaaggttagagtgccagaaagagttaagacgtttctatggttagtgggtaatcaagctgttatgacagaagaggaacgacatcggagacatcttagcgcctcgaatgtgtgtcaggtttgtaaaggtggagttgaatctatgctccacgtgcttagggactgtccagctcaattggggatttgggtcagagttgtgccgcaaaggaggcagcagggtttcttttcgaaatctctgtttgaatggctctatgataatctgggggataggagtggctgtgaggatattccgtggtccaccatttttgcggtgataatatggtgggggtggaagtggagatgcgggaatatttttggggagaacacgaaatgcagggatcgtgtgaaatttgttaaagaatgggctgtggaagtgtatagagctcattcaggtaacgttttggtcgggattacgcaacctagagttgaaaggatgattggttgggtgtctccatgtgtgggctgggtgaaagtgaacacagatggggcgtctcgtggaaatccggggctggcttctgcaggcggagtactacgagattgtacaggagcttggtgtggtggcttctctctaaatataggccgctgctccgctccacaggcagagttatggggagtgtattatggattgtatttcgcatgggagaagaaggtacctcgagtggagttggaggttgattcagaggtgatagtgggttttctcaagacagggattagtgactctcatccgctgtcattcctggtgcggttgtgccatggctttctacagaaggactggttggtccgaattgttcacgtgtatagagaagctaatcgtcttgcggacggattagcaaactatgcattttcgttatctttaggctttcactcttttgatttggttcccgatgcgatgtcatctttgttgagggaggatactcttgggtctacccgaccaaggcgagttcgtttgtaattttctttagtttcttaataaatcacgggaggcaattgtctcccggtcacttaccaaaaaaaatgagtggattttgtttttatattttcttatttctttaaaagttacaaaaacaaccctatgaaattattaggtttcttgtgaagtacacgaagcgtcgtataagtaaatattagagatattatgtgactcacaaacaaccaaagtaacgaacgaaacagatagagagaagagagga

SEQ ID NO: 5679 - DNA, 3000 bp, Unknown
  misc_feature (1)..( 3000): cDNA_ID_3078034_gDNA_ID_1620810_Annot_ID_169004 3000 nt of promoter + ATG
acagaaactagacactgcctaaagttcacaatgcttgaaagctattaaaccacaaaatggggcaataagaaccatatatacagatgaccataagcaatagaacctagacactctcaatgctctgaaagctatgcaaaactcagattggggtcaaccagagtcatccccatatcctgctacctacttaaaaagtctagctactagctagtcagtaagattacaagaaacggaaccgaaactagacactaccttaagtatgcaatgcttgaaagctattaaacaacaaaatggggcaatgagaaccatacacacatatgaccataagcaatagaaaactagacactcccaatgcttgaaggctgttcaaaacacagattggttaacgagaatcagacacatatcctgcgacctacttaggttctagctaatcagtgcttgaaagaatgaaagctattaaaccacaaaatggggctatgagaaccatacacatatcctgcgaccaagttaggttctagcaagtcagaaagaaaacaagaaacagacttctcgagtcacgaccttggttcctttgatgatcaatccatttaagtattaagctcctaaactagtcacattggtatcaaagataatgaataaatccataggtaacatcataatcacacttatatatatctaagaaacatcaactacaaatcgtaaaaacactgatacttagagtatagtaagtttagataaatccataacagagacgaatttacttgtacgcaacaacatagataagcaacaacgtaaatcatgataatatgcagaaactgaaattcacaacctcaaatcaagcagcttccttcacaggagcaggagctggagctggaatcttaacataacccaatttcttcaagctagcagcatcagattcatcattctcataatcatcttcttcttcctcaaaatcatagctttgacgattcacaacaagagcccaaacaagatacatagtagcagcggttaaagcaccacaaccaacaccgaacaaaagcgcgacgacgacgctaagaatatctctggttcgatctctaaacgaattgatgttatcagagatcaaagggagggaacgatccgattggatctgtggcttctcgtgacgacgattgacgaagaaaggaaccacgtggtgaggatttagacgacggattgtgaaaacggtgacgaatcgtgtggaggtgaaatcggattcgaggttagggttttctggggttattgagagggaatatgaggagattaggaaggttttgcaaggacgtgcggtggtgatggtggtgattgagaggaaagctacgacggcgatcgcaaatcggaggtacgatgatgacgtcattgttatcgtctttgacttcttcttcttcttctgacgattttgaagacaaacctaacccaagaagattcggtgaacgaagaagattaaaaagattttctaagatacgtgttattatgaaataacccctctacttttgtatttgatcatataggtcccttttatcttcttttcttataaaaggtgccaaaatattatttaattttgacttaactattttaagtctaaatctcattatttatactcacataagcaaacaatagatttatttctctatttatctaattttcaataggttaattgttaattgatatgaattttgtccaagttatacaagttctaataccacaaatagtttgtgtaatatgtgaatagtctgaacccacctcgcatataatcaaacttctagtagttataaattcataagatttttgttattctaagcaagttaatgatgcattcatggtcaatatcaagttaaccatttgtttattaatatagtatagtcaaactttcacattttatatttattagtcaatattaatagctaagatttttttacctaattattatggttagagaatctaaatgaaaattctatctagtcactcatagtctcgtaccatagaataagagcacgacactttcgaatattccaacttttctcttatttaaaataatcctctcctttcttgtaaacaaagagctaggttagacttaaatttagcagcggtcacagagcgataaaggaaaaaaatgacgatctcaaatgccacgacatgacatgatagaatctttgaggccagccatgagcccatgaggatcatccttcgtggcaaagccagctcacgtttagagtctttaacaatgtagtgagagaacataaaaatgaaaatgtcaaatcggtgtaaacgtttggacacatagtttttattttttttggtctttccacataaataatttggtactattgaaaagcgatagaaatattttttttttgggaaaattgtggtagaaaaagtaaaattcccttgtaatctttaattataaaaaatattggttaatagttaagtactccgaaattaaaagtaatttgaagaacaactcactatataaacgactattgttctgaaatcaaatgttcaaacaatatttacgtgtattttcattttaatattttaattcttttcaaaaaaacacatttgcaactaaaacttaattctgttaagattaatacaatctacgacccgtcataattggctcgtttaacacgtaaacatgtcataatctaaattccaaaatccatttacgtatcaatttaattaactctaaatccacaccaaagaaaaaactcagattttacactgtgtatacacaccacaccatagtccacgtgcacgtaggttaattatttataaaaaaaacacatttgacttataaatatagaaatattaaaacagattcgcttctctctctcactcacacaatagagagaatcattcagttacaagaaaatcgtcctcttctctcgccgatctcttctcttcagatcctctcctctataaaatctctccctctctcgttcccctcctcagatctgactcaaatcaaatcaaaaactctcagct

SEQ ID NO: 5680 - DNA, 3000 bp, Unknown
  misc_feature (1)..( 3000): cDNA_ID_2053621_gDNA_ID_1620810_Annot_ID_168995 3000 nt of promoter + ATG
tccagttttaattaaatttaaaacatcgtgtgtgagttgacaaaatcaaattacaagctatcttgcagttttacgtattacctcttttaattaaacacaaggcaacaatgttttttcttatataaacaatttaccatctgaaataaacatactttaccaatcgacgagagatcacaagtataaggagagtactactccctctaatcatgcacccctaaaccataaaccacttacatcttcgaaatagttgaaattgaagaaagaaataagttgatatggtagaagtttatgagttattaactgtgatggtttcactcattgtggtgaagctatttcattggatatatcagtcgaagaatccgaaacctaatgaaaaactacctccagggtcgatgggttttccgatcattggagagacttttgagttcatgaagcctcatgacgcttttcagtttccaacattcatcaaggagagaatcatcaggttcatttggtaattttctctagcatgcagtaactcataacttacttaagtaacgttgtcttttttttcgatatggaaaaaataatagatatggaccaatttttcggacaagtttatttggagccaaagttataatctcgacggatattgaattaaatatggagatagcaaagacaaaccatgctcctggtctcacaaagagcatagcacaactctttggagaaaacaacttgttttttcagagcaaggagtctcataaacatgtccgaaacttgacattccagttgttaggttcacaaggtttgaaattgagtgtgatgcaagacatcgatctcttgactcgcacacacatggaagaaggagctaggagaggttgtcttgacgtcaaggaaatatcaagcaaggtaaagaaaagttatccatttcgtactcttgttgatattgcaatccactagatattggatgatctcaaatctttgtatatttaaacgttacagattttaattgaatgccttgcaaagaaagttaccggcgacatggaaccagaggcggcgaaagaactcgcactctgttggagatgttttccgagtggctggtttagattccctctcaatcttcctgggactggtgtttataaaatgatgaaagtaggtgtttttagtaaccttaattgtagtaatttttctacaaaattaatgatccaagccgtgaggatgatgtttcgttgcaggcaagaaagaggatgcttcacttactaaaggagacaatactgaagaagagagcatcaggagaggagttaggggagttcttcaagatcatctttgaaggagcggaaacaatgagcgtagacaatgcgatcgagtacatatacaccttatttctgcttgctaacgaaacaacaccacgtattcttgcagctacaataaagctcataagtgacaaccctaaagtcatgaaggagttgcatagagagcatgagggaattgtccggggtaagactgagaaggagaccagcataacatgggaagagtacaaatctatgacatttacccaaatggtgagtttaaatcaatataagattggctaatacatagtaagtagctcatagaaatatggttgtttgttttaggtgatcaatgagtcccttaggatcacaagcacggcgccaacagtatttagaatatttgatcatgagttccaagttggttcttataaaattccagctggttggatcttcatgggctatccaaacaatcatttcaatccaaaaacttacgatgaccctttagtattcaatccatggcgttgggaggtgaatgtcatatgatcttttacttatttactacaaatttagtaaacaaattcatagaaattttaaactaaatgtttagggaaaagacttgggcgcgatcgtctctcggacttacattccctttggtgctggctctagacaatgtgtaggagctgagtttgctaagctgcaaatggccatttttatccatcatttgtctagagacaggttcattttcattaactaatgattgtgattagattttatttttgcttgcagccaaagtttttacttacatgtaatataccttatatatggtttgaaggtggtcaatgaagataggaaccacaatacttcgaaactttgtactcatgtttccaaatggatgtgaggttcaattcttaaaagacactgaagtggataactcgagtggttcgaatcccgattgctgcaatggataaaaaccatcgatcttgttcttgaacgattattgcaaatgttaaatacttaaaagactagttggtaaagatgatttatcaaacgagtcatatgaggatttaagttttatgaaaaatttactggacttataagaattatgcttgtaataatgaaggataacatgcatatttttcctatgttgaacaaattgaaaatacattgttacctataaaaatggagattaaaagcaaacaaatcctcacctaaaacatgctttcttgacctctttaggctctggcaatttaacaagtagccgtttaggcctgtttagttttagacctgtttacatttttaagcttgcaagcttaggttggttcatatatgcccatttacattatattcaattaattggagaactttataccatggttttctctttctatggacatttttcaacccaatcaaaaaaaagaaaagtaaactgaaatctcttacttagaaaattgattctactatactatatccggttttaaatctggtccttgtttggtcttggggataataattagtggcgaaaacggcgtcgcttttgctttggttttgggttaaatgagtggtgtttgctaatgaatgggcctctacgccttttaacagcccatatttgatcacatttcaatctatcacatgattttaaccataataaagccgtagccatttcttcttcttcgttccttcagatttttcgcaacagagagagaagtcgaagcttcacgatcgtataataatg

SEQ ID NO: 5681 - DNA, 2305 bp, Unknown
  misc_feature (1)..( 2305): cDNA_ID_2053753_gDNA_ID_1620811_Annot_ID_50583 3000 nt of promoter + ATG
gaattctctgcttatgctccaagtttagtgacatacaaaccaaccaactacgcaaaatgaaaagaaaaaggaagaataaaagaagaaagatgcagattacttcttagttccatttgcaatactttttttgttacgtatttttttgcatcgtctcctgttttcattcattgtctttcatttccttttgaacatttattaatttgttttttgctatttatcatctaactaagtatttagatttatcatgatattttaggctttttttcaattgttagtatcaaatttttcaatataaaacaaattatatctaccacaatgcagattcgtcttgatgttctttgtgattgtcttggcattctctatatgtttttgtggaagcatcggagttttagattagatatgattaacgtaggagttcatgtagaagtagagagatgtgttgtaatttataaaagaggcttcatgataagatagcttttgttgtttgtcttcacttccatggttcattgtcttccttttccattgatgtgctggtgaatcacaaagatactcatgcatttttcaatcctaattttggcatatgtaagtttttttcaattttgtttgctttttaatccaggcattggatgaaaacagagagaattcagggctaaagaaagcctttgatttttttttttttgtgtgtgtgtcaaaacagataataaccttttgtttttgggtcgtttaattgctatatgatgcatcaaatcttgtaaacaagagtgattccaagaaggtggaagtatttccgcatgattacggttgttgcttcacaaaataggagacggcttgtttcctctgccgaaccattgacatgtaaaggtaaatgttcatgttttgagtgattgattgattcaagccttaattagcatgtttatattctcttttccatatcatcaactaacattcataccagttgtttctaagagatttagtcgctggcatgaactaatatatatgcaatagtatagaggcacacaaataaaagatttgatcggataaagatcataagaaaaatcagagacataaagaacatgcatcatataaaataaatgtaattgaaagggataacaaagaaaacatttgataagcattgacctatgaaggcgctacttcacaaaaacacgagactcttgatgtgatttgggtaaaccttcatgttgtacatatagtctttaacaaatccatagcggcttctaaattcatcacccacaattccttcaaccgagacttctctaatactgtttctcctcggatcaaaatatagtagataaaacgattcaaacaatatcgatggtgcaaaaacaatctcaccagcatcactaacaccataaaagcttggcttttctttccgtattaggtccatttcagaaagagtcaaaaacgcgattatgcgtccattcgtgtctatctccattcgtcaaaatccatatatcaatagacgggaatttaaaagtcttaactagggctaaccttcccacataaggtaccatataacaacttttcctataataaccctctggaagtttgatctggttgaacttttcagatctaacgtctaagctcattagtttgcgttccacttcaataccatcaccaacataaacagttgctccatagtacatgactccattaattagtatatgcatcccccacaacgtatagtagatcgatgcctagggacaccgttggttattattctccatgatcttagtccttaagctcccagtgtacgaatgcaaatcttcgagtctctctagtaacatgtagtagtacaatgattcaagttttcaatcaatctgatcatatttacgctaccattcttgattagatgcttatcctgctcaaaaatgtattcagatatatattaacaattacttttgaatggtatcaaatatttattaactaattctttttaataatttaatccaattaaattttaactttttaatggattcaaatatatactcattctttatttagtgttaaaaaaaaaaaagtagctcaactggaaatgtatgtaaattatatattaaaagctgacccgggtctagaggatgtatggaaagccaatagcatcgtttcgaacattgcaataatattgtgtggtgacaagcaacacatgatatgtccgtttagaaacagacaaaataagaagaagaagaaagagtcgtggaggattcttcattcttcctcatcctcttcttcaccgattcattagaaaccaaattacaaaaaaaaacgtctatacacaaaaaaacaaatg

SEQ ID NO: 5682 - DNA, 3000 bp, Unknown
  misc_feature (1)..( 3000): cDNA_ID_2993959_gDNA_ID_1620811_Annot_ID_50584 3000 nt of promoter + ATG
ccatatatcaatagacgggaatttaaaagtcttaactagggctaaccttcccacataaggtaccatataacaacttttcctataataaccctctggaagtttgatctggttgaacttttcagatctaacgtctaagctcattagtttgcgttccacttcaataccatcaccaacataaacagttgctccatagtacatgactccattaattagtatatgcatcccccacaacgtatagtagatcgatgcctagggacaccgttggttattattctccatgatcttagtccttaagctcccagtgtacgaatgcaaatcttcgagtctctctagtaacatgtagtagtacaatgattcaagttttcaatcaatctgatcatatttacgctaccattcttgattagatgcttatcctgctcaaaaatgtattcagatatatattaacaattacttttgaatggtatcaaatatttattaactaattctttttaataatttaatccaattaaattttaactttttaatggattcaaatatatactcattctttatttagtgttaaaaaaaaaaaagtagctcaactggaaatgtatgtaaattatatattaaaagctgacccgggtctagaggatgtatggaaagccaatagcatcgtttcgaacattgcaataatattgtgtggtgacaagcaacacatgatatgtccgtttagaaacagacaaaataagaagaagaagaaagagtcgtggaggattcttcattcttcctcatcctcttcttcaccgattcattagaaaccaaattacaaaaaaaaacgtctatacacaaaaaaacaaatgggagagaaagaggaagtgaaactattaggagtatggtacagtccatacgccataagacctaagatcgctcttcgtctcaaatcagtggattatgattacgttgaggaaaatctgtttggatccaagagtgagcttcttctcaaatcaaacccggttcacaagaaagtccctgttctcctccacaacaacaaaccgattgtcgagtctctcaacatcgttgaatacattgatgagacgtggaactcatctgcaccgtccattcttccttcacatccttatgatcgtgctcttgctcgcttttggtctgacttcgttgataacaaggtttggtttctttcttttcctttatccaacaatttcaatttcttattatttctttcagttttcttttgatggaattttttggaacttttttattattattgttacattccaatgaatttatctttcgtgcatggattatcttggggatatatacttagatcgtcctatttgagtgatttatatatgacaaaaataaaagagtaatgttgtattacataatacgtggatataaactcggatgaagacacattaccaatactatcacaagctagtcaactcaggtctaatgaaatccagtaaatacttcttctagtagtagcatataagtttgttctggtatacattattagtcctagataatcatacattatttctaacataaaaatgtcctaattcttatccataaatttaaataagaatcatcaggcttacaagagaacgacatttgtttgattactctgacactagaccacatttgtttgtttgcgtctccgttggtgtttctatgctacggtgaataggattttatgatatagggacgcaattcaaacataaataaacaattgtagcttatatattattcaaaaactaaaaatgcagtggtttccggcgttgagaatggcggcgatcactaaatcggaagacgcaaaagcgaaagccatggaagaagtggaagaagggttgttgcaactcgaggatgcgtttgtttctataagcaaagggaaaccctttttcggcggtgaagcaatcgggtttatggatatttgctttggaagctttgtggttctcttgaaagctagagaaaagtttaaagcagaaaagcttttagacgaatcaaaaactccttctctttgtaaatgggccgaccggttcttgtccgatgaaacggtgaagaatgtggcaccggagatcgaaaaagtagctgagtttctacaagaacttgaggttagagctcaatccgcagcttcaagatcttgagatcatcttagaaatgtattgcaatgcaattgtgttttgtgtacatgtaaaacgaaaataagttgaagttttaaagtgttgtgttcagtctatgctaggatttatgacgcggtgtatgggctacggactattttcagtttatgtttatcgaaaatataagggtcagcccaagattattaggggtcgtcccccctttaacatggaaatctatttaattcgggatcataattatttttggtaactgagataattttggaaatttttcaaaaatctttttaaaaaacttgctttaatattaagtttctattgggttttcacttttcagaccttcacatctttcttaaccaatatgagcccgccgggataatgtgctttcacatcgaaagttaaacgacttatcttgaccactagtacaatttgtctaatagtagtacttaattgaccactagtcctaattaatctactaatttttctgttttacattttaattaatctgctagtactaaattgtcctccatggaccctcttcattgcatctgctcctgataagccaaaaattttaatatcttgaaccaatcaaatttctctggtcagagagatctagtagcacgaatatatttattaacaaaaaagctaacaattattagagaaaattaagtaactaccaaaaagagtaacattgacaaatactttcacaaactcaaaaaaagaaagatatgaaaaatgagtaataataattttaaaataataaaataccttttctgtaaaatagacaaggtcccaaagacccagctcaagtccagctctctgtattcattaagttaccttctaaacattcacaccatctctttctctaaca

SEQ ID NO: 5683 - DNA, 3000 bp, Unknown
  misc_feature (1)..( 3000): cDNA_ID_3078071_gDNA_ID_1620811_Annot_ID_169064 3000 nt of promoter + ATG
taccggggatgaagaaagaagaggttaaagtagagattgaggatgatagtgtgcttaagatcagcggagagagacacgttgagaaagaggagaagcaggacacgtggcatcgtgtagagagatcgagtgggggattctcgaggaagtttaggttaccggagaatgtgaagatggatcaagttaaagcttcaatggagaatggtgttttgactgtgactgtgcctaaagtggagactaataagaagaaggctcaagttaagtctattgatatctctggctaagccaatttagcttgatttgagttctctctgggtcttgactttgtgtgtgtgtgtctctgatgattatggttcttcgtttgattgtagttttaaactaataatcaatggaagctagtaacttgtgtgacaagtaaatgtatggtggagaaatgtgtgtatttggattataatagaaatacctattttcatctagaagctcaggatctagttattgataattagagctcgaaactgagatggatcttattgtttggatagttgttttaactattcaggatcttattgtttggatagttgtttaactatttataactagagatcgaaattgagatggatcatgaatttcattgaaaattaaggctaaactgtttggctagttgtttaactcttaagcatgtatctggagatatctttattcattgtttgattttgacattgtggttcatcttgtttgatggagactctttgtaggaaatcgctttggccaacaccaatgtgaactagtctggccaatttagttaattgattgatcatcatattgtttttggcatttttcagaacgtgtaataacagtgaaggaattttgaggtacctgctcaactgaatcagattcaggagggttttaggagaggtaatatggaagtagcaatgcttaagaaagataaagctagagctcttgatgatctgctgaaaatcgactaaggaagccaatgacaaactcagacaggaaaaaactgtaagaagaagaagaaaataagagaaaagcaacaaagctatggaaagcttaactttggatttgcaagttaagtatttttaaagcaagggaagcattggagaagatcttgttgatatgtcaaccatagcttgaacattgtggagcccaaatgaaaaggtataagttggctgcaaaagatacaaatgaaaactgtggaaaaattcttgaagactgagataagtacacactcaaaatgagtttttcaattctaagactatgtgggaacagcgagaacttcagttgtgtggaaaattgggaacttggcaaagtgaatttgtctgaccttcaggaaaatgagaagaagaagaagcatgtatgaaaaatacacttaaggaacttgaggagaagagtgaggatttgtaggaaagagttggagaagcggagactggaagcatgaaagtcgaggcaaagaaggttgctttagaaaacagaaagctcagagcaatgaaggttttttctcttgaaaaactcgataacttgtcaaaggtatatgaaagcttggtggatacaagtgaagcgtttttaaagcaaggcaaggattggagaaggtcttgttgatatgtcaaccatagcttgaacattgtggagcccaaattaaaagttataagttggctgcaaaatatacaagtgaaaagtaaggaaaaattcttgaagactgagataagtaaacacccaaaatgagtttgtccattctaagactgtgtagagacagcgagaacttcatttgcgcggaaaagtcgggaacttggcaaggtaaatgagaataaactgaaggaacttgaggagaagaatgaggatctgtaggaaagagttagagaagcagaaactggaagcatgaaatttaaaggaagcttgttggtcaacgaagtcaagccaaagaacattgctttagaaaactcagagcaatgtaggtttgttctcttgaaaaaatcgatgagtcgtcctcaaaggtaaatgaaaacttggagtataaactgcagactgaagaagaccgagagcttaattgacaaagaaaccaacctatagagcattactaaagaagctgagaagagctcaggaaaatgaaatttgctggctgaaggaatgaattagacattggttaatacacaaaatgcagagcactaatcaaagattagttgagaaaatagccaaacgcagagtttaagaggaagtcaatggagtcttcttatcataacaacattgaggagttgtcactaaaacttcttattccgggtatttaaatggcttcttcctccgcaacttctcactttccagaacacaaagacttataaacaaaccatccttcacgtatgtgttgaattgaaatgtgaatgtgacttcatcaacacaatgacttcaaaacccaacgacggtcttcctttcttttctcaccaataaaatgtagaaaagaaacaaagtacacaagaaagacttttcatttaacgatatctccactagtagtagctataactaaatggggtcatcgttattgactttgaataagaaatgttcaaacacttcaattattacataatatctttgcaataaaataacaaacgttaaagagccgtcgcattattagcacaaaaaatatcttttgtaaataaaaaaacaacgtaaaagagccgtcacatttgaataataaaacccatcttgcacataaaaaacacgactttttattatttttgattatttcaacaaagtatgaatagtcaacataaagaaaagtccgccttgatgttccttcctcactccctatttatccattttctaatcccaccctcttctcttcattcatcatcttcctcctctctctcttctctgtatcacccaactaaatcctcacgggattagatccaaagtctcaaactttgatccaaaaacacaaactttgttcaaaagacataaactttgagccaaagtcacaagctttcttggtgaacg

SEQ ID NO: 5684 - DNA, 3000 bp, Unknown
  misc_feature (1)..( 3000): cDNA_ID_3078075_gDNA_ID_1620811_Annot_ID_169063 3000 nt of promoter + ATG
agtgttgtggtaggtacaatgagctttcagatttttcagttctgtcgacaggcgtttcgtttgtggtttccattttgtgttatgctgcgagagactagtaaatcagtggagattacgctgaaggatgtttctagaccacgtactcgtctctctagagattgcattccgttatgcgagctctccatgaacttctgcaatattaagtccaagaaaacattcaaaagtcagcacattacagtttgttggatgttttaaaagttaataaagataaatgagatcagaagaaaaggttacctgaaagagatctaacagactggactgctgtttttcgatctgtgtaatctggtgtcttatcagagacaactcttctgcattactctttgcctgagaagaactgctactaccactgtcagttttaggactctcctcatcactactctgaacaacttgtgacttgttcgacccattctctttgaccttatgcatctttgccgggaacagaacccgtttagctcccaatgtcgaacgattccgcttctctttcgacacaacagcttcctgctcaacatccttaggagtgtcaccacgatctaatggctcaacatcattcgactttgagcttaatggtgtgtttaaattcctatctttgcctttcaatgtgttgcttctctttcctgaagtcgcagacaaaccagaagaagctgatttggaggaggaagaagactctgagacctctgttgaatcaccttcaagttgcttccataaacccaatgtacgattcattgtctctctaacaagtttgacctgcacaagttatatatgaagttattaaccaagaacactaaagtcaaaagtgattgcacttcttataaatttttaccataaattgttttgaaattttaccttatcgaatcgtctgctctcaagaatacctagacatgtcttcttatacagtggagctaattcttcttctaccatagccactctagccattgcctccgcagcagctttcctcgcacgccaatcgtcgctgcttagaaactccgagacgtttggtaaaagccagtctagcaccgccttttcgctgtttcgaccgccaacagcgccgattacggttcctatggctccaagaagttccgctttcgccttgaaaccttccgatttaagcaacttcccaatcttcggcagggccttctgcagttgctcaacatccggctcatctgctgcgtctaccgccgcagcaaggcacatagcagcgctgatctgcgcattgggatcgcaatcgtggataaccgtttcgatcattggtccgaaaaggatggagaaaggctgtccggtgatgttggtagtcatatcaacggaagcggcaacacaagcggcacggacggaggaatcaggatcacggaggcggcggagaacggtggagaccatcttcgagaggtgaggagcgagagaatcgccatgagaacgagaaagaacagagagaagcgaaacgcaatgtttcctcaccggagattttgcggaagagtctgtactctgaagacagttaataaataaagagaaagtctccggtgagagattaagagcgattgaatcaagctctgcggcagcgagagcaagagtatcgcgatcagagagacgattgagacaagcgatgactcgttgcttgagatcagtaaccgtcatagccggctgtgaatgagacggagaagaacggatttgaacggaaggcattgtgaaaatgtccggagactttttcagagatccgccatggaaggagagaagaaaaagctttgtggagaaactaagatttggcggcagaaaaaaggctatgaagatgactctactacggttggtacttggcctttttaaacaagactcgtctttggcttgccttttaaacttgtcatatttcactacctgccacaaaatttacatttactattagtttatatccaaaatttctagttttcgtaagactatgtcctttttttgtttctaaacatcgaatatgtcaaatttagtattatcttacaatttttttttgttggtcaaaatattatcttacttgtttctcgttttatgaacgtctttgtacatcaaaacagattcaatataccaacaaggattctaacgtacgcaaggaatagttaagtaaatcctctatgtagtaatgggaaattgttaggactttgaagtaagtatcagagactcgtgtataataaggtattcaaagtcaggaagataataaaatatttgtgtaacttggtggccacttagaagaagaaccaagaatatacaagcaaaaaggaaaaaaaactagattccgtaagattttcttttatttcaatcctgattataattaaaagaaggaaactatatccacaaccacaatgttacacatgagctaatgagcaagtcaagcaaacacggtttcttaacgcgtaaccaaacgtgaaatgaactattctttctatttttctcaatattaggatgacatatatactgttatttaacatctatatatctaataacaaactaaatcttcgaatcatacttttctcaacaaaagattgcattgataagttcttaatttaaaatatttatgagtacatccaagacaaagaatagttctctattttcagagaggactgcatgtaatggtagtaatcatgttttctcttaggaaaaaacccgcacaacgtttatgggaaacatgtttgtgtttgaataacctttatggaaaaacaaaaatatttagcaactgattaaaactctttacacggctcatatttaaatattgggcctttagagcccattatggcccataaacacacaacttggaacgcttctagacttttctggatttgcctcatttctagaagctctggagatttcttcttcatcaataaatagaatcagcaaactcaccagctttcatcataaattcgaaattcaattcgtcggaaaattgttcagatttcgaaatcaaccgagaaa

SEQ ID NO: 5685 - DNA, 3000 bp, Unknown
  misc_feature (1)..( 3000): cDNA_ID_3078079_gDNA_ID_1620811_Annot_ID_169057 3000 nt of promoter + ATG
aaaagatggctcctcgtcagaagaaacctaacaagtctgatgatgatgatgatttgcgtaggaagaaacagagctttttcaaacagagatttccaggctttaagaagaaagcctctgagctctctgttctctgcggcaactctgtcggtttcatctgttacggtcccgacagcgatcttcatgtttggcctcagtctcaagatcataacccacaagccctacatgagatcgttgccaagttcaatgccttgagtgatgagaggaggaagaatcatgcatgtgatctcaatgacttccctcatcatctcaagggtttgtctcgtgaggagttaaggaagcatctccttcaccttgactctcaattacttggagtcagggaacaaaagatagaaattcttaagaagacgctcacgggttcttccgaaaaagatggtgctagggtttcagagaactcggccatctccgatcacaagttgaagatagagcctcatttgaaggatatattgtcggaagatcatctaattagggtttcagataagaagctgggttcgtgtgatgtatttgacgagttggcttacgtggtccgcgggtcaaggaatttgaacgagaatgtttccaagtacgaatcaaaagatgcagataacacgggactggatcatcttgtaactttaggcggtgattatcttcaggaggcggcagcagaactttaccaaacttacaatctagggaatttttgtgatgatcatgtttgggatctggagtttgcctcaagactaccactacttcatacttttagcgatcctctcatgaccaccaatacttgccaaacgatgagcaccgatatgatttcaatttgataacttgatgactacgttagtgaaacatgtttctttcaccttttctcggtgattgatcattttttagtatctaaacttgtatgtttgctccaacacaaatctatttttgtaaagttttggtagtgttttcttgtttattattgattaatcaaacttttcctttctttctgttacttaaatgctgggcttgatagtagtataagaaatttgtccacaaagcacaccgcaaagttccaaaagctaaaacccttgtaccttggagtctctgcatgtgagaaaggaatatgagagttaaaaagagttttttcgtaagacaccaaatcatctacaatgacgatgagcgcaactttctatcagtgagcttgcaagctagcgttcttgacttcagaaatgtgattatgattaatagttgagttaatcttccttaccaactttaaagaaagaaaacaatcactatgtcatacattcttcaggggttaaacatgtcggatatgaaagtaaccaaaagaatcctcattgagataagcaagtaataccttccaacctgcgaaattgttcttgtctggtgattctaaacagaaagaatcttattcttgttttagctcttttgttctagactagacactagtgaaagtgaaatttcaagaaaggttacaggatcataccttttgtttggtggaaacagaggattctgaaattcctggctgtggtcacatacatacatcaatcacatatttactagtttctaatgagaaagttcagcttggattcagttcatcttctctcatctttaaggtccgaactatgtccaaactttggcaatatatttcaacaaagactctaacattcttatatgtgagtatgtgacgttgtatctcagtaacttgctcatccaactctctgcgaatattcagattcttgattcaggagctcccaaaacttcggaattccaaatgacgtacacaattgcctaaaacacaagtctcctgcttaaccatgaatagttgagtgaatcaaaatctcactgaacaacgttgtacaagaaatcaaagttcacgatcaaacttacaagcatatccatgaagataaatgagcgaaaactaattacttggcgtatatatcagttttgacgtttggagctgggaagaaaaatgaaactgcaaatcaaataatgtcaccacattaaattatttctgatcgtgtcattattcaactgatagctgttattatttctggtcaacctcttatttgttgtctcttagtaaaagttttcttctagattgaacaatgttttaaaattttgacaagaagaaaaattaattgtttaccgatttaaagacaagaaagatctaagttagtgtatatttaattaatgcagctttagttttttttgttatttggtattttgtcaacaattttttttttataatataatgttcattccacgatcttcggaattgtgcacatccgtcgttcaccaacataattcaaaggaaccagccaattaaacttagaaaaatattgatgcccatgtcacaacaacgaagaccgttgaaacgacggtgttttacacagccaacgaacaagtccagcatggcggtttttgagaaccaataagaaattaaatgtattgtttactctctagagtaaatttattaatttttaaagaattcataatattccataaattaataagtttactagcaacaaaaaggtctgaagtctgtatctgacgatcacgcggcctaattgcgcgtggcaatttcttcaacgcggattttttttttcctgccatttcttgcatcaacgcggattaaaaaaaaaaaaaaaagtgttttcggtaataacccgaaagagaaaatacgtatcggaaaaaatgcaaaattttcaaaaacatttaattttaattttaatttcaagccaaattcgggagcgactttccaaagacgaacaaagccattgaaacggaagagaaggctgctcctttggtcctctctgtttctaccgtcgattcagatctctgcctctcgcaatcgaatcaatttgtgtaacgaatcgacgcgaattatagtggtgaagaagtcgacaattcgattgttgtgtaagttgacgagaggattggatcggtgtgaattcctcctaa

SEQ ID NO: 5686 - DNA, 3000 bp, Unknown
  misc_feature (1)..( 3000): cDNA_ID_1829093_gDNA_ID_1620811_Annot_ID_169046 3000 nt of promoter + ATG
aaaaggttcagagagaagacgattccacccaaatcatcaacgaagagctagttggttgcgttcacgatgtttccttccctgaaaattacgttcctcttgctccctccgttcacaataaaccaccagctaaagatttcccctttacacttgactccttccaatctgaagctatcaagtgtctcgataatggcgagtcagtcatggtaagcttttactctggcttcaattgattttggtcactgaatttctaatctgtcctattgaattggtgaatcaatttgtaaagattacatattttggttcaagctgtgaacttttctagttttgtgagaaaactgaagagtatggtttcatgttcaggtttcagctcatacatcagctggtaaaactgttgtggcgtcgtatgctattgccatgtctttgaaggaaaaccagagagttatttacacttctcctataaaggcacttagtaatcagaagtacagagattttaaagaagagttttctgatgttggtttgatgactggggatgtgactatcgatcctaatgcctcttgtcttgtaagtaccttttaaactgttcaatgttgtctcagaagtttcttttatttgctatttgttcttagttttgtgttctttgtttcaggtcatgactacggagattttgcgtagtatgcagtataaagggtcagagattatgcgggaggttgcgtggattatttttgatgaggtgcattacatgcgtgatagcgaaagaggtgtggtttgggaagagagtattgtaatggctccgaagaattctcgttttgtgtttctatcggcaacagttcccaatgccaaggagtttgctgattgggttgcaaaggtatttcactcttgctactccttctacctctcttttgtgaatggattgatacatttttgtatcaacttgtaattatgatttcacatcaattatttattttggaggaagtagaaacatgtcttggcaaaatgcaatatagttttcatatgtcgtgtttctttgagtagacttagtaaaacagcctgtttataacaaatgattttttttttttttttttttttttggcgttgttgctctggagatttgattatagaattggtattgcaggttcaccaacaaccatgtcacattgtttacaccgattatcggccaactccacttcagcactatgtctttcctgctggaggtaatggactttacttggttgtggacgaaaaatctaaatttcatgaggatagcttccagaaatctctcaacgcactggttccgactaatgagagtgacaagaaaagagataatggaaagtttcaaaagggattagtgattggaaaacttggtgaagaaagtgatattttcaaattggtgaaaatgataattcagcggcaatatgatcccgtgattttgttcagtttcagcaaaaaggaatgcgaggcacttgctatgcaggttagtttcctcttcttctgtttgtctaatgcaagtaaataaatcatttaccgacaaattttttatttgacttctttcaaaatccctggatctttaccctgtcatatgagaatgtcatctcattttggggatgttatttttttgtaactattagccaaacatgaatctgaatttgtttctgctgaaataagaaaattggtccagaaagttaggtgtttttttagtttgtcttcttcttatgcttgggatcagtcttatccttttaaaattgatattgggttggagtgactgtgataagctcctggagtcttatgtgaagatgcggtacctatattatactgtatgagttggatcgcaaaagaagtcctcacttgaatcaagacttttctatagtactgttcccaccactgaattaaaaaactttcgtcattcttaatcttgatagtctgttattacattgcagcaacggtctcttcaatctctatattttttgtttgtatagactgttcaaattttgttttttatgatttttctagtgtgtttgcctgcaccttgtagtgcgtactctgtggtgtgttttattttatgtgtattttacaacctgaagttcattgtctgcgtactgtgggtcttactgttaaaacgtgagtctaatacctgtctgtttgttccacagatgtctaagatggttttgaacagcgatgatgagaaagacgctgtggagacaatctttgctagtgcaattgatatgctttcagatgatgataaaaagctacctcaggcaagcattcattaaagctctttctaagatgcctgagtgtttgtataatgcaccttaacctatatcttttgtgaatacttttcacaacttcttgaaacatattgtcatgttttaatgttgtgaggtatctgtgcgctaggatgatcatgtgcacatctctgtaggaaatggctagtattattggcttataagtagtagatttcccaccaatctcgcctctattatctcaaattttatattttattttgtttgccttgtagccggctctcctcttgcacaaaaattgatttttccctagatattaatcttttctctaacatgtaacatgtaatagcttatattccttacatctgatgttccataaagggtcatcttggtgcttgtttagttgatctagtttcagatgcgatttggcaaatatatttgtcctgcagcgaaattgacatgattcatggcttcatgtactgcaggtgtcaaatattttacccatcttgaaacgtggtataggcgttcatcattcaggactgcttccaattttgaaagaagtaattgagatattatttcaggaaggtcttattaaggtaggtgaaggcgtagaactacaattttcatattgtcaattcttgctaccttttgttatgtaattttgtgatgttttcctttagtttgaagtattgccactgaagtttgaagtattttctcttagtgtttgtttgcaacagagacatttagtattggattgaacatg

SEQ ID NO: 5687 - DNA, 3000 bp, Unknown
  misc_feature (1)..( 3000): cDNA_ID_1829097_gDNA_ID_1620811_Annot_ID_169045 3000 nt of promoter + ATG
ctatatattattttgaagattttcactcaatgcaaagatgaacctcaaaattacttttatcaatgacacatttttaaagagaaaatatataaagatatgaaagtagtcactagggactatgtaatcaattgtgctatttactgtttaaacacactaaaatatatagttttaatgtaattaagtaatcctacaactttcatgtgaaaattcctagtcaaatatttcacgtagtgagttatttaaagtaaaacagaataataggtatgcttatacgggtcgagttgctttattatgaatatgattatatgaatcaaaggatatgaatttatatttatcaagttaccacgttacgaccaaatttgggttatgggtttcaaatcttgaacggttcatggtattccgccgcttttgtcctatcaagtatggacacatttttcaaaagtacgctggtgccgaagtagtttgttgtggccttggttaactgtaccattaatgcgtgtttataaactacatgctaactctaataacttctcatacattcacatcaaaggacgatgagcctcatatacatacatagtgatcagagccatcctctaagcaaaaagactatcctttttaaaaaagagaatcatattaagggcaaaaattaactttcaaaaataattggccaagaagcgatgactaatgtttttgccaaaaataaaacaaaatctcaaatctcaaagcctgtttcatatctcttttaagaagagagaaagaaacttaggattccagaactaaacgtcgaaagttcttagatatcttatttcaaagggttctcctctgtcagaaattctagaataacagattatttcatcttaggtggactgtcatttcttctaactaggctagtagcaaatcattatgcccaatttaaagctaactcgctctccatctccattcgattagattagtagttaactttaaaccaccaaaaaattttatacatttatttgttagagaatatttggaagaattgggtggtctcgctttgtgccgctttcttagctcaaggatttttggattctatctacatgaacttcgttatcaattttgatgcttgatatttttgcctagagtgtttcagtttttttgtttttcttttctttttctagcagaattgtcacatgttatattcatattttgagtattttctaagaaacaattaggatgctacatagacatatttttgaaaagaattaagaaaaagtaataggttttggaattttgcaaaacaagcgagaagatgctacacttgattgttttcaacaaaaataccctcagaaataatggatgagattcacatgatagcactaaatcgctacaaaatctcttcactagtgtctcctccatagtcaaatccgagctccagataaaaacattacagattcatatgacaatattaattttgtcactcatatgaatttggttaaatatataatctaatttgaaaatacaaaaatcatgattcatgatgcacctttcaattcacataatgttgaaatacagaaaaaataattactctctcatttctttataatataagttttagaaagaaaccaaaaattgtctcataaagataaatgtagatttttttttaattttatctcctattaactagggttgaattaataaaacaactaatgaatatttattaaacacgaatatatttgtagtagtaaaaaaattcttaatatgtatgcaaagtctaaaaacatacaagttcactaatctctactaaattaacagctaaacccaataaatccgttaattatggctagtttagtgaatttttctcaaagaaaagctcttttttcaaagttaaggagactagagagcaagtcatttgcttgtggttggaaacaaaaacccaaagcgacgacacaattaaaaaaaaatataaagaggagaggagaaaaagaggcaagccatagccaaagggttcgtgtcggcttcaaccaaacactgacggtgtgtgtatacacctttacatacacacctttatctctctctctctcacatctttgttacaaatcaatcttctactgttttctttttcctcttcttacattattttttgacagcaattcttagtttctcttctatcccctttctgggttttgtttgaaccctagctcgctttggatccagtggttttaagttaaaggttcgatttttatttctgggttttgcttgttttgcttggttctgcttagtaaatgttggaaaaggaggagactttagaggatctgtagtcagatttgagctgggtttgtcgattttactaggattttgattttggggataatctagatcaggaatcgttactttgtttcatatccaaaattcaactctttttctcgttcctgatctaaaaatcgttccttttcaagctttctaaatgaggtttctctttggtggttctgaaattttgtctgtagctgttgtgttcttctcttagatttgattctgtatgataattttaggttctgagtttgaagtcttgtcattgtagagatggttttagtaacagttttggtgttgctttgtgtgaagttattaaggactaaaatctgttcatttttggtatgttattgagcaggttcttgtcttgcttttgctttatttgttctttctttttacctctttgtttgagtgattattggattttctcttcaaattgggtaataaaattttgagaatctgagtcttgtgatgtgctttagacacaatgtagaacaaagcagttacataaatggcccacatttttgtcagtaaatttatgaatggggttttaaatgtttctacataataacatctatcagagttttgtttgtctaaattagaggaggataggtccatcttcttcttttctctttcagaataacatttcaatcttatagttttctcttcttttgttttgttgcccaggtaaatttatcgaaagtaagtagattccta

SEQ ID NO: 5688 - DNA, 3000 bp, Unknown
  misc_feature (1)..( 3000): cDNA_ID_3078100_gDNA_ID_1620811_Annot_ID_169042 3000 nt of promoter + ATG
taataagaattttgaaatgcatataaaacttgcacatgtttctcctttttgatgtgcattcttcaatgactaacataatctcctaaatacaacaacatcatagcatttgagtctctgaaaaaatgaaaaattatagaaataattgaaacaattagtaattaatgccaaaacagtttcaaagtcagaaatcagaacaagaataattatacacgtcttagattggtatatataaaaataggaagctctttacgttgcatttgacttttgtttttaaggataatggaatcatactgtaatgttaacaactaagcaaaaatgtttaagaaaatggaacaataatgtaatgtttagaagaaaaaaacaacatgataaattgatatgatgtcttgtgggttttaattaaattcataccgacaacctttttgacttgcttctctgtctttgtttctacccacacagagatcaaaacaccacattgctgttaatctttaaacaaaagaacattaaaaaaaacacttaatgaatattccttaaatctaatcatttctattcaaataagtgcaacacactccaaacacctaacctgccgattccttcatacgatataccttttgtattagattagattaattaatagttggaatagttccatgcgacagtaaatcactttgataccatcggctttttagataatagtaggctttattgaattaccgacaagtggaaaaattttgtatatgcgttttaaattttagatccttaatcttgtcttatgctttagtattatttatttatttttctttaatatttcaaaattattgacctctgcagcagaaggcaaagacgaggtttcaagtaaccattcccatgatttgatattgtgcatttttacccaagtcaacagccattattcgtcctcacattagccaaatctgatcaatccaaagaatctggaccgcttcgttgttttctactatctaagacaatgtttctctctcgcatttcttgctaaaaagctcattttctgatttgtgacaaaatgagattttttttaattaaaatattatgactaatctctttatttcttataaaatattatatcttaaacattacaatttttctaacctcttatatcacaatttatttaagcagttccgtaaatttttcagtcatcatttttcgtggatttgtttttttttttttacgttccaatcaccaaccactaccgtcaagcacccaagaaagttgcattagttttacactgacaaatcgtcggtaagcacgtcacaattttttaagtcttaactaagctttttgccatatacatttccacaaaaactgctttttattgtcattttccaaaagcatatatttgtccatacatatatatctatatcaaatgcatgcgcaaatgtatcatctaattagtatactgagcttgaaagaggataaattttgtaaagagagtcgtgtagaatgtggaacatgaggaaaaaccaaagtggcaacccataaaatgttagaatattgctaagaaaacggaatcgacgaccagatttcagtgtatgaacaaaagaggaagaaaaggaaagtgaaagacaaaactaagattaaaatgaaggaaggaaaagaaatagtacgaaaatggatgtacttaaccccaaaaaaataagattatgtagctaaattttagtttaaccaattattacaatattcgtaaattttaatgtagcactaatcaaattttttttgtgacctcataatttttaacttttgcatctgattactatattaacacatgaacataattttattgacactagaagttttacatgttttcgtgggcgtcgttaccgatcatgttttcatgtagtcaaatggattcagaaaaacatgaggtataaaatagtaactccaaaattccgaggaaaataattttcaagtggccaaaacaaatattttctagtatttaaattacggaaaatgaaaaattaatgacatgagtttagagtaaacccagcacatctaaaatgacaaagaaagcgggtcaatcatctgaaaactgcaatttagaagcactattaactagtatgattgggagctttactgttatttttagctagagaatttaaaattaataattttgttccggaagatttaagatgtttatcgtacaagaaagtgtttaataatgtgtatcatgtattagacctaaataaagtatgaagagacagtgaaagaaaaacagagtatgatagcacaacacaaaagcaatacaaatataattaacaccatccttatcaacaaatacactgcgtcccttaaatattccactaaattacaaccaaatactttaaacatgcacgatagtgagctgtatcttggaaattcataaaaatgacataaacttttgactcatatatatacgttgaaaaagtatttgaaagtagactgaccaacaagtaaccatcaagaagcataaaatctaaaatatctattgtatttaaccatcccttatgcccatcattttcacaaacccacacatatacatacttatatactttataacattccaaatttcaaccgatctatcataattaggcatcaaattaaaaaatggaatatttgtggtgggagagagatccacatcttttgtagaaagtgcgtgtggggctaaacttagaaaaaaaagcaggaatagtgagagaggagacacacggcgttttcgtttctgcctagaatctacacttagtgttatacgtaaggccaaagagtcaacgactttggctccctctcttcacctcttctctattataaattgaagggccaataacccaactctatttgtcctcaaagatagtaaagaagccaaataataaccaatctttcttctatcttctctccctcaatatctttctctcactctctgatctccctggcacaactaaagtagagatatagagagagaggaactttggattgtttgtgtctttgtgacag

SEQ ID NO: 5689 - DNA, 3000 bp, Unknown; identical to SEQ ID NO: 5682
  misc_feature (1)..( 3000): cDNA_ID_2993959_gDNA_ID_1620811_Annot_ID_169030 3000 nt of promoter + ATG

SEQ ID NO: 5690 - DNA, 2305 bp, Unknown; identical to SEQ ID NO: 5681
  misc_feature (1)..( 2305): cDNA_ID_2053753_gDNA_ID_1620811_Annot_ID_169029 3000 nt of promoter + ATG

SEQ ID NO: 5691 - DNA, 3000 bp, Unknown
  misc_feature (1)..( 3000): cDNA_ID_2053649_gDNA_ID_1620811_Annot_ID_169078 3000 nt of promoter + ATG
aacaccgtccgtttcaacactattggttcgggtggaggagacgcagcagttccaagagctagaaccggcatcaagtgatgaacggatccgatagggaacgtaagagctgacattggtgaaaagaagcgccaaaaagtcaaagaaagtttgctacgagaaaatcgtttctcattggctcaatttatactcactacttcgtggccactagccaccatggccatcaaaaacaagtaaagaaaaaaaaacatgtcacgagtggccatcaaaaaaacaaaacaaaaataaaaggaggatgccacgtgtaacccataacctgctacaagaggtgaaccgcacctccaatcatttgtctaatttcggtgtcgtgtccaagttccccggtggctttgaatttatccatcggtattggactaggttttggatggattcaaccctttgtcattttcattgagttactttctaatagtgtgtacttgttaaaaatctcaattattagtgttttatggctttgttcggaacttcgttgatatggacaatagagcaacatgttccttggaacacaagatagtagaaagcgaggtgttgaaatttctcccctctcccgctgttaaatatttttggtggtttgtgtattgtgattgtaatttaaaaatgattaataaggagcaaatgcccttagctttctcccatttcaaatttagggtttagacccataacctaaaatgtattattagaatcctggtcgtgaatccaatcttattagccaagttctactccacttccgtactacgctgtgtctaaatgacaaatcgtttatgttggagatagtccttattcattattcattatttcattattagagagaatgacaagaaaatcattgtgacgaatgataattgtgccgttttcaataggctattttcacacaaagtgatcagatctccccgtcccacatctcggcgacagatttgatgggacctttcttagaggtataaacctctccgtggacgtttctgaactgaggaatctcagttgaaattctctgtgtctcatcctctgtcaaagaccaatcaaatatctttagattctcttctaatctctctttggtaaagctcttcactaccatgctcactccttgttcataagcccatctcatactcacctgtaattacaactccaaatatgagctttgaactccatggatatagctgatgaatacatctcaaatttttctgttgagattcatgttaccaagatagtgactgactattgatggtgataaattgataataactgataaacgtccccactttttttttttgttgttgtaaaagttcatataaatgtcaccaattgttttttgtatttttcttgtttgatagtatcgtttaagaaaacttttgaaagtacctgggccactgttttttcctttgcttctgctatttctttgagaacatcagattccataattttgggagttccccaaaaagctcctctagatcccaacaccgagtacgctgtgacaacaatgtcgttcgatctacaaagctcccttagctttctttgttgccatattggactcatctcaaccttgttttcatccataaaaaaaaaagaagggtgaattggaattgtttgctgaaaaagaaatcaaagagtaaaaaagtagtgtttacttgattgacgctaggcgggattgtcgcgatagagagtatgtgttgaagcttcttacatgaaaaattgcttactcctatgcattttgcgagcccaagtctctgacactcctccatttcagaccacactacttcgaaatccattggcataaaatcatcttcatcaataggaaacttgtatttaccaggtttcgagctaaccggccaatgaattatataaagatcaagatagtccagtttaaggtttctgcaaaaccatatttgttacacaggtggtttacattaagttatgtcactcccaaaataatattcaatcatgaaacataattgacacggtgactgatagagaacctgatccatagagatatgtgaaatagttttctgtatttctcaatcggaaaagtgtttacaagtatgtttgtatacatctacactaaaccaactaaaccatatacaatcacaatttaacttaaccggaatcactaaaccggactatcatatatacagttcgaatagtgacacctactctcagtgattgaaaccgtgcattctaatttcatgtgaaaatcattaaggaatctaaatcttacttcaaactccgtttgatcgccggtacgacgagaccaccatgagcatcagcacaccaaagtttggtagtgacaaagaattcagatcgagatcgaactaagccgagtgaaaccgcctccgctaaagcttcgccgatcggctcctccgtttggtaccttggagaggtgtcgaaatggcgataaccaagcttaatagcctcaatcaccgtctctttcagcatcgttggttccggtagcggagaagcggcggttccaaaaccaagaaccggcatcgagtgatgaccggatggtccggatctgatggcgagcgtagggactgtggttaaagacattggttaaagagaagtcaacgaaagtgtgctctcagaaaatggtttctctcggtggcccaaagctttactcagtagccactgactaatgctagtgcctgataatattatattaatatactctctttgattagaaaagtacgtaagtcttcatattataagtttataacgctatataatttgactataaattgttaatagaaagtagtcatgatattatatacgaaaaatatttgaattagtattctttaatattgtttatttggaaaacttttaaagaataatatgttatgtaatttgtgctaaaatttcaaaattttaatatgtaaatcaataatgaattaatataagttgttttcagctttttctcaaaagcatgtcacgtatgagcattaacacccgtgtggaaaa

SEQ ID NO: 5692 - DNA, 3000 bp, Unknown
  misc_feature (1)..( 3000): cDNA_ID_1829042_gDNA_ID_1620811_Annot_ID_169076 3000 nt of promoter + ATG
gattgaagagacgttagtgtagaattttgctgagattggattcactgtgaagaagaagatcaaaatcgttagaagaagtgttctcatttttatagtatatttttgggaagaaaaaatatgggagaagttacagaaaaaaatgaagatgaagagttaacgacgtcggtgtgtttgttttatgaagctaaaatgcttagctcacttggctccatttttccacacgggtgttaatgctcatacgtgacatgcttttgagaaaaagctgaaaacaacttatattaattcattattgatttacatattaaaattttgaaattttagcacaaattacataacatattattctttaaaagttttccaaataaacaatattaaagaatactaattcaaatatttttcgtatataatatcatgactactttctattaacaatttatagtcaaattatatagcgttataaacttataatatgaagacttacgtacttttctaatcaaagagagtatattaatataatattatcaggcactagcattagtcagtggctactgagtaaagctttgggccaccgagagaaaccattttctgagagcacactttcgttgacttctctttaaccaatgtctttaaccacagtccctacgctcgccatcagatccggaccatccggtcatcactcgatgccggttcttggttttggaaccgccgcttctccgctaccggaaccaacgatgctgaaagagacggtgattgaggctattaagcttggttatcgccatttcgacacctctccaaggtaccaaacggaggagccgatcggcgaagctttagcggaggcggtttcactcggcttagttcgatctcgatctgaattctttgtcactaccaaactttggtgtgctgatgctcatggtggtctcgtcgtaccggcgatcaaacggagtttgaagtaagatttagattccttaatgattttcacatgaaattagaatgcacggtttcaatcactgagagtaggtgtcactattcgaactgtatatatgatagtccggtttagtgattccggttaagttaaattgtgattgtatatggtttagttggtttagtgtagatgtatacaaacatacttgtaaacacttttccgattgagaaatacagaaaactatttcacatatctctatggatcaggttctctatcagtcaccgtgtcaattatgtttcatgattgaatattattttgggagtgacataacttaatgtaaaccacctgtgtaacaaatatggttttgcagaaaccttaaactggactatcttgatctttatataattcattggccggttagctcgaaacctggtaaatacaagtttcctattgatgaagatgattttatgccaatggatttcgaagtagtgtggtctgaaatggaggagtgtcagagacttgggctcgcaaaatgcataggagtaagcaatttttcatgtaagaagcttcaacacatactctctatcgcgacaatcccgcctagcgtcaatcaagtaaacactacttttttactctttgatttctttttcagcaaacaattccaattcacccttcttttttttttatggatgaaaacaaggttgagatgagtccaatatggcaacaaagaaagctaagggagctttgtagatcgaacgacattgttgtcacagcgtactcggtgttgggatctagaggagctttttggggaactcccaaaattatggaatctgatgttctcaaagaaatagcagaagcaaaggaaaaaacagtggcccaggtactttcaaaagttttcttaaacgatactatcaaacaagaaaaatacaaaaaacaattggtgacatttatatgaacttttacaacaacaaaaaaaaaaagtggggacgtttatcagttattatcaatttatcaccatcaatagtcagtcactatcttggtaacatgaatctcaacagaaaaatttgagatgtattcatcagctatatccatggagttcaaagctcatatttggagttgtaattacaggtgagtatgagatgggcttatgaacaaggagtgagcatggtagtgaagagctttaccaaagagagattagaagagaatctaaagatatttgattggtctttgacagaggatgagacacagagaatttcaactgagattcctcagttcagaaacgtccacggagaggtttatacctctaagaaaggtcccatcaaatctgtcgccgagatgtgggacggggagatctgatcactttgtgtgaaaatagcctattgaaaacggcacaattatcattcgtcacaatgattttcttgtcattctctctaataatgaaataatgaataatgaataaggactatctccaacataaacgatttgtcatttagacacagcgtagtacggaagtggagtagaacttggctaataagattggattcacgaccaggattctaataatacattttaggttatgggtctaaaccctaaatttgaaatgggagaaagctaagggcatttgctccttattaatcatttttaaattacaatcacaatacacaaaccaccaaaaatatttaacagcgggagaggggagaaatttcaacacctcgctttctactatcttgtgttccaaggaacatgttgctctattgtccatatcaacgaagttccgaacaaagccataaaacactaataattgagatttttaacaagtacacactattagaaagtaactcaatgaaaatgacaaagggttgaatccatccaaaacctagtccaataccgatggataaattcaaagccaccggggaacttggacacgacaccgaaattagacaaatgattggaggtgcggttcacctcttgtagcaggttatgggttacacgtggcatcctccttttatttttgttttgtttttttgatggccactcgtgacatgtttttttttctttacttgtttttgatggccatg

SEQ ID NO: 5693 - DNA, 3000 bp, Unknown
  misc_feature (1)..( 3000): cDNA_ID_1829054_gDNA_ID_1620811_Annot_ID_169069 3000 nt of promoter + ATG
gattacaatttatctttaaatcaaaaggttatcgttttatactcaatcacatgcgtacacgtaggagtggaatagatacgctatccgaaattcaatgttatctaaaagaaatgagtccaacaaggaaattaaaaccctaatgggtcatagcacatttcctttactatataaacaatcttcatgccaataaaacaaagacccataacaaagactagaccaagaaaaagatggatcaagaggcttttttgcgtgagaggattgaaaaagcacaagcgcaattgcaaaagctgcgtgatgaaaatcgagttttgagggctcgacaaattatgtggggttgtatcgaaggaactattgatgtgtgtcaactcggtgaaaaggatcttcaagatttgagttctgttattgatgactatctcgatagccttaaaagcaggattgagtaccttaagaagaatggtgagccttcttcttctttacctcctcgtgttcttcaagatcttaatgttaaagaggatggggacattccttccatggatggcagccaccaccagtttgaaactaatcgtctcactaccatcactaccaccgctgatgcttgtgcgcctaacatcacaaataatccttagtcctatggggatttttgtccgattgaagaatttaataatttgtatttctgtttttatcattttaaaatttaaattttgaagttatgttttattatgttttctgatttttgtaataattaaagggttttcctttaaatccgtgttatgttatttgtgattattaaatcatgaatttgtttggaaaagttttaattttattcagagaaaatataatcatatagaaaattaatcaatagttgtaacaatttgtcttctataatatgaaaataaattagtagtactagacaatgtataccatgtaagaaaactcaagacgaggaagaaacattttcttttgattactgatttctgtatgtgggacttgaaccccaaacttcttggtgtaaaagcattaatgaattcttaatcaatcaatgggccaaagtggtttccatggaaaattattttccagtttacaacccaaataaaacatctttaaatcttgcatatgaaaatcaaagataactaacattttaaacaatgaaagcaatgagcctttgtataaacataacatacacctttttgtttgctcggcccatcaaggcacactatttgtaaggtgtcaaattttgttggtctagttatacatttacttttgtttaggcccactaattcaaaacatattataatttccaaatctcgaagtgcgtggtggtggatagtatttagcatacatttacttttgtctaggagcattagatcattagatagattatcatatctcgtctgaatcttagattaatgtttttgagtataagaaaccgatattgtaatttgtgaagtacaagttatcaacgttgtttgatggtgtgatgtccacgtattgtttcttattaagaaatgctttttctgtagcataaaatcacacccaaaagaatcatatattcatttcatgttttatttgttaaagtagcagtagctagcacattatagattataatggaagttatacaaatttgtacttacatctttaaaaaaatttatggagactgaggaggctgatgatgaagactgcccctagttaccctagttagtatggtcgacgaccaaatttgtttttacattatacaatgtcgtttatcaaatcatacataaaaatgtagtttttatacataacataaactatagttgttcatggatataaatagaatggtattatttatagaaaggtacatgagtatacacacatcattttaaacatactatcttacaatatttgtcacatagtatagtagtgacattatcacatgtattgatatgaaactactgtagcacaactaatccatttttttttttaccatttcttacacgtgagcgtcttgatctacatagctatttgatactagactagtacatttattagtttactaacaagtacaacgtttaaactggctatcttcttaaacataattatcaaaattttgatgtcgtccattaaatacaccctttaaaattaaggatcatcgcttcaatgtcaaatactaaagatttcgaaatctttaccacaaaaaagtttcgagaagtcttcttcgactttataacagatgaagatgggaccaaaatggtttttaataacctctacttctcaactaccgataagcaacaacgattcacaaaagtcaaacattccaaaattacatttacacttccgattttctcttccagatttcggtttcttctagaacatccacattacccaaactattacaattctcatttattctaaagcacaaaactgcaaaaaggtcacatgttggttagaacttagaacactgtataaagaactagtaaattggtaggtttaaaagatgtatgaatatataacttactcttaacataaattatgacttgattttgcgttcatactcacgaaaaagacataaaagtcaacgcgtagccgaagatttagatcaaagaagtcaaacattaagacatcttccgttccaaattcggacactaacccccaaaatccacgacctggtcaacgcgtcggaataatcaaaatgacgaaaacgcccttgtcgtttcacgtgtcaatgccgagtaaatggaggttgttttcgtaacattagccacgcttttgacattggaccatatctcatgtaagaaaagcttaatttttatttttgttgctttaccaaaaaataagagaggaaaacataaaaaccaaatcattaatgtgttaaatcattaatggttgtcatgttcatcaaaaatcattcccaacacatttcttcttcgttgtcaaaaatacatcagaacgttctgatttcgccgcgtgactcttatctccgtcaacgccgataaattctccggtaaagtaaccgccgcgatg

SEQ ID NO: 5694 - DNA, 3000 bp, Unknown
  misc_feature (1)..( 3000): cDNA_ID_3078100_gDNA_ID_1620811_Annot_ID_50588 3000 nt of promoter + ATG
agccattattcgtcctcacattagccaaatctgatcaatccaaagaatctggaccgcttcgttgttttctactatctaagacaatgtttctctctcgcatttcttgctaaaaagctcattttctgatttgtgacaaaatgagattttttttaattaaaatattatgactaatctctttatttcttataaaatattatatcttaaacattacaatttttctaacctcttatatcacaatttatttaagcagttccgtaaatttttcagtcatcatttttcgtggatttgtttttttttttttacgttccaatcaccaaccactaccgtcaagcacccaagaaagttgcattagttttacactgacaaatcgtcggtaagcacgtcacaattttttaagtcttaactaagctttttgccatatacatttccacaaaaactgctttttattgtcattttccaaaagcatatatttgtccatacatatatatctatatcaaatgcatgcgcaaatgtatcatctaattagtatactgagcttgaaagaggataaattttgtaaagagagtcgtgtagaatgtggaacatgaggaaaaaccaaagtggcaacccataaaatgttagaatattgctaagaaaacggaatcgacgaccagatttcagtgtatgaacaaaagaggaagaaaaggaaagtgaaagacaaaactaagattaaaatgaaggaaggaaaagaaatagtacgaaaatggatgtacttaaccccaaaaaaataagattatgtagctaaattttagtttaaccaattattacaatattcgtaaattttaatgtagcactaatcaaattttttttgtgacctcataatttttaacttttgcatctgattactatattaacacatgaacataattttattgacactagaagttttacatgttttcgtgggcgtcgttaccgatcatgttttcatgtagtcaaatggattcagaaaaacatgaggtataaaatagtaactccaaaattccgaggaaaataattttcaagtggccaaaacaaatattttctagtatttaaattacggaaaatgaaaaattaatgacatgagtttagagtaaacccagcacatctaaaatgacaaagaaagcgggtcaatcatctgaaaactgcaatttagaagcactattaactagtatgattgggagctttactgttatttttagctagagaatttaaaattaataattttgttccggaagatttaagatgtttatcgtacaagaaagtgtttaataatgtgtatcatgtattagacctaaataaagtatgaagagacagtgaaagaaaaacagagtatgatagcacaacacaaaagcaatacaaatataattaacaccatccttatcaacaaatacactgcgtcccttaaatattccactaaattacaaccaaatactttaaacatgcacgatagtgagctgtatcttggaaattcataaaaatgacataaacttttgactcatatatatacgttgaaaaagtatttgaaagtagactgaccaacaagtaaccatcaagaagcataaaatctaaaatatctattgtatttaaccatcccttatgcccatcattttcacaaacccacacatatacatacttatatactttataacattccaaatttcaaccgatctatcataattaggcatcaaattaaaaaatggaatatttgtggtgggagagagatccacatcttttgtagaaagtgcgtgtggggctaaacttagaaaaaaaagcaggaatagtgagagaggagacacacggcgttttcgtttctgcctagaatctacacttagtgttatacgtaaggccaaagagtcaacgactttggctccctctcttcacctcttctctattataaattgaagggccaataacccaactctatttgtcctcaaagatagtaaagaagccaaataataaccaatctttcttctatcttctctccctcaatatctttctctcactctctgatctccctggcacaactaaagtagagatatagagagagaggaactttggattgtttgtgtctttgtgacagatggcagagataaacaaacaaagcaacaaatgggaacaagaagaggttagtaatgaaaataattgggaattggctgaagaagaaagtgttgactggagagggagaccttccaaccctaacaagcatggtggaatgagagctgctctctttgttcttggtaatattaaaaaaactttcttagtgttaaacatttgtttgtagccttagatggatcatcttgtttttgtatcttggtccataagaactccactttttatccaaactttggtcccactatctaagattatatattccatggaccttggcaagggttagatttctcgatttaattatgtcttattgatttgtggtctttcattctatttttttaggactacaagcctttgagataatggggatagcagcagtagggaacaaccttataacttatgtaataaacgaaatgcatttccctttgtctaaagcggccaatattgttaccaactttgtcggtaccatctttatctttgcccttctcggcggctatctctcggacgcctttctaggcagcttctggaccattatcatattcggcttcgtcgagctttctgtatgttcatcatctctttccagtacttttttgacatatatgtacatacaattctccaagttacttggcttgcaatttaaaattaaaatctaaaccactttcgatatgggatttctaaccaaatctgtttttttacacgtaagtaatttacgtgagtatctccaggcaaacatgccttttgtgtgtgatcccattacgatttaattaactatttacaaaaataccagcctataaacatcaccaattactgttttagatcaaagtttctcattccgaaaactttctaataattttttttccttttcttttaacg

SEQ ID NO: 5695 - DNA, 3000 bp, Unknown; identical to SEQ ID NO: 5687
  misc_feature (1)..( 3000): cDNA_ID_1829097_gDNA_ID_1620811_Annot_ID_50589 3000 nt of promoter + ATG

SEQ ID NO: 5696 - DNA, 3000 bp, Unknown
  misc_feature (1)..( 3000): cDNA_ID_1829093_gDNA_ID_1620811_Annot_ID_50590 3000 nt of promoter + ATG
tgcacaacttgaattagaagaatggatagtagaagaaggatcaatgccacttcttgagactctcgatactatgttttgccaaaagttaaaaaggtatttcatgatacattacttctttgagaaaacttataagtagggatgttaatgatgggttaaaacccactgggtacccgaaacccatctaaaatttcaaacccattgatctactttttgtataaaataaaacgtgggttttaaatgggcaggtcccatttcgttaaagtcttacacgggttttaccctactgggttatgggtacccgtgagttttaacttattattttagtatgttaaaggcccaatagcccaattgccaattctattgagaaaccctaaattccttttcttccccaaaattttgccaccaccacaacagtctctctctcttctctcctcttctctccgtcggagtcaccatgagagtcaccgctggagtcaccgccgtctacaccgccggagtcaccgccgtcttcaccgccggagtcaccgccgtaagtctctcgtcatctccttgaaaaatcaaactctagtttcacttgatattagatgtcctttctctcctttgattttagccgtttagtactatcactacttacttttcaggtgtcaagtatcctactgctaacgtgtattttctgcaagtgtggaaaattgagcgtcttttgaaagactatgcagtttgtggtgattttagagtggaagagatggctagtaggatgcaagtaaagtttgataagtattgggatcagtacagtatcattctagctatgggagctattctagatccaaggttgaaagtgcagattcttaaatctgcttataataaggtggattcgagtagttcggaagaaaaggtcaatgttgttgtggacaatttgaaagatctttacaaagagcacagggaaaaagtttggacttcttccaccttctcaacaacccaaactccacatgaccttcttacagaatcaccactagaggatgatccaaattatgtaagtatttctccattccttgtttatatcatatcatctttattgtctaactagtgtctatactctatatcatacaggatgtgtttgagcttgagaggagcatacaacctggttctgacaacacaaagtccaatttgcaaaattatttggatgatccaaggctagatttgaggtcttttacagacatggaggttctgagctattggaaaggcgatgggcaacgctatggtgatttagcttctctagcttctgctatacttagcattccaatcactacagtggcagctgagtcatcattcagtattggaggtcggattttaaaccctttcagaaaccgccttctttcgagaaatgttcaagccttgttatgtactaggaactggttgcgtggttttgcagagttggaaggtaaaaaaagaatagtctaattttttggacttaattttttttcatttgttgatttatatcttctaattgtaggtgacattgaagaatactttgatgatggaattgaagctactacatcggtagcaagtagctctggaatatgagaagatgttgtatttttgttttaaattgattttcagatatttgattactttttaagtttttcttgtttaatttgacatacaaattattattattttgctatgaaaaaaatttacatgatatatttacataccagcttagtttataagcaaaatatagatataaaatatatataatagtatattagtaattaaacataaacactaaaaaaaagacaaaaatcaagttgggtacccacgggtagtatcagaacaatcgggttttttttgggctttcccactaatcaaaaatccatttgaattttctaaagttgggtttttggtgggcgggtttattttgggttcaggtcgggctgggcttttttacccaccacaacatctctacttataagtcaatatatgaagaggaaaatggacaaacagattgtctaataagggaggagaagaatatataaaattccaacatactccttacgtattatttctctagtaaagatgaagattgagatatttctaaaagaagagagtaccaggtaaattttagtctaagcacatactcacatgattatcaagagaaaggggaacacattctctttcttgtttatttaaaagtatatgtttttggaatttttttagtaaaaataaatttatatttggaaaggttttgtgtcaaaaaaaatcctccaacttgctaatttttgctactttaccatatatttccaaaaattgcagattaatcatacgaagtaaaacaaataaaataatatgcaatatagctttatacgtatattgtaaatgttttcacagccacatacataaaagtttcaaaattttaaaggtagaattgaagtcctcctagagaagacttcgatttgacatattaattgacaaaattttataaatttgacggtaacaaaaaaaatggttacattcttatttttttggatttaatatgattaatttgtatttaaaagaggtagaaaataaaattgtaaaatttggtgagtttgagaagtatttttttgcacaaaaacgttttgaaactaccgacatgaaatccaaaacgggtatataaaatttgcattagtctaaaattaaattaaaagatttaggtatgtaaattactacatacaagaaaataacaatgagagttatcttcctttcttctttttaaaagtttaacattcttatattcagaatgattaagttcataaattgagccaatgggaaaaaaatgaaccaacagctatcgtggagaaaataaaaacaatttgggccttaagtgagtaaacaaaattgggcttaaaggaaaccctaaaacgcagagtgacaaagtattcatcgtcttcgtttcgtgaaactcaccggaggaatcgtttctcgtcggcggaaaactaaaactacacacaccattctctcatg

SEQ ID NO: 5697 - DNA, 3000 bp, Unknown
  misc_feature (1)..( 3000): cDNA_ID_1829085_gDNA_ID_1620811_Annot_ID_50592 3000 nt of promoter + ATG
tgtgacagttgtagcttttagctcttttctaaatctagtttctactttctacaaagcataagtttttgtaattcaatgcaaagaaagccatgtggggagctcaattggtatatttgtcaagatttgacggagattaaagaatcatataatctattaaaaaatatctttatggatcttacgattgaaaactatattttaatctaccctatggtttaaaaccaataaaaaagttgaagatcttttacatgtttttagaaaaaaagtgaagggtttttaatccatgtttttttctaaccaaaaaaattaagttatcaaatgattagaaaataaataaataaactgcttcggaaacttttctaaaaacaaaaaagctttcagaattcaaatgtgtagatttttttatagtatagaaaaaagaaacaaatcactttaatatttttttgtttgaaaagcctcgtttatgaggtttaaaaaaagaaaaaaaaaaaaaagaaaaaaaaagtttttgagaaattagtaaaaaagcctaattggaaaaacaaaatgtgagaactttagactgcttttaaagtcttgaaagcatatagccaatcaccccctaacttctttaaaaacaaatgtgggacaacataatgctgtattattgttctacaaaaatgtgtaatgggtaaaatggatcaagtagttatattatttttcatatatactacttgacttgtatttgctagtattaaaattttaatacttggtagttggtatccactttgtttgttacggatacttattttcttcgtccgggtaaaagtcaagtaacgactatgaagcgagtgataactaatagtaatcgtgtccagccttttttgtttttattttttgtaatttgtcaagattaagatttaacggagattatggatcaaataattaaagaaacgttaaaagtaccggagtaaagatattggttttttatttattgaccccaagttttaacgtgcactgcacatgcacaacaaagtcttaactttttcccggtcttattttaatttaaatatcgtcaacttggctaccgatttcatacttactcccatatctaagaataagctgagacttcataactaaagaacaaagaacaatcatctttcttcttccaaaggacaacgagaaaaaagtggtttcgacaggtgagccagtttgtttgttattgatttttacttttctgtcaaagtttatttgttttctgattgcagaaggtcttttgctctgtccttgatttgtttccatcaattcgactctactcgttcaattagttttttttttctttcttaaacaatgcaaaatcttagatcatgtttgaagaaacttgaatcctcaaaagtttgttctgcttccttggccacctttgtttgttcacgtttttcctttttccgatttacttctataaaccctcgtgaaacctatatccctcaccggttttaaaaggcaaaacaatctcacggcagaggaagacggtggtggccggtgactactcttacgctcagctctctgcacgttctatttttgctgaaaccgttcccccactgcgatgcatctttaaaagttgaatattcttccatcacttagtttcctttctaaacttctggatctgctcaaatcccttcagaagaaatctcacactcgacttcgttgtggcaagagaagtctctcttggaccgtctatcttctgggtggtgattcattggctctccaatgggttttcattgacaaagctagtgagttctctcactcacaatcgcggaagctccaaacctgcaaaacctttggtccctaactattggtctcccacgacggcttgcatccccctccaagcagccctcaacttctggatctgctcaaatccctaattgctcagatggactctttctttgagatgggtttctcaattcttggcccactaagatatctttctcggcccatgtctgaaataatagggctaacccaattagcatcttggcccaggtctgttttttttataaatattttggcatttcctaatcctttgatgtctcttgacattgctgatattggtcaaggactccaatttcactttgtgcggacatcggtggttaggaaagctaataatttgttacgaaccttggaggaagacatccttagtgttgttaatcgttttatcttttctaagaactctatgttacaattatcctctttaatagaaagaaccttggtttggactctcacctccttttgaaggaaccgtttatgtactttacccagattcttagatgatgtggatattaagccggtgatattcaagttaaagaacctcttttcaacattattatgtctttattggaccgtaactaatcttcaatctccccaagtttttgtggaatgattttcgactcgccattctctcgcttgttgcaaactacgttcaagttcttgtctccgatgtttggatcttccgtcaaattatcgtatattctatctctaccattcacttgttagaatgctagtttgtgaattgtttggctaaaagtgatacttcattaacgtgaaaagatggctttaaatagccttacaaagactcaaaaggaacaacaaaacgactaaaaaataggaacagactccataactccactacacgaactgactcaattccacaactccactacttagactccataagactcggacgtaattgacttcgaaccatgtgttggatgtttgtttgaactttgtatttggtatgtggattaatggagtcaagtatgtttttgcccaaaaaaaaatttagctaagccaaacctattcttaaagaatcatgtgatagactgctaataatgaaaaatgcaagtatatattaaatcacttttatctttagcagtttgaacttatatataatatatgtgatgtaggttcttgctaattaatgtttcctcttcattataaaaaggtttcacctctactttcgtactattcatg

SEQ ID NO: 5698 - DNA, 3000 bp, Unknown; identical to SEQ ID NO: 5685
  misc_feature (1)..( 3000): cDNA_ID_1829073_gDNA_ID_1620811_Annot_ID_50596 3000 nt of promoter + ATG

SEQ ID NO: 5699 - DNA, 3000 bp, Unknown; identical to SEQ ID NO: 5683
  misc_feature (1)..( 3000): cDNA_ID_1829062_gDNA_ID_1620811_Annot_ID_50601 3000 nt of promoter + ATG

SEQ ID NO: 5700 - DNA, 3000 bp, Unknown
  misc_feature (1)..( 3000): cDNA_ID_1829058_gDNA_ID_1620811_Annot_ID_50602 3000 nt of promoter + ATG
gagtaaattttatttttaatttaacatacatatatgagaaagacgtgagattgtatatactgcaaaaaataaattgaatccctttgtacatcatcaataggataacaagtatatgataataattttgtcgaaatgcttacccacatattaaatcgtcattgatatgaataatgttaattattggattttaatatacacttggaattcttattattagtagttaaaaatcccactagcacggatcttatttgttatacgcaaaatatagtaaaaaaagaagctacatatttagattcatgtaaaaataataaccacataagacaaatttatgtagtagaaaaggttgaaacaattttgtacaacttttaagaattgtcaatataaactaaagcttcatattagaaaaaattgtttttattttccaaaacaaaaccaaattttcattagaatatatgctgtaattagaaagtgtcattgtattcttgctttttctaattcagtcttcttatttttgcaggagttcactaacaatagtgatcacaaatcaaccaacatcaaaattacacttatcaaatagaacatgaatctaaaaaaagataagaatactaacaaaatcgaaataaatgagaactaaagctcctcacatccttcttctctgcacatgtcaagaatatgacgtatattggcggtggcgttgatacaccaatttgaaaccaaccctaaacttaaaaaaagtttaaacgagatgaacacctctctatttaggagctcgttaatatcttgcttagacgtcacatgagattgatggtacatgtcatggagtaaaataaaatcttctcttctctgtgtctctgatgaggtcatggagtatgggtagctttatgataaaataggaacttgtttcagagtatttagaagtaagttatttctattttctatcatgaaaacatttcccaattttgaatatcttttatatactctcatggctgtgtttatcaagatcatcaaaggcgttttctttttccccaccaaaggctccttcatcaccaccaaaggtaccatcaagatcaaatcaaattcaaatggtatcaatggctccttctttcacctcactactaatgactttttcttcttcaccaccaaaagcctctccttgcctctccttgccaccaaaagcctctcctcggctctcctcgccaccaaaagcctctccttggctctcctcaccaccaaagccgaatcgtttgctctacttaccactatcaccaataaagtcagttatgtgtttcaaaacaaacgaggaaggggaaataatagacttctttgatatatttattgaccatttggtctcaaagaatcatcacatccttacctgaagagagagcgtgaagtatggttattgggttgagttggctttagaagcactgtttgatattgaagttgagtttgagtctagtatggatgaagataagatgaaaagtaaaagttgatttttcaaaatgaaaagtgctccgtttggtaatatatatatcttggagaaagagatagtctatatggagcgtgaagaacttttagaaaacatttcttatttcaatcttgtggagcaaaacaagaagaatggtcttcctcctcctcaagaaagaacatggaagtcactagagcataaaggagtcattcttccattgccttaccaaaaacacaacgttccccttatctacgataaaaaactcttaagaatttccaatataaactaaaacttcatactaaaataagatttgttttttctttcaaacgtaataaagaacacaaatatgtcaaaaaaaaacaatcgtgatatgttgataagaaaatatcaaaactatggtaaattttaagattatttttatagtttatttttttttgataatttcataaattctcaacttcattttttcttttattttcttcgttttaaaataaattctcagattttatttagggctcaaaagatccaagtatgaggagtattatttacataagttatattaagcggtttagtacgaatttttcgtgccaaattgttcgccttaacatttgtataattcaaaataccgaattaaaccaaatgtttttctgattcgttaagatatttgtaccaaaaaaaagaaataaccattttatttaataatcactaaaaaaacataagcttaaacttattattataaaaaatctttaattaaaaacctaatctactataaataggaaaattcaatttttcttgaccaaaagaaagtataaaaatacataaaatggcaagaaatctcatatgttttaatcccgaaagtataggtgataggatgataccctaattttgactgtaagaaattaggggaaatccattttgttaccaaaatctcttatcatgtttcaattactttaaatgcatgaatacatgccaaagattttgttattaacaacacaaacacttgattatatatctccttggtataatatacagaacagacacaatcttaggctcctccttctctcgctctcttccctctgttgctcggaaagctttggcctttttggttttcttatggctaattctcttctcaaaactattcgtatctgagagagattgagataataaatatagagagagatccaaaccagaagcaatctttttttgtttgtctctctgtgaagattcgtatcatttttctccggcaaactaacggcggcgatccactcttctctatagcttctattatgttggttttatcttcttctttggaagaaatgaacaagtttggttttttcgctttcatgaatgtgatccggtctatataaggtttgtatatataatcaaaatctagtttttgatttttgtttcgattttttggcgatagatctggtttgtgtttgttgtttaagagagagggaagtttttgaatttgtgattttaaacttggcttgttttcagggtacttagagtttggtgaagcttgaatctaagag

SEQ ID NO: 5701 - DNA, 3000 bp, Unknown; identical to SEQ ID NO: 5693
  misc_feature (1)..( 3000): cDNA_ID_1829054_gDNA_ID_1620811_Annot_ID_50604 3000 nt of promoter + ATG

SEQ ID NO: 5702 - DNA, 3000 bp, Unknown; identical to SEQ ID NO: 5692
  misc_feature (1)..( 3000): cDNA_ID_1829042_gDNA_ID_1620811_Annot_ID_50608 3000 nt of promoter + ATG

SEQ ID NO: 5703 - DNA, 3000 bp, Unknown
  misc_feature (1)..( 3000): cDNA_ID_1829038_gDNA_ID_1620811_Annot_ID_50609 3000 nt of promoter + ATG
ttgatcaacgttatcaacatgatactagaatatttgcctctagcataagataatcgtgtcagaaaaacatcatctgaccatgcgtcattacacatgtacatgtggttaactttgtagtgatgatagagatctttgtacatgcttgtgtagttgcagtttcagtaacatatataaagcaaaaccgcattccttctcatcggaagaactctttgtcgtaagagaacttcttggtgcagccatgtttggcatttgtggaagcagtcattgtgacatgcccaaatgccaacatgattgcagcgagaagttctcttatggcaaagatttagtccatgagaaagaatgtggttttgcttttgttattgaaattattgtaactacaccaacatgtacaaaacttcactacaatgctaaccataaagctaatgactcatggttcaggtgttgccattacgataatgcatgggtatgcattagtgaagagacttttcgtcattcaagaatgtgaaaatggtccaccaggtgtagttcagtgtttgaaggagccgcaaggtcattatatatagactatatacatgttcgaattcacgattgttgataatttcaatttactttagaatcccactattaattaaaacatagtatttattttaaataaaactacatacgtggatttgtgaaacattacaaaaatgtaagtggtgattatcaataaaaacaagtcttctcaaacaaattggaccgactaagagcaccattattgatagttgcttagcttaattcttaggaaattttggttacaaatttaatgtttttaatcatatatttgttaaaagagtctcttatataaaagacaaattgaagtattcttatcttttgttttaaaaaattaaaatcaattaaaaaaaatcctaagaactaagttaagactaacctaagaaactaccattaatgatgctctaactagtgttgtatgtgatgacttcgtaagtctatgagtcataactcattgtaaaactttaaagacctttaaaatttgtgaagaaaacttcaacagttttttgaccaaaaaatcgaaatattcaatagtctagcagaaacagatttacatatttcaccgaccaaagaaaaagaaaatcatattttacgacaacattttgttctaacgaagttttttctgacattaaatttaatatgcattaataaacaccaaaatccaatatatgaagaattttacaatttctctcatttccatgagaccatgaccccaaatcgttacttttccatcgataacatagaatcgttacttttagaagaaaaacaaaaacaaatcgattaattgaccccaaaataagatggaataaaagtataaataaaacctacactaaacagaaatcaagaatatacacgtggcaatcgatgataagctaatcatccaccctctccaccgacgaacgctatcaccaccggtagattgactctcacggctaggtttcgaaccaccaccgtctccattcggattaccaccgtacaaatgctgaatcccttcgatatcatccttagctaactccactttccgatctccaccagaaatcgccggaaacataatcgcatcttccaccgacgaatgacctagccctaaaagatgaccaatctcatgaacagccaccgattcaagatccaccaccgtcgtcaccggtaatatccgacgactaatttcaccgttagagatcaaccaatcctcatcaccgtctaaatgtaacatccccgtaggaggcgaagaagcatgcgctaatgttcccatagctccatcaaacggctctccatcaccatgttcaccggagaaaaatccgatcactatatccgcacggaggatagactcagagcgcgtgaaattcaacggagtcacctccgcccaacgcgtgaaggcgcgtgagaacacgcgtttaacctcgtctgttaaattattctgcggcgcaaacgcataagtcagatctcgtttccgtttcggccaccgtggcttcccggggaaaaacgagtatttctcagtcgtacggagtatcttaccaccgttcatctccgaaaccccgtcgatcaaatccggattcccgcatctcggtttaacgatttgccggagagtcgaggaatcgagttttccggtgactttgagattgaaatttttctggtaagtgttgatcgctgattgaagcacgtcatcgaaatcgtcagtgcaattaccggtggtggtgatataaccgaaacggcgaaagtattgtttgagttttgagaggccgttgatattttctccgatgtgacaaccggcgagtttggagaatgtttcccatgcgttttgcgttgcgtttaggaattgtaacggtgggattgaagagacgttagtgtagaattttgctgagattggattcactgtgaagaagaagatcaaaatcgttagaagaagtgttctcatttttatagtatatttttgggaagaaaaaatatgggagaagttacagaaaaaaatgaagatgaagagttaacgacgtcggtgtgtttgttttatgaagctaaaatgcttagctcacttggctccatttttccacacgggtgttaatgctcatacgtgacatgcttttgagaaaaagctgaaaacaacttatattaattcattattgatttacatattaaaattttgaaattttagcacaaattacataacatattattctttaaaagttttccaaataaacaatattaaagaatactaattcaaatatttttcgtatataatatcatgactactttctattaacaatttatagtcaaattatatagcgttataaacttataatatgaagacttacgtacttttctaatcaaagagagtatattaatataatattatcaggcactagcattagtcagtggctactgagtaaagctttgggccaccgagagaaaccattttctgagagcacactttcgttgacttctctttaaccaatg

SEQ ID NO: 5704 - DNA, 3000 bp, Unknown
  misc_feature (1)..( 3000): cDNA_ID_1989630_gDNA_ID_1620812_Annot_ID_57881 3000 nt of promoter + ATG
tcattttgttcttaaaatcaactttttgtttgaaatgtgatgttgaatttgagtttctgcattgttggttttgggaattatgttgcagattgatatcttgaagcgattacaaagagaaacattctcggatttgatgaaacttagagaaagacaagagaaagtagagcggatcatttcctcgcagaaattatcgaaaggaggtccctttcaagagactagcactcatgtgagaggtgaagttgatgtgcttggagctatattgctgatgggaaacactgacgaggaaagtttcaatggactcaacaaagaaggagtgagaccgggattgctttcaaggtttgtgtttgaaacgagtcttagggagacagataggcttgtggctgagcttgttgctggatacaatggggcaggaagtcacagggattttttaggaggagagttgtctttagccaaagtcttctacaaggcagatattaatgattggttctctgctattgctattcctgttggcgcgcatttcagagacattgaggcttctactgtgtcttcttaccaggtatccaccaatcgttgcagatttctgtttctatatttgttgtgtttctcataaataatcgttattgataaaactacaaatacaactaccttcgtcttgcagggaatgagtctcacagaagtttctgaacttggaccacctcttttaagccaacataatgggagcgccatagggttaacattcagaaagtcaaatatcacagcttcactggctcagtctatgtcaaacgttgaagttgaacagggtttgactgcaccgaatcgttgtttcagaacatttgggcaagtaacctgccacattctcagaagtttaaagctatctctattgggctgtcaccaagttttaacatcatctagcaatctccattctgttggagccattacagttccagtaagtttcctaaggcgccatactgctacggagcctgaaccatcagcaccgcctctggagatgagtagaaacatgaatcatgtgtcgtccagttccattgctttgaagttagactctctaatggacgagtctacaaaacttgggggatggattgaaattcagaactcaagagaaaagcaagtgaaatggtcagtgtctattacagacaacccagaggatgaagtgggctggggcatgagcgttgggggagttgttgatggttcaagaaatcatgatcagtttcaggtggaatcatatctgaaattcaacataggcgataggtttagattaagtccatgtcttgtttatcacacaaacagtgacggaagaaccataggtcttatgctaaagtctcactggtcgctgtgatctcaagtttactcattacttgtacattgatggttcgaattaccactgactgcagttttgagatttttgtgtctaatgcaatttatttgtctgaaaatatttaatgtagctgccatttttgtgccttgaagataaaagtttattgtctatcatcgcttagaaaaatctttgttgtcttgttagtaattgtttccatctgtgttggaatagtacactaatttgcttttttttttattgtaatggtaacaaatgtcgtaatgcttatttatgcttagggagaagtagaataactgaagattgatctatgattagtatgtcttgattgcaacgtaacataggttgtggcattttaaagattatttgaaagaattcttcttaaacaagatgtgactgtacaacagtttgattgatgttgtcatgttgagagctacgttgtgaccctctgtctcatgaacatacaaattctctagacttttcatctgtcgaagtcaatgacctttttctcaggtctcatttgatacaacaaagtcctatgcagaacgcaatggcaatatgaaaaaaaaaaaaagagaggtaattttgttctccatttcccttttatttttgctcaaagatttggcgttttgagtcaattagactttctaataatactagtttcggcttctgtcgttttagatgtcattactcatcagtcatcattgtgatttgtgaattgtgtggctttcattggtaagtaaaaaacttagaacgtccatacaaaaaaataacatgttaccaatataaaacaaattaggcttcacataacaattgtatcaagggcaatatccccacctaatttctctattcaattttttgtcaccatctaataattctttaaaaattgcaaattttggcctcgtggcacattgtctcgtatttgcatgcaaagtcaaaagtatgtgttgttcgatagagaccacatccttttttaatacaagataaatttgtttggtaaaaacctttctcatagtttaaaaaaaaactttctattccgtttcaactgaacagaaatcgaatcttttgtacacttcgtttaggcatttcatgtgatacattgtgtgcttgcctcaacaaattccaaattagctacccacaaaaagatttgcgacctaatccaatctagaacggcatgacataaacaaattcaactcaaattcctcaaactttaacgacggcaaaacaccaagtgggctgtgaaacacgcgttcgtttgtatcaccaagaatgagaacagaaaaaagtaatatttgttttcaaatgctataatctgcaaataaaacaagtgtactcgaaatgtataaacaatgaccccattgaaatcgcactaaggcaagtagtcctctcgctttcaatcgtttcctctgcatttaaagaaaagtcaagattggtggtttattccactctcactgctaattggtgggctattcaatgaatccacctaataacattattactcacaccaaaaacaaatcttcgttgaaacataaaacttttacatcattttctaagtcaagtcttctcatagagacagaaaaagactactaatttacctctcgtgtaggaaaacaaagcaaaactggagtcattctctgtttcaaagagttatg

SEQ ID NO: 5705 - DNA, 3000 bp, Unknown
  misc_feature (1)..( 3000): cDNA_ID_3078166_gDNA_ID_1620812_Annot_ID_57884 3000 nt of promoter + ATG
gcttcttgattccgggaatctggtgctaaaagaggcgagtagtgacgcgtatctttgggagagcttcaagtatcctactgattcttggttgccaaatatgttggttgggacaaacgcaagaattggaggaggaaacgtcacgataacttcttggaaatccccttcggatccttcgcctgggagctacactgctgcactcgttcttgctgcatatccagagctcttcattatgaacaataataataataacagtacggtgtggcgaagtggcccgtggaatggccagatgtttaatggtttaccagatgtttatgcgggtgtttttctttatagattcatagttaatgatgacaccaatggatctgtcaccatgtcatatgctaatgattcaaccttgagatacttctacatggattatagaggatctgtgatccgaagagattggagtgagactaggagaaactggacggtcgggttacaagttccagcaaccgagtgtgacaactacaggcgatgtggcgaattcgctacttgcaatccacggaaaaacccgctttgttcttgcattagagggtttaggccaaggaacctaatagagtggaacaatggaaactggagtggtggatgcacaagaagggttcctttgcagtgtgaaagacagaacaataatgggagtgctgatgggtttttgaggctgcggcgaatgaaactgcctgactttgcaagaagatccgaagcaagcgaaccagaatgcttaaggacttgtttgcagacatgttcttgtatagctgctgctcatggcttaggatatggctgcatgatttggaatggaagcttagttgattcgcaggagttgtctgctagtggattggatctttatatccgtcttgcacattcagaaatcagtaagtattattccacaacatctctcacattcttactttaatgattgcagttatattaattctgctatttcttgccaaatctcaaatagaaacaaaggataagcgaccaattttgatcggtacaatattggcaggcggtatttttgttgtggcagcttgtgttcttctggcacgacgaattgtcatgaagaaaagaggtcagactttaataaaattatgtttacttcttataaccgttggaatttttaattttagtaaaaccttgcatccggtctcagcgaaaaagaaaggaagagatgcagagcagatttttgagagagtggaagccttagctggtggtaataaaggaaagttgaaagagctaccattgtttgagtttcaagtgctagcagcagcaactaataatttctcgctgagaaataagcttggacaaggtggctttggtcctgtttacaaagtaagtatgacttttaaaggttatagcaataagtctttctattgggaatcaggtgtgtatcatattgacttttttttgttgcaggggaagttgcaagaggggcaagagattgctgtgaagaggctgtcacgagcatcaggacaagggcttgaggagcttgttaacgaagtggttgtaatttctaagttgcagcatcggaatctggtgaaattacttggttgttgcattgcaggagaagagaggatgttagtctatgagttcatgcccaagaaaagcttagactattatctctttggtaatttattactatctttgttcttaaactctgtttcaatgttatcaccatgtcaactaacagaagctaatgtgttgttcagactcaaggagggcaaaacttcttgattggaagacccggtttaacataatcaatggaatatgtagaggtcttctgtaccttcacagagattctaggctgagaatcattcacagagacctgaaagctagtaacatcttgttagatgagaatctgattccgaaaatatctgatttcgggttggccagaatttttccagggaatgaagatgaagcaaataccagaagggtcgttggaacatagtaagtaactccattcaaccatatgttacatctttttttccattaagatagtcctaaaacagagaaaatgtatcgtgcagtggctatatggcacctgaatatgcaatgggaggactgttttcagagaaatctgacgttttcagcttaggagtgatactcttagagattatcagtggaagaagaaactcaaattcgactcttttagcttatgtgagtctaccttaactctactaagtttcttaactctcttgaatttttctcaagccctaagagctcctctgttttataggtatggtcaatctggaacgaaggggagattaatagtctggtagatcctgagatctttgacctactctttgagaaagaaatacacaaatgcattcacattgggcttttgtgtgtgcaagaagctgctaacgataggccaagtgtttctacagtgtgttcgatgctcagcagcgagattgcagatattccagaaccaaaacagcctgcttttatatcaaggaacaatgttccagaagctgagtcctctgagaacagtgaccttaaagactctatcaacaatgtcaccatcaccgatgttacaggacgttagaacctgcagaaaccaaaatgtatgtgtaattcgcaaaactctttaagcattacaagagattatatcatctatctatatagatagtaatgtctcatacatctagtaatgtaaaagaaattatgtttatataacaaatcaagaaactcttatgcttttgctaatccttgtagatgcaagaaccagcttcttttctgaacatttccacttgacttgacttttcactatatcaatatttgacttttcttttgagaatttaattctcaccacaccatcagctaccaatgtttaatgctacattcaattctgagatcttgctacttagttcttgttgagtttggtctttttaggaaaggatattacaaagcaaaagctatatctaaaattgagtagtttttcgtcttgagaggctgggactaaaagatatg

SEQ ID NO: 5706 - DNA, 3000 bp, Unknown
  misc_feature (1)..( 3000): cDNA_ID_1989628_gDNA_ID_1620812_Annot_ID_57885 3000 nt of promoter + ATG
ctcaaattagttttctctcccggatatataatgctcatcaatgttttcggtggagggtcatgtcaccagtaatctccgcacgaacaggcaccgtttttgaaatggtgaaaccgttgcatgtctcgtactacaatttcccgtccggtcacaagggaaatgtactttgtagcattgtgacagtcagcacaaacccgcaggttctttcttacgtgaatagttgtacctgcagttgtattcagcaatccaaaagatatagccagcttctcactgtgggtactcagcagttgctccttaacatcattttccacaccgaggactaaattcgtgtcaggaacataaccagcttctttgatgtggcatatcagcttctcaagaaacgcataaatcttcttggaatcgggatgggctgtgcttccagagaagaagctatgcacctcgttctttatctccaccatactgcagccaggagttttgcgcagaccctgtctcaacattgaaactctcacttgtcccactttttcccacattgaagctgcacgatatatgtttgcaagaagcacatgatacccaccatcatccgggttcaactcaaacaatctctctgctgctttctcagcgaaattcacatttttatgaatctggcaagcacctaacatggcaccatatacatttacagccggcttaacgggcatctgcataataaagtcccatgcttcattcaaccgtccagctcgacctaaaagatcgaccatggctccatagtggtccattgacagttctatgctgtagttttccttcatcatatagaagcacttgagtcctgcctccaccaaacccgagtggctgcaagcagagatgacagaaagaaatgtgacaccatttggtttgatggtgcctttttgcatttcttcaaacaactccagagcagctttcccaaatccatgtgtcccgtatccatcaatcatagcattccatgttgtcacatgacgctcactcatcatgtcaaaaatcaatcttgcaatcataatagcaccacatttcgcatacatgtcgactagagccgttgtgacaaacacgttcttatccagacaacttcgcataaccaccccatgaatccacttcgcatgatgtgtaattgacagctctgcgatagcagttatcacactcacataagtaaatgtgtctggtttcactgtccgagaccgcatctggctgaagtaattcaaagcatcgatgggacgtccattctgtgcaaatcctaatatcattgcattccaagagacaagggttctgctctgcaatttcccaaacatagaagcagcagtatcaacttccttgcacttgcaatacatggagatcaaagagttcactacagaaacatttctatcaagacccaattcaacagataacttatgaatgaatcttcctctctcaaggtcacccaggtcagcacaagcatgcaaagcacccatgacagatacatcagtgggtttgactccttcgtccaacatcttttgaaaaattaacattgcctctttaggattctcattctgcacataggcatcaatcattgaattccatgaaacaacattcctttctaacatcccatcaaagagctgccgagcagtttccagagatccacatttcgcatacatatcaaccaaagcagtggagatattgacaagagaatcaaatcccgaccgcatagcatacccatgaatctccttgccaacactaatcaacctcaaagcagagacagcaggcaaaacagaaacaatagtgataaaactaggcttcagattctcctcacacattgacttaaccatttccaaagccattctcgccatcccattctgtgaatacccagccacaattgtattccaagaaaccaaatctctctcaggcattctatcaaacaccttgcgggcctcatttacctgcctacacttggcatacatattctcaagcccagtcatggcaaacaaatccaacgagaacccactcttcaccaacaacccatgaatttcctttccaaccctaagctctgcttcgtctccacaaactttgaggagataagtgaagttatacacaacaggctctacatcatcatacctcatccgaacaaaaaattgcaaagctttatccaagtctgaaactttagcaaaccctttaagcatggtgtgataaagaacattgagtttactatcaatgggttcgaaaacacgagcagcctcgtcgacactgccatagcgacagaacaagctgacaagctttgtctggaaaaaatgctcctgataaagcccatttttgaagacgagaggaagaatttgacgaagttctttcagagaagaacatctctcaagaagaagagccgctggatgctcatagacattagccggaatgtaatttctctcggagagaaagtgacgatggcgagacgggggattagggatttgaggaacggtagagaactgcaccaattgtgagctcatgcttttgttctgcaaaaatcaatcctttagacaattccttcttcgaagtatatactttatccacaatgtctggacttgattgaattgacagtgacgtgagcttattccggagaagaaggtgaagtgagtcactcttctcaggtgaattaagaccaagtcgtaatagacgggccaactttggtcaatcaaaccgtagaaagaccgccattaatagaaaaatgatgaatcttttagcttgcatcatcatcttagaggtaacagtgccacttgactttgacatttctaacaatatttggacttttctcttgagaatttaatcatcaccacaacattacagaatcacttaacgtaactcaagaccctaccattgttaattgttacattcaatgctgagatctttgctattaatagatcggttgtgtttgtgttgtttcaggacatattaagaacacaaaagctagctacaccaaattgggactgttcttgagaagctggtactgaagctatg

SEQ ID NO: 5707 - DNA, 3000 bp, Unknown
  misc_feature (1)..( 3000): cDNA_ID_3078130_gDNA_ID_1620812_Annot_ID_57888 3000 nt of promoter + ATG
gactgacgttaaattctaactacacgcatttaaacgaatataatactttttgtttataaatactagtgaatataatgctttagcttggtggtaacggatgaggtcaacaacccatagggtcctgggttcgaaaagcctacagatccctttttcatcttttttgctctgcaaatagaaaccctagccgccggtcaacagagtaacatagcttggattcatgcatcatagactagattccggctataaggtccagcaaagatctttaaaaatctttgatttgttaatttaaaattgctcaaaattttaaaaaatcttcccatcaattaaggttttacattacaaagagaaagagagaagacgaaaaagacggaagaaaaatttcagatccaatactgaaaatttaaggtcagatccaatactgaaaaatttcgtgttgttctttgtcagaggaagaagacggaagaaaaaaaaaacgaattttttttttaatggagtttcaatcccgggttcgactgttgataatacacagctttcaccaccagactacaacacaatatgccttaatgcatataaataaattgtatatatcagtttaaatacgtagaactgaaaatttaacgctagttaacgattttgtaacggccgttaacggacggtaagttacggagtcgaatctactaatattttaaatgttttgtatttttaaactaatctaaaagtattgggtattaaacatccaaattaaaattagttgatgttgtttttgggattttccccattttgcataaatttttgttgaaatttaccttgatctttttttttctttgagaaaacccagggaccatcttttcgttttacaaatttagtttatcatttatcattcgtacaaaatatcctgtattttctttatataaaaaagatcttgtctttatcatccttcactacgacgtttattaattaaaaatccacccaaaaatgtcatattcgtccctttgtccttggattttatattcactgctctagcaattactatacttcattttacacagatttttcaggaagtttgacaattatgttgttttggaatttcgcagtgagtttgaaattatgaaagttccatttggttgtgaattatcaaaagggggaagtgtacaggggtaatttaggaagtttgggttatgataaatgataatcatatgcaaatcttagttcagaagtgccgcgaatctgggaaaagaataagcacagctttttaaaattacctttaacccctttattttaaaacaatttctttattcgcctttacctttttttatcaaccaaattttgcctctttctctttactctgcctattaagcaaaaagccaaagattagatggaaaccaattaacatcaagtaagactgaagaaagaaaaagagtattttaaaattgcgtacatatgaatctgtcctataaattttgaacctatcctaataccacggacttatatatgtgaacgttaacaacactttcaaactcaaaaagaagatatatggataagcattccacgtaaccgtacattgttatgttcttttctagataaacaaaatctttgcgtggtcgaaattgaaaaataaatctttatatctgtaaagaaaatttcgatgtcactttataagaaaaaccaatgctgcatcccatgaaacaaattaattccaagaacattatccaaaacgaatttaatgttatccaaatagatcaagaaaattagttggaccgtcgaatgaaatgcgatccttgctgattagcacatgacgtgttcatttatttttgccaccattccaccgacctcaactcttcttttggtaaaattttatgtttatgatatcttgtgatacacaatttattactatttggtacattttgaagtatttgtttttgcatgatatatgacgttaatttgaactgatattagtcaatttatgggtacaaaagttgaaagtttagagcactatgttggatttattaaaaatgatatcatacaatggttcaatatatatatatttttttccacgtttttaataacatttttgtaaacaagtcttctactattgtctttattgttaatgagtttctagtacctaattaggaattttgaggatatacgatacattaatgagttacattatcccgaaaacaaaatcttgaaaacgaacaaagataatttggacattactcgttatgtatacgtatggaattggatagagccgttgaaccatcaagtgggtcttcaagtcaacgaactgaatttgattttacactcatgtacatcggccacaattttattcacacactactaacacctctggtgtccacttttttctttctctagattgatgtgttaagatttttgttgcaattcatttattcaggtatttttatatatatatatatataaattagaataaactaatttaaagaaagatatagcaattatgtttcacattttaacattctcaatcatttataaaactaatgtggtgatgaatggtatatatatatatatatatatatatatatatatatattttgttgtgaactaatggtaaatatttaaaataagacatacgtacataaatccacggactcttaaagtcatgatgcggttaataaatgttcacataacggtaaccaagtggctcaaaatcatgaaacaacgtcacataatttatcttataatgtggataattagtaccgcattatttgtaagaaaattaaattaattatagattcacagctaagaaaatacgaaaagacagctcaacacttttccacttctattccccactgtctatataactctgataaataatctctgatctctccatctaatatctctttctcaatttcggttccactttcctttcgtttgcaaaaacccatcccatcaaaaataaacaagagggcctaaagaagaatcctaaagactttacgggtcttgtttaggataaaagaaatg

SEQ ID NO: 5708 - DNA, 3000 bp, Unknown
  misc_feature (1)..( 3000): cDNA_ID_2174315_gDNA_ID_1620812_Annot_ID_57892 3000 nt of promoter + ATG
caagtaatgaagcaaaaagagatttgaaccataatacatctaatcagtttaagaaggagcctttttgattattaaaaaataaaaagattgttttcatcaaatatctaaatagaaaatgatataatttactaaaaatatgttttacataaagatggatgtcatttaaaaataataggcttgggaggagtctaaaacggttgttttcacttggctatccctagggcccgttacgtatggtccgattgtttcgtctaatttgcaacatgaaattggtgcacattatttcttcatatggagtttgtaacaaagcaaaacataatattcacgttaacaaaaaaaaaaaagattaaccacgattttagtataaaactttagaccaaaaaatataacatttattattggtcttatctggcaaaaggatcttatgtcttttattttgtgatcaaaatcaatcaattcttcttcttgatcattcttatctcagctttggttgctccaatgttaggaataatgtgaaaacatattgttgaatgacgacgaagacaataaacatctcctacttgtatgtgaattttgagttttgggcattgagctggtcttatttcgtattgtttgaatcttgcatatgaacaacgcgtaacaaattggaagagctaatggtcgaggtccttgtgaattgtgagtatagtggagatgtacgtaaaatctgagaaggatatgcagaaaatgaagaagggagcctcatgctcttattttcgataattcgatttataatcactgtaaaaaataaaaataaaaatgtataacgagaaatctggagccaataatcacgtgttagatgtgacacacacgagacatattttgttataaccctggactggacagtgaacggtgcttactgcttgcttagcaacgactcttcggtcgataatgacaccatctttacgtgcgatcgtattattggtcgtttaactatcgacggggaaaattaacaaaacgaattaattatggacgcgtccaactattggattttcttggattctcatccaaaagagctttcactcttttaggccgtgaaatctaacggtcgaacgtcagacaaactttgcgactcactctcaccatcaaagtcacatcacagggcagttggatcgctgttcttgttctgtatttcgaagaagtttcgtttgccacttctttttatgtcggtaatatattaactaaaattggaatttcgtattgctcttcttgtgctagatgagatgtgaatcaaatgaagcatggggatattattattattgtgagaacgtcaaaaataccttttgaaatttcttaccttctaatttgttaaagacggaatgtcattgtctgtaattttctttttataagtatataataatttagtacatcgatctttcaaatggtaatatttctaatttatatattcaatccaaatgaaaataaacaatcaaatcaaacaaacaaagtttacgtttatataacactgttaactatatatgtgtttgctctttcgagtcaagcaaccattataacatatccctttttaagaaatcatcaatgagatattaaagaaaaacctaagagcttttttagatatatcaaaagggtaagatccgaaaatgtaaggataatatctgtggtttgagcagtagtagtattttcatcattgctgtaagcgaaattagtagtggtcgacaaagaaaaagattaaatagtaaagagtggatggccacttgggacgagtcggagtcaaatatacgacgacagttggagaaacttgacatctaccttggcccgttcttacttcttaactcttaaaaataccttagtgggtttctgccgtcagggataatttttattatgaaatccttcattttaatccggtgacataaataagatactagatcatttgaaagataaataatgtatcataataataaaaatagtgtttttgcgtttttggcgatactcatactatggattaatttgttttgtggtaggatattatttaatatgagtaaaatacttaacaatttaattattttaagaaaagaatttaatgtcattttcttgtaacatcttatcaactagagattatacactataaacttttgtatcaagccgtttttaaaattatgtgagattttactttttctaaaaacaattcaatgatatgatttctcttgtttttacttgattgtccttatataaaccaaccaaaaaaatactatactttaatacttgttaagtaatattaaatatccatcttagatattttacaactctttttaggtaaagatattttacaaccttttcttttctttgttttgcaaaaggtttttaacaacgctttacatccaatgcagtttgtaatctataaaagaacatataaacttatactccgtaaagtaattagttatgaattcgctcaaaacattattctcgtttgtctaaaattaacataaaacccaatataccggtaaaagtaaacatacatgcaaggctaaaagacgtgggcataacgtgtgattgggaaaccatcggaaacaaaaataaggaattataacgaatggccatactaggttgactaataagagaattattatttgacgtatataagataataagacaattatgggataaaattaagagacataagtgtggacacgtgaagcttagagtacgtgtcaatattcaataagacataaacaacaacaaaaaaaagggtttattctctactcttgttttgtttatacaagaggatgcatctactgccccaaaacaatcctgaccgttcatgtctctattcttagatccaacggtatgtatcagctatctcattgtcccctctcatagctttctatataaaccgaaagaaagaataatagagtcagagctaagacttaagagcgtcacaacaatatcacactcagataaatatcaagagatagagagagtaacagtgatatagtcgagaaa

SEQ ID NO: 5709 - DNA, 3000 bp, Unknown
  misc_feature (1)..( 3000): cDNA_ID_1989621_gDNA_ID_1620812_Annot_ID_57895 3000 nt of promoter + ATG
cttgttcattatttcgggatttcttcaatttcttacatggcttctatgatgagatcacctgttaaccatctaaatatcaatgaaaaacttgcaaactacctaaaaattattctaacactttcacgtttcataagtattagtcttaacgttttatcccatttgccgttttggggtttctcaactttttacattagctcaaccggttagtgcaaaatgttgttggatctaaactagtaaatattcagatacatccaaccaaacaaaaaaagatcttctaaagaaaaaaatattttaatagagaagtgaatctaaactggaaaaagatctaaaaacgaaagatctataaacaaaagaaagaaaaaaaaaacgtaaacacgaattcggatggagccagacagtgtgtattagcaagtcgcattggttgcagaaatcaagaataagaacaaaaaaaaatggtttttaacttattgggtttcggagttgcgtaaggagtcaaccactatatagagacactcctgtctcaatgaagtaatggttaaaaataatggaagaacgcaaaacatggaattgtttttttttttttaataagacttctttctttaaaaaataaataaaattgtctcgtattaggtcgaagaatccaaaatttcaaagcatgattatttgatttatttagtttttgtcaaccttctaaagtatttgacataggagtaggacacgagtcactactaacttttctaaagattttttgctttttattactttatgattttattttatttttcttatctgattatgttacccgattcaactaaaatatctgttattaggtttcgtttcgttttggtttcaatggatcaacagtttatggaaattattcgtggctataaaaaactaatatcagttttgtcttcctttcatgcaaagcaaacaaaaactcttcctctcttctcctctgtttctctttctcttgagctggctcttgtcttgtctactttcattacagtgactctgcatgcttcaggtctcgtctaattcttgaattctcttcttttctgttccgtaatttactttctagggtctctagatttgtgtctcctctaacaaaagatcctatctttcgacaaatttaatttcatcattgacctttgtcgattccattctctctctatctctctgtttcttcgaaaacctagaggttttgaatttaatgattcctttttatgtcaataaatttgcaatcaatgggagctttttaaaatcatcgttatatctataaacaaaaaaacagtaattactcttcttagatctaaaacaattaataaatctttcccttttttctcatcataattttttcgtatttaactcttgtaaaaatttgcttagccgtttcgctttctcaggccccaggtgattcgtgtcttctaggtcagcttgtgaaacctgagagaagccatcttttgtttgcggttacaaactttgccgcttcaatatttcattgctgttttctgggaaaacctttttctagttttttcggcttattatgccttttaactttttgtgcatttaacatttattgttagtgctttgcttagtgtaaagtagtagttctctttgtaatattaccataaggttcagaagtaaatttttctaaaattgttttcttgtgggaaattcagactgatttcagcaacatgcatgggcttaaaatcagcttctaagactgagatttagtgaccagtgtggtggtgtcttgttctctgttcttgggagaacacaaaggcagtgtggagtctggtgagttttctgattcttgaaaagatttataaattttcttgcaaaattagtctttatgttgaattgtgttgcaggtaaaatatgatacatggtttgccatctatgaagtctatcaaatcattgaagtcacttgttaaaagaaaaaccaatgctcaagaagtggtataagcgtttttcctactatatagaattttcgattatgttctcatttatcctgccttcttcggtgactaaagctttggaacatggtacaattgcagagtaaatccgggtggaaaatgaagccctttttggctctcatgtgtacagctcttttgatcttttggtataagaccacaaatattcagtttgaacaaacagaggtactgttggaaccaatcctattaagtgagatgtggggattcgattattagagaagtaaacttctttcttactttgttcagatagaagaaacagattatccttttgacatggctaaggtaacgttttgatactaggagagtcatcatttgttgcgtgttaccggtttaatgtaaagttcacttgtggatggtgttcaggaatctgaagcagttaacgataaattaaaaggcttgcctcgtggaatcatacagtctagatcagatcttgaattaaagcctctctggtctagaggtagtctgaggtcaaaggttagaggcatcaagaatcgcggaatatattctttgaatatctatgtagcttgaggagtttctgatgtttgttgtgattatttaacacagggtgtggaaatgactaaccgtaacttgttggcaatacccgtaggacttaagcaaaagggtaacgtcgacgctcttgtaaagaaggtattgctatttttgctcgagttgatactaatcctaggcattgaagaagaacagaggattcctcttaacgtaaagctcttgtgtctcagtttcttcccgcgaatttcacgattgttcttttccattatgatggaaatatggataaatggtgggatctggagtggagttcaaaatccatacatatagttgcacaaaaccagactaaatggtagttatcttcctcattctctattccctattgttctgcttcaacttgggatatcgaattgtattggatgataactagtttttggtagagtttaagcatgcatatgcatctttaaagaaggtgacatagaaacaatgttttgtttagatg

SEQ ID NO: 5710 - DNA, 3000 bp, Unknown
  misc_feature (1)..( 3000): cDNA_ID_2993923_gDNA_ID_1620812_Annot_ID_57893 3000 nt of promoter + ATG
tgaatagatattttctcctctgcgtaaagccaaagatattagttaatgggaacactataattcaatctactttataatgctctttctttcctaaaataggaaaacaaataaacaaaggtacattatcaatcacgatggtagtggtaacataacaacattaacattcacattaaccaaaaaaagaagaagataagatcttctctggtctaaatttggaaagagtctgcactctcagaatcaatctctcttgttgaatctcatcttagcttcagtttctccactgtaaggagcaacgtgaaaagcgtactgttgaatgatggagaagacgatcatctcaagacatacaagcacattttgcagagcttcttcaagctgatccacctccaaccagaaatgatgcgacttaattaatcccaatcccaccaatatcttcaggactattccctgtgcaacacataattcccaaggtttaagaatggaacaaggcgaaaaattagacatgaatgctttaaacttgacccaatgtagcagtgatcctaaaatctattgagatgagacttttttgtgtctcaagtaccaaccaacaagctctaaacggttttcgttcgctacacaatcgaaagacttagattaaggagaaaaatctcaacgctcagaccatatgcacattacaaaaatcctagacaaaagagttcccctttaaaccttcagctctcaactaaatagcctacggtctgttgttgagctggcaaagctacaattccttgttaaagtagtcctgcaaaccttaatggtctaattcgtggcggtgaaatattataaggcgggaacccctaaaacatcttatgacattctagagactatatgtatctttccattgtctaaacagcagattgaagaaaaatttgaatgtttcctcatcaaactcagttagttgattgaagaaactagtaggcagagaacttgtgattttggcatttggcaggcaaagaaaaagttggaaattaagtatttacctgccaaaagcagaagaacactatccctttgacgcacatgaactttgtaagaggcttatgaggctccaactctttagcaaaaacatggtagaatttcaccaaagaatacaacgccagggaaaccgaaacattgagaatagcagtgaagatccagctcaaccaaactggataaatcccaaggatctgtaatgttatcatcaagatggaacacactgggcggataatacaaaactgccatgtccattgcttgagctgtttcagtgtgaggtaatccagatgtgtggtacggggcacgaaaagagtcattggaaacgaatggtggatttctcgccctttgaattcatctgggataatccgtgcactcatcgatatgtttacataactatacatcaaagccaagaatttagcaatgacctgaaacaaacagaggcaaatacaacaaatcaagaaatatccacacagagagagagagttaatgtagggaaaatgagacatgacagaatctagaaggaacctacaagtgcctcatagcattccttaacggcgtctagaaacatgaagaaaggtttgcttcctttagcatctaacaagcccacaaaagagttgatagcgtaaacaggagccataagcacaataataagaatggctctctgttcattaggtttcttccagtaaaacagatgctgggatacaagctgcatagtgaagtgcatcgagagcaaaacacagaacacggatcccatcaccgtgatctccgcaggagataaagtagataagtcaatcattctgcataaaatgaaacaagttaagtacacactgatcatcacgattcccaaaaaactaacaatggttgtgaattccaatcagatgtagcagctagcacaattatgaagtgtttctagactgaatagaactaaaacatcatgattcctgagatatagatactaattcagaaattcccagtacttaaatagtaacctcactactttgacatactttctttgtctaagtcacagatcttatactctagaaaccccagaatcaaatcattgacgaacgagctaaaagattccaaatttaactaagacacagcaaaatggggctaaaaggagtaactatacgccgaaaacccattactttcaagctcttcaggatcatcaaaatcgaaactttttgtgatactgaacttaagagatgaacaagaagaagaagtagagagaatcagaaggcaaaccttgattgaaacaagagggagattatcgaagaagacgattcaggtagagaacttcaccgagttgtttgttattgtacgattcatcaatggtatagatttgtttgattaaaagaattgtttttttgaccagaatctgttcatcattgaccggttcaaaatcagccgagtcctctttgcgaccaagaaatatacccaagtcctccgtcgttatttgccggccggtttggttttccgtttaaaagttcgaaccgaattgaaatttggttattcattaaaacaaaattggttaggacttaaattgcggtttggtttgatttattttgtgaaacaagcaagaacaaagaaaataacaagttaagaagatgcaaatgtttgacaagattaggcgttaattaaattattgtaagatatgccacacatgacacatggatgatgctgttacatactataagagtataaggaatgtgctttaactaataaattgacgactctttcatcttatgtttatactcgtgttctttttgtcaacttttatgaggaacgtatgagactcgcaatgtcttgcttgcacacaaactcaacatcatatatgttgcttccggttaacctaacttgtaagtccattcttgtctctctatttataatctctctgtgtgttttcttttcaaattcgatgaggttgttatagacaagagaagacatttttatacaaaagagtttatcattatataagtttcaaactttgaagat

SEQ ID NO: 5711 - DNA, 3000 bp, Unknown; identical to SEQ ID NO: 5710
  misc_feature (1)..( 3000): cDNA_ID_3078151_gDNA_ID_1620812_Annot_ID_169107 3000 nt of promoter + ATG

SEQ ID NO: 5712 - DNA, 3000 bp, Unknown
  misc_feature (1)..( 3000): cDNA_ID_3078155_gDNA_ID_1620812_Annot_ID_169106 3000 nt of promoter + ATG
ctacatatatcgaaacacaaaaggttcgagtctaattatgtttcataagaaatctcacatcggaaataagatgtgatataaggtaatatatatggtacattagtcaacccactaatcatggtaaactactattaattgactttgaattggaagttagtgaaacttaatcctatccaactccaaataaattaaaagtttaaaacctattattttattttcagtatctttgtaagatttttggaccagaaaaagtatcaaaatttgtagctagcttcaaacgagcgtcaagccaatcttaaaccaagtaatttaaaacttacttgtgtggacaagcgataagatcgttgcattctgtccacgaagatagatcgtcgtgccataatccctaatatatgataaccattataaagattcttaaaattatagtaaaatatgaataaattagtgtctattacattggtgatgttcttctcaagatcctcttggagaagatccaagttcttgtcgtagttttcttttagagccgtgagaatgatctctctatcccatacctacatattttgtttccttcgttaattttttttttgttttcatgatgaaatttaaagttgaaagagacaaaagaagaagcttacatgatgtagattggatttgtgtttgtaccaacgtaaatctatcgtgtttcctccttcatcacttgtgaatcccacatgcatcggctttttaaggaaaaaaaaaaaaaccatgttaattaaatatttaacatggaaatagagctatatgtgtggaggtgtgaaatgaatcgatgatgagtaataaacctgatgaatatctcccatgaaatgagacaagaacaaaagggcttcggtcatgttatctatgtgattgaacaaggatatattataattttaaaaacttaagttatgcatcaaaatacaaaatacgcagttacactttggatatcatcattatatgaaataaatgaaaatgatgacatacatctacgatcagatgttccttcaccgtaatgctgaagctgagacgtgaaattctggattgctccatccacacacatatccttcaatccatgttgatcatgacaatcccctgtttttaatccggtttggtatttgtaattgattttttggttaactccggttcaagataattagaaaacggattaaggttatctgaaaatgtctcggttgtgacttactagagtattcgtaagagcaggcttggtcgggagtgtcgatgtaatggagatggctggtccaacgatacttgtaccaatgtcggatctggtcaggccacacacacaatgctgataaatctcctttcacgtaatccggtaacagattctctactacatgtgctggtccggcttctaaaagattctggtcacaccacaaaaacacacacatacgaacttttgttatgaatcttataacggtcaaatgactcagatctctaccaaaaaaacttggaatttgatatgccattagacatgtttgtattcatgatcatctacatgagatgttaggcatggtaacgtatagcaatttaaaagtcaatcctaattaaaaatttgtaggtatatctcactaatacatatataagacaagaataaccaaaatagttgcttcaaacaatagatcattaacttaattacctgagcaattctacaagtaagaatatgaccttctttgctccagcttcggacagaagaaaccgaacacaaaatcagtatacctaatacaagaatcaacctcgtggatgatctaaaagccgatgccatatcttcaaagtttgaaacttatataatgataaactcttttgtataaaaatgtcttctcttgtctataacaacctcatcgaatttgaaaagaaaacacacagagagattataaatagagagacaagaatggacttacaagttaggttaaccggaagcaacatatatgatgttgagtttgtgtgcaagcaagacattgcgagtctcatacgttcctcataaaagttgacaaaaagaacacgagtataaacataagatgaaagagtcgtcaatttattagttaaagcacattccttatactcttatagtatgtaacagcatcatccatgtgtcatgtgtggcatatcttacaataatttaattaacgcctaatcttgtcaaacatttgcatcttcttaacttgttattttctttgttcttgcttgtttcacaaaataaatcaaaccaaaccgcaatttaagtcctaaccaattttgttttaatgaataaccaaatttcaattcggttcgaacttttaaacggaaaaccaaaccggccggcaaataacgacggaggacttgggtatatttcttggtcgcaaagaggactcggctgattttgaaccggtcaatgatgaacagattctggtcaaaaaaacaattcttttaatcaaacaaatctataccattgatgaatcgtacaataacaaacaactcggtgaagttctctacctgaatcgtcttcttcgataatctccctcttgtttcaatcaaggtttgccttctgattctctctacttcttcttcttgttcatctcttaagttcagtatcacaaaaagtttcgattttgatgatcctgaagagcttgaaagtaatgggttttcggcgtatagttactccttttagccccattttgctgtgtcttagttaaatttggaatcttttagctcgttcgtcaatgatttgattctggggtttctagagtataagatctgtgacttagacaaagaaagtatgtcaaagtagtgaggttactatttaagtactgggaatttctgaattagtatctatatctcaggaatcatgatgttttagttctattcagtctagaaacacttcataattgtgctagctgctacatctgattggaattcacaaccattgttagttttttgggaatcgtgatgatcagtgtgtacttaacttgtttcattttatgcagaatg

SEQ ID NO: 5713 - DNA, 3000 bp, Unknown; identical to SEQ ID NO: 5708
  misc_feature (1)..( 3000): cDNA_ID_2174315_gDNA_ID_1620812_Annot_ID_169105 3000 nt of promoter + ATG

SEQ ID NO: 5714 - DNA, 3000 bp, Unknown
  misc_feature (1)..( 3000): cDNA_ID_1989625_gDNA_ID_1620812_Annot_ID_169101 3000 nt of promoter + ATG
ttcgtttcgtttagttagcgggcttgatagattgacgtatgcatgtgggtgttccatttagtaataaatatataaattgtatgatacaaatgaggacatcaatttttaagacgtttttgttagggttacaagtctcatggtgacttcgtggtcccgtaatttatcacttacattattgacaaatgacaaccacaagttacttgattttggactttatcacgtagtgataaaatgaaataaaagatcttcgactctttcttttctggctcgaaaatatcttctacctaagagttaagataaatcaaaggcgtcttctaggcaataatcaatggatcaaacaattccaaaatgtttatttccttaagacgtggcgaaggtcgagtttcaattctcaacgaacatacatttgaccattatttaaggtaaatgtcgggtctaaagatctctcgtgtccctgtgctactagctgctctgatttatatcaatatatcaaaacgaaggatctctttagttattgtttaacatttgcagatgagttacaaaaaaaatatcaaaacgtgtaaactgtaacataaaatgtaagtagtaacgaactataccctccttgaaactatacaaagatttgttatagactgcaacttatgtgttacctacatatattatatataccatattcggtaagatttctatttaggaaatgtattgaactaaataattagattgaattctttttttagagaaagtcatacatatttgcatttgtattctatttagtgaaatattcatcctctgcaaatttgtaagccgtgccatgaggcccatgacggttgaaccggccttctatacgaaatcagatcatgttcgagcatatcttttttactgccaacttgaaccgcttctttaaatcgccaaaaccaacccctttgccgatttgtagccaccaaagcggttagtattcaaccgcagtaattgcttgttaccaatttaaccaaatttataggaagagttagtgatcaaagaacttggtgaacggtaaagtaagtgtaacattacagatttgattaacaaatgtgattgttacaacaaaactcaacattatccaattgttaccctccatttcaacagcagaaaaatatcaaaacgctcgagaatccgaatcatcagaagctctaaaagcatgcttttagaggacaacagacatttctactcctatcgcgaagtcttgatccctcttgcttgtttcttcttatcccttttcttcatagttttggtggttgaccgtctcctgctctgtttcatgggtttggttttcctcacaggcacaggctgctttgtggaagctttggccgtggaacctgattctgttgattgagtcttctccttgcgaataggctcttcctcttcacgagatatctcacttgttgtcacagttactttcaactcgcctgtatcatacatcgtcgtggctttcatccacaaagaaacacaacaaatatcagaacaaagccagtcaaagcaaaatcatactaatgcaaaagcaatcaacggagaaaaagacatcaataatgcttgtgttgcaaacttctccattccaatcaaccagctttcacattatggcgacaaactatcaatcattgcgtaatggaaaacaaaaaaaaaaaagattacaaaaagattaccagatgttgaagcatcaggctctgcttcttcatcctctgcatccacttcatcttcagcttccccatcttcattatcctcgccattaccagcaaccattagctcttccaatttcctctgcaaagctcatataccagattcagaacaataagagaaaagataggctcaagtccaagaatcaaaatctacataataaaaatgattgatcatcaacaatctctctgacatctcatccactattaatcactcatacatcacagacactatcgaaggacatgtaaaatttcgattaacaattgcggtcaaaacaaaagaagcactcaaatttctatagaaacaaatcagaacaagctcattgcacaacctcttaccaaaaagacagtgtttttaagctccagacaaatctaaatttagctaaacaaagaatttgagactaatctataacgcatatcagaataagaaggaacagttagatgcttacattcttacgggcctcgattcgtttccgcctaaaagcttcctcctgctgcttctgagcttcctttcttcttttcttcttcctcttgtgaaaaccagtcacaaaatccctaccaacaaaacaacacacaccagaaaactcactaatcatgcgaattcaaagattcccagattgaatcagcagtaaagttagaatttttattgtacttgagatctttctcgtcaaaagagacggtgaggcttttgttcttgcgagctctcttcccaatgtgcctagcactagtcggcgtagccagtgaacccgcctcctcattatgcaagcctcccgtcatcaccagatacttcctccgatcggaaacgaagcggttcaggtcaaaaattaggttttgcgaggtttaatcaaaacaagcctatgaagaagaagaagcaggaagcagaaaaaatggccttttaattgggctttaggctttaaggcttggcccattataagggtaatattgtctttgactaaatggagctaatttggttaagaaaaagttatgccattgactaaatttggacaattaccaaaagtggcttgtgtctctcgtttctaacaaaacaaaataaaccttcccacaaaactaaaagtttttctttttcactcatcaaaataaaacaaaaaaaaaacttcctagcatcttcttcctcttactcatgcagaggacgacgatggtgatgttcatcatcataatcaattgcttttgaacaaaaacaaaatcaaagaaaaaaacacataaaaccccaaaaaaaaaacttctgtacataattaagccagagaaagaaaataaagacagagtaaaaatg

SEQ ID NO: 5715 - DNA, 3000 bp, Unknown; identical to SEQ ID NO: 5707
  misc_feature (1)..( 3000): cDNA_ID_3078130_gDNA_ID_1620812_Annot_ID_169099 3000 nt of promoter + ATG

SEQ ID NO: 5716 - DNA, 3000 bp, Unknown; identical to SEQ ID NO: 5706
  misc_feature (1)..( 3000): cDNA_ID_3078166_gDNA_ID_1620812_Annot_ID_169094 3000 nt of promoter + ATG

SEQ ID NO: 5717 - DNA, 3000 bp, Unknown; identical to SEQ ID NO: 5704
  misc_feature (1)..( 3000): cDNA_ID_3078178_gDNA_ID_1620812_Annot_ID_169091 3000 nt of promoter + ATG

SEQ ID NO: 5718 - DNA, 3000 bp, Unknown
  misc_feature (1)..( 3000): cDNA_ID_1989620_gDNA_ID_1620812_Annot_ID_57896 3000 nt of promoter + ATG
agaaaaaaaaagaaagaagaagaagaaacgagaagccagtgattgctccatcatctctgccaaatgacgtcgtagaggaaatcttcttacgatttccagtgaaagcactatttcgactcaaaactctctcgaaacaatggagatcgacgatcgagtctcaatccttcgaagagagacacttaaagatcgccgagcgattccatgcacatcatcctagggttatggtgatcactgaaaaagatcccctaaaactattgcctcgacctcgtccagacgcagacattggttttaggttattctgcttggaatcgggttctcttctatcctttattcttctcaatttccctcaaagtttcgccaactatatctacgtttctggatgctgcgatggccttttctgcgtccattcaccgagatcgcaagccatgtatgtagtaaatccggctacacggtggttacgacaacttcctccagctaggtttcagattttgatgcaaaaggccacttatagagattggttagacatgaagtcagtctttcatctagcattcgtgaaggccaatgattataaattagtgtggttgtataattctgacaagtacaatgctgatgccttgagtccaaacgagggagttacaaagtgcgaggtttttgactttagggcaaactcttggagagacttgacttgcactccaagttatcggatatttcatggccaaataccagcatgtgcaaacgggtcagtatattggttgacggagccatataatgataaaatcgaagtagtggcttttgatattcatgccgaatcattccggttgctgcctaagatcaaaccggctattgctggttcagatccgatgcatattgacatgtgcactctggataatggtttgtgcatgtcgaaaagagaaccgaatacgttggtccaagagatttggaggttgaaatcatcagaagactcatgggagaagatttgtactatagatttgctttcatgttcttcttcccggactcagtttcgtgatgaattttactgggacgagcaggatttggttaatccatccacacctgtggcgttatgcaagaacaagacaattttgctctcacatcgctattcccgcggtctgctaaaatatgatcccctaacaaagtctctagcttcattttaccaacgtcctttgtctcggagaaaagtttcttattttcaaagtttaatctctcatatctaaacaaatctacctactgattttgacgtgtttggaagagacgagaagagcttttcttaaaatatatacagtattgggattatacatgaatactagccaaaacaagaagttagtgactactaaataatgaaagcaaaaaacaatctaaaactattttactatatcacataataaaattgtacttttcaatattcataaagtacgtttgagttgatttcagattttatgtcaatcaatctgtggaagtaacaaacatttcttatcgaaataaatgatcttctttttacttcaccaaataaagtcgttgattgggattgacccttattatgcaagaaaacttaaaacaccaaaacatgggaagcacttagatcatgttatgctcttgtccaaaagagagacaaattataacacgggaactagagtaataatttataactataaaaaaacaatttaatacaatacaagcaaatgtcacatatcataaaccaggagatcttcaccaaatataacttttacaaaccttgattccgtgattatctttttgggtttttataatgtgaaaaaaaaatatcttactactatatgattacattttggaagtgagaaaacagttgaccaaaaaagtgtgaacattgtattgaacgtttaaacgcaaatacatgtgtcgtaggaacaaaaacactcaaacacaaatattcaaaacgtgattaacagttgttaaatcaaacttcaatcaacctcttctttcagatcaattaatctacccacaaggccacaaccaaactttgaaattttcattgtctttttttttagaatcaagaagtggtagttaattagtcatttagtatgatctagttgtagtagattgtatccgtgtattattggttatacgaaaaattcaatgtggtataaaattcaatattaattcaggccgttgagttggttatattaaaatggaattagttgacgagtattttatttatttcaatcaagttgtgtgattgacatcttaaaaaaagtgttaaaacgtattgcgattaaccagtaatacttgttatttttctttttcgtcaaactgaacatagtactttttaactttgttttttttttttcctttcctgttactcaatcatgataaaaacaatattttaaaaccgacaataaaaaaacaaaacaatattttaaatttgtaatccgttagttgtgacttgtgagtgctatatttatatttaggttgatttatacgtgtagtagaaaaggaagggtattttcgtcagaaaaagtaacgacgagggtccaatattctgaagttttcaacgatttgtgtgtgtattattctcatcatcaatgacataaataaacaaaataaaataaaacataacaaccggaaatgtgtttttttttttaataaagaattgaaaatgacagaatctgagaaaaaggacgaaaaattcgtcgctttacttttttttatcttcgtctctgttttgttcgtctgctcgtgccactctttcaaaaaatctcttcttttctttctaagttcttctttaaatctctaatctcagcaggaagcaatctcttatgtctcaagtttctattttccgaatctcccagaaatcttcaactctgtcttgtcgtctagtcacattttgaatttttaaaccagctccgacatttttttgtttttaattcttttcgattcataacaaaggctggtgatttggcttcagcttcctagtcgcatgaatctactgaaatcgagtagaaaatg

SEQ ID NO: 5719 - DNA, 3000 bp, Unknown; identical to SEQ ID NO: 5714
  misc_feature (1)..( 3000): cDNA_ID_1989625_gDNA_ID_1620812_Annot_ID_57889 3000 nt of promoter + ATG

SEQ ID NO: 5720 - DNA, 3000 bp, Unknown
  misc_feature (1)..( 3000): cDNA_ID_1989627_gDNA_ID_1620812_Annot_ID_57886 3000 nt of promoter + ATG
ctgctcgtgttttcgaacccattgatagtaaactcaatgttctttatcacaccatgcttaaagggtttgctaaagtttcagacttggataaagctttgcaattttttgttcggatgaggtatgatgatgtagagcctgttgtgtataacttcacttatctcctcaaagtttgtggagacgaagcagagcttagggttggaaaggaaattcatgggttgttggtgaagagtgggttctcgttggatttgtttgccatgactgggcttgagaatatgtatgccaagtgtaggcaggtaaatgaggcccgcaaggtgtttgatagaatgcctgagagagatttggtttcttggaatacaattgtggctgggtattcacagaatgggatggcgagaatggctttggaaatggttaagtcaatgtgtgaggagaatctgaagcctagttttatcactattgtttctgttttgcctgctgtctctgctttgaggttgattagtgttggcaaggagattcatgggtatgctatgcggtcgggatttgattctcttgtcaatatctccactgctttggttgatatgtatgcgaaatgtggatctctggaaactgctcggcagctctttgatgggatgttagaaaggaatgttgtttcatggaattcaatgattgatgcctatgtgcagaatgagaatcctaaagaggcaatgttaatttttcaaaagatgttggacgaaggagtcaaacccactgatgtatctgtcatgggtgctttgcatgcttgtgctgacctgggtgaccttgagagaggaagattcattcataagttatctgttgaattgggtcttgatagaaatgtttctgtagtgaactctttgatctccatgtattgcaagtgcaaggaagttgatactgctgcttctatgtttgggaaattgcagagcagaacccttgtctcttggaatgcaatgatattaggatttgcacagaatggacgtcccatcgatgctttgaattacttcagccagatgcggtctcggacagtgaaaccagacacatttacttatgtgagtgtgataactgctatcgcagagctgtcaattacacatcatgcgaagtggattcatggggtggttatgcgaagttgtctggataagaacgtgtttgtcacaacggctctagtcgacatgtatgcgaaatgtggtgctattatgattgcaagattgatttttgacatgatgagtgagcgtcatgtgacaacatggaatgctatgattgatggatacgggacacatggatttgggaaagctgctctggagttgtttgaagaaatgcaaaaaggcaccatcaaaccaaatggtgtcacatttctttctgtcatctctgcttgcagccactcgggtttggtggaggcaggactcaagtgcttctatatgatgaaggaaaactacagcatagaactgtcaatggaccactatggagccatggtcgatcttttaggtcgagctggacggttgaatgaagcatgggactttattatgcagatgcccgttaagccggctgtaaatgtatatggtgccatgttaggtgcttgccagattcataaaaatgtgaatttcgctgagaaagcagcagagagattgtttgagttgaacccggatgatggtgggtatcatgtgcttcttgcaaacatatatcgtgcagcttcaatgtgggaaaaagtgggacaagtgagagtttcaatgttgagacagggtctgcgcaaaactcctggctgcagtatggtggagataaagaacgaggtgcatagcttcttctctggaagcacagcccatcccgattccaagaagatttatgcgtttcttgagaagctgatatgccacatcaaagaagctggttatgttcctgacacgaatttagtcctcggtgtggaaaatgatgttaaggagcaactgctgagtacccacagtgagaagctggctatatcttttggattgctgaatacaactgcaggtacaactattcacgtaagaaagaacctgcgggtttgtgctgactgtcacaatgctacaaagtacatttcccttgtgaccggacgggaaattgtagtacgagacatgcaacggtttcaccatttcaaaaacggtgcctgttcgtgcggagattactggtgacatgaccctccaccgaaaacattgatgagcattatatatccgggagagaaaactaatttgaggaataacaagacctggtctgaagtagaagcctttgtagagagctacaatttgctgtatcataaacaaggtttaagctgatcactacgaatagagagctacaatatgtgagcgaagtctcgtttgcaagcgtccaagtaaaaatttattcatttttgcagctctgtttttcctttctttcccagtacatatgaaagctgaaaagtgttgttgtggaattggtagcggaaaaaaaattatttcttgctacagagagtacaaaaatagaaaaattcaaatcattaagatatgttatgtagtgtgagacaaaggcttattttggacagggttgatgtaagatggagtttttaaattagaataaagtattacaaattttttatatggtaacacacctaaggacaagattgcatcttcttcatcatttcggtttattataatgcctattcaaagaacgaggtgtcaaatataaaacaatgctatatcttatgtgtgaaacagacagaacctctactacaaccagaagctctgctttctgcgtttggatctttaaaaccctaaagagagagacctaggttaaacacacatcacgacaggggaacaaagcgaatcaaatctgttgtgcagctgtaattgatgacctgcagtggttctgtctgtttcacattatgggtaataacattatacgatacatctagaggagtcattgttttcagtttttcaaaacaaaattttattcatacattcagatctgaaggagaactcttttgaacac

SEQ ID NO: 5721 - DNA, 3000 bp, Unknown
  misc_feature (1)..( 3000): cDNA_ID_3100768_gDNA_ID_1620813_Annot_ID_50610 3000 nt of promoter + ATG
aacatccgccgcgcgagaactggcgggaaaattcagccatcgcctcgaagaaaaaacctcccaaatctgagaaatcggaaaagatgacccacaccgaaaccctaaatctgctcgatgaaatcgagtcttttgtctccgatcagcttcaagtggtaattgccgatttccttctccatttctggattccttaatttaactagttagggttcttcgatttccacttcagtgattctaaaatttgtcgaaactcgtttatttatcatcggaatagagttaattgttgaattctgaagcttctgattgtagtttgttgttgtgttagtcctgagatcggaggtgttatgtaaaatcgagtcatttggttataactactgattcgctcaatccatttggtttcaggtatcttacaaatggctgagtcgaaatttctcgctttcatcaaatacggccaagaggtacattgttccattctctattaggagctcattagagtttagctacaaatggcagatttggttttttgtctaataaccgtgtctcgtttgttattaggttgctcaaggattttgtagagaaacatgggaagggtttggaagttgtatatattgtgtccggattgctaaagaacggaccttccgattaccacgcaaggcttgcttctagtaccgaacttccaggtctcattctcattcagtgacatgttttctctttgttatttttcatgactgtcttctgtataatgattaattttgctagtcttttggtttttcatcttactgattctattttcaccaagtagttgtacaagtaatttgctgcgttgtctgtagttcaagatactatctcagatgttgttttgattatttctctggtacaagtgagaagttaagtgatggcaaaagcgaaagtgatttgactcttccttgtcattacttctatgcagaagtagagaaagagttcaatggaaaatattcagtacatatctacagtgttcaagctagtattccaatggatccagcagccatatggaacactgagtttgtacaagcagaagaactcttcaggcagccttctgccactgataattgtttgaaaggcaacaggtacaacttttctgttattgtatgaaagctgtccagtactgttgaccagccttgcccattctaactagagaggtgtgacttttataccaggttttgtggcgtctccaattcttgtgtgaagcgcaatatagagggagccactgaaaatgttaccgccccgcgaactgaaagtgtgagaactacaggacaatctaaaagtagttcaaattttcaaaagagtacagtgccgtcaaaccagggaaagaatttccagcactcaagctctaatgttggccatcaggctaagagtgaatctattgctgctccagctaaaaatcagtctgcgaaatcctctttggataaagaaaaagcttttcatgtgcccgctaataaaaagaatggacagggcgagaagagcgtgactggaactggtggtttgttgaaaaatatgtggggccgtgtgcctgtgaaaacagaagatgattctccaacagtagatgtgaaaaatcatattactaatcattcgggtatgttttctaatctatccaccttggtactatcaatggcttgggtttacttggtgcctgtttgagctagttttgttcctctatataatgttatgtaattggtgcagaaccccaaaaaccttctcatgatgctgacaagaagggaggcagcgatgatgagactcgagacgccaatttcatgagagcgcctaaagataacagaaaaagaaaggtgatatttgatttttcagatgacgagtatgaagatgtaatcagcttagcatctcctagtagtccaaaggttaattcacgtccagatgtcgaactcagttcggaagattcaggtccagagaagcctgacgcagatgtttctccagagataaaatctgaggaaccagaggccagcaaagaagacaggcaaaacactgcttctgttgatgcttctacgactttgtcaacggagaagatccaggccattggttctgaagctgaagtgaatccctcaaagagaagaactactgcagttcctagttcgccgaaaaggaaaaaggtgttgaagtcacggattgatgatcgtgggagagaaggtatgctaagcatccatatcgttctaaatagtaacaaaaataaacaaacgtatgtcaatgtctcttacttaaacaattctcttttggctggatatagtaactgaggtagtgtgggaggagacagaaacgaacgcaaagaagaaagaggacactaatacaagtaagaagttagatgatggcaaaaccgcaaatgctgttaacaggtatgttttttggagatcattctgtaagcatgtttgttgtgaaacccgaatacaatattatagcatctatctgagtttcttatttcagggcggttgcacagaagaagagtccggccattggaaacacagcagcgacaaacgcaggaggaaaagcgggaagcaagaaaggaggaaacgtcaaagatccaaagcaagggaatataatgtccttcttcaagaaagtttaaaaaggcttcttttttgtatttattgtttgctaagtttgagttgaggatattataggaaaatcagaacttggattcatctgactgtatgttctgatccattgtgtctaagaaaaaaaacttttgagccgtttcttattaaactagtcatgtcataaaaaactgtattatttcaggtttgagtgtatcggtgatcatcgtcgctggcttctagaaccatttttttattctgaaaacatgggccccactctgacaggtaaattcgtaattaataaaaaataaaatacatatccacgtttttggtgttacaaataatttagaaagaaggtggattggttatggaagaatgtgcaaggagagtaatttgagatatacaacttgggcagaagaatcagatg

SEQ ID NO: 5722 - DNA, 3000 bp, Unknown
  misc_feature (1)..( 3000): cDNA_ID_2108291_gDNA_ID_1620813_Annot_ID_50613 3000 nt of promoter + ATG
gcggacatttgactttaagaaagaaaaagcgagatttgcgctgcggcggtgtaaaaatcagtcgtaaaatacacgcgtttgaggagcgcgtgtgaattttgacacttgtcagctgtgtgttagacagatgttgcggcccatgggccattgtcgtatcttattgcggaccacaggttcgtagaagcaacgcattgtataatttttcttcatgtttcataagtctaaaagtaaacaagcctgttaagtctcgctgtcttgtttaacagctaggccgatggatgcatttttctctagaggcttctaaattaaaattggccaccagaaacactatcttatgcaacgtcgagaatattgctaaagatgacaggaacaagacataataatgacaaaaaagaagaatgtattcgagaaaatcacgactcttcgacgacttctttctcaaccaattcttggtactttgttgttgccttttcttcaaacttttttcttacattttcatcactactttctctatttgctacataactttttttacatgttcttcaatttatgatgtcgcaatagaatttggacttcatgtgaaggaaatagaagaaatcacgtgaatggatccctaagcagaagaaattttataagtttctctatctacgggacaattgcaaaggcaaacttaattcacataaatatcatccaataattgctagacaatggtcccagaagttttttcccctcattgatgttggactactagttgtacacaacagagtataatttataacaccactgaatacgtaaggctgtgtttaacaatataaaaaaagaatctaacctcactgagaatacatgaccttcgtggcaggttttacttgacccagttctggagtataaactgttgcatcaaaatcgccacaatgcttcccaagcttatgttgatcacgttgactacatcattgtttagctacacatagcaaaatagtgactaacatgagacagaatacagtcgagatcattgcattcttgtttagttggtaactaattgcaaggaatggattcataagacgaaaacttcaaaattctgtattgaatggaaatcgttttccactcaagccagttatctatcagtctttctgcaagaagtgacggtatattcatttgattatcatcttcttgcattgacaacaagtagacagagtgagatcaataaaacaaaaagaagagagttcattgaagtgagcatacccatttgaatccttctttgtcttgaaaagaagcacctattatgctctctccaagattggcaatctgggaagctagtacacatacagctgcttctggaggagttatctgtgttcaagatatcaaaaggaaaagaagtttaaaaatcgtgtaatgataacagtctttagtagcataaagaagctgtgaagggaaattttggtagcaaataacactattacctgacccaggaagcagccaacagatgcaagaaaaaatgatgctaaaagtccagccaatgttccttcaagactcatagctccctctgttcctcttggtacaatcttaaatgtcgtagctaaatacctgcgaattggcaatggttagtaagatcatttcagttgtcgattggattcatgtcatgacaccacaagtccatgccatacatcagacagaaaacagacacagaccataacagaagaggctatagctggataacagtagcatactcacgttgtttttccataagctttgcctatctcgctcgagacagtgtcagatactttagtgcagaaactggaaacaaaaccaagccggaaaagctgggaaaaagctgctcctcccacttgatatattgaaagaaaagcacagacacaaccagcagcacttgaaccaatcacactgcgtggtcctcttctaccctttctcttttcggccacaccttgtgcttccttttgcgtcattttaaccttcgttgccgctgttccctgtgatattgtaaatcatctaaaccaacttcagcgccagaatcaattgcaaatttactgttactatttccagctctggggtgaaacacgatattgaaatctaaaacttaaagcattgcagagaaaagactaagtatctcaatgttgagcatgatcagaaaaagtagctccttaatctgtaaacgtgatttaggatctctaacacgtccacaattcctaaattaaacaataacacatctaaaatctaaggacattcttcattcatcagctcgaaatcaaaatcaaagcagcgaatttctacgttctaagagtcagttaccgaattacattcaggttgatcacaaatgcacttactatgacgaagtaagcagcgactaagaggaaaccagcagagccataagctctccaagttaaagtaccaagcaaaaacgcggcggcgatcccagaagcggacaatccggtaacaagaagcggtgaaccgagaacaaaaatcaataaattgttagccacagctgatttccaagttggtgacgccgattgaatcagtttcatcgcctccgtcatcactccttccatcgatgcagccgccgccgtagcaccgtcggctctacttcccgacgaaagcattccgttggaaagtggttccagattacgtcgtccaaatctgtaagatctagcgaatggagaggaagaagaaaatcccgagaattttgggaatcttagtggtaaagctgatctagaagaatttaagagtagagttgacgaaatcgttgccatgacttagcttgcttccgaagaagacctttctctcctattgagaaaaaaaaaacagtatttcgggttgaatccggagctccgaaaaaaacccggatccttaacccgtgttgtgtttatttttcggtcgtattcatcagattatttacggtgttgccactactactatttactgagaacccaatcttatccgagaaatcggaaagagcagaagaaatttgcagaagagagaaaaacaaaaatg

SEQ ID NO: 5723 - DNA, 3000 bp, Unknown
  misc_feature (1)..( 3000): cDNA_ID_2992588_gDNA_ID_1620813_Annot_ID_50614 3000 nt of promoter + ATG
gaaaagcgagatcttcttcatcatcaaaaattgcagtttccgcccaagtcaaagacgaagagatgggcttcagattacaacgaatgggctttagtaaacaacaatccatgagtcatgccgagagagtcataattagtccaccatgagtcaggttcgttgattcttaatttccttttctttttttttttttttaataaagattttgatttattttatgtttgttattttaaaagtttttatttttttggatgctaaatttatataatgatacgaaaactaaccggattttagatccagcattagtcgttagcgattccaaatattcaacttgttttcatattattatgtagatttagcattcaagtttttcattcggatttttaaagtactttttaaaatttagattttgtttattcggattttaaaaatcttttttcatgtgtttattttttaaaattatattatttaatggatactaaatttatataatgatatgaaatctaaccggattttggatccagcaatagtcgttagcgattccaaacattcaacttgtttttcctattattatgtagattaaacattcaaggttttacttcgcattttttaaaatagttttaatattatttttttggatgctaaatttacataatgatatgaatactaaccggattttggatccaacattagtcgttagcgattccaaacattcaacttgttttcatattattatgtagatttaacattcaagatttttatttggatttttaaaaatagtttttaaaattttgattttgtttattgtcggattttaaaaatcttttgtgtttgtttgtttgtttttaaatttatttggatgcaaaatttacataatgatatgaatactaaccggattttggatctagcattagtcgttagcgattccaaacattcaaattgtatttcctattattatgtatatttaacattcaaattttggatccagcattaaaaatttcagttttaagtaatgactcgattaaggcatgaatattagattttccttgcatctgtgatctcattgggaaggtttgttaccaattgaagaggaagtttttgttaatggtgactactgttgcttatggcatttgtattcattacatgtcatctttttcatgttgaagaagatattcagtagcaaaaaaaaataacgagaaatatttcaaattagaaagttttgtagcataacagagttgatagaagcgaaaacaagaatctgtaaagcctcctctggttttgggatgaagaaactacagaaacctgagaagaaaaaactctctgcgcttggcgataatggaacagtggtggagcttctatttttgcagctgtattctcttgtccctgataggcagatcaagcggtttctgggcctcgtgaggatggtcagggcctttgtacaccttcaggtgattgaacagagctctcccaagctgccacaaaatggtcagaccaaagttaagagggagttggaaaactagtaatcaatcaataccaatatcgcaacaagtagtttccaagttcaatccataagtttgaagaaacacggatttgctaagtgttaagacttaaaggagactaataaagagctgtggattatgtatctaacccgtccctttggaagcattccacgaacagcatgctcaacgattctttcaggaattctctgctgcaattgatcaaatgtctctactgtcataccaccaggtcgtcctgaatgcctcctgtacagcttttggttacgcttctttccagatacagcaactttctcagcattcacctttaaccaaacaattgaaaacagtattagaggtaccaagttacaagcattgcccaaacatctacatagaggctctacatcttgctgctaatgtgaatcttactaaaaccaaatcccaaggctcctccttcaggaagaaattaactaaagcagcacatcaaatttcttattctctacagatagctcaaagaaactcataccacaatcacaaaagctcccatgtcgacactaggagtgtaagaggcaagattcttcccacggatgtgattagcaattgtcgatgccaatctaccaagaattttgtcagttgcatcaaccacaaaccagggcttgtccgtgttcacatggtctgaagcttttggataccatgtcgtgttccagatgtcctgtaaaccatagaatacactcaataaaggtttcaagccaaagacttttaacttctctccaaccaaacattaataatttcataaaacgtccaagttaacaaattcagaagaataaacatcaattttcgaagccaattgatgcagacaacacagctaatgagtcaaaggcaaaatccactacttaataaatcgcaattgggagaagaaaaaaacaagccatacttcaaattcaaagcaagagctaaagtgcgacactttataaatgcgtagatgctaaacacagagggagatagaaaaattatcgttacagggccattagcttcttcttcgtcgaacatccatcgttgattcgccggaacaagagaagtcgtcgtcgtcggctcagcttcacacttcacttgcaatcctcttttcgaattcgcataaatgccgactcgtaccgacggcttcgagatagccgttaaagagaaccctaaaaacggagactttctctcacttccggaggatttcacggaagaagaagagagtatcaccgtcgaagacgagcaaagaaccgccatttttgtttttctctcttctgcaaatttcttctgctctttccgatttctcggataagattgggttctcagtaaatagtagtagtggcaacaccgtaaataatctgatgaatacgaccgaaaaataaacacaacacgggttaaggatccgggtttttttcggagctccggattcaacccgaaatactgttttttttttctcaataggagagaaaggtcttcttcggaagcaagctaagtc

SEQ ID NO: 5724 - DNA, 3000 bp, Unknown
  misc_feature (1)..( 3000): cDNA_ID_1829164_gDNA_ID_1620813_Annot_ID_50615 3000 nt of promoter + ATG
acattgagatacttagtcttttctctgcaatgctttaagttttagatttcaatatcgtgtttcaccccagagctggaaatagtaacagtaaatttgcaattgattctggcgctgaagttggtttagatgatttacaatatcacagggaacagcggcaacgaaggttaaaatgacgcaaaaggaagcacaaggtgtggccgaaaagagaaagggtagaagaggaccacgcagtgtgattggttcaagtgctgctggttgtgtctgtgcttttctttcaatatatcaagtgggaggagcagctttttcccagcttttccggcttggttttgtttccagtttctgcactaaagtatctgacactgtctcgagcgagataggcaaagcttatggaaaaacaacgtgagtatgctactgttatccagctatagcctcttctgttatggtctgtgtctgttttctgtctgatgtatggcatggacttgtggtgtcatgacatgaatccaatcgacaactgaaatgatcttactaaccattgccaattcgcaggtatttagctacgacatttaagattgtaccaagaggaacagagggagctatgagtcttgaaggaacattggctggacttttagcatcattttttcttgcatctgttggctgcttcctgggtcaggtaatagtgttatttgctaccaaaatttcccttcacagcttctttatgctactaaagactgttatcattacacgatttttaaacttcttttccttttgatatcttgaacacagataactcctccagaagcagctgtatgtgtactagcttcccagattgccaatcttggagagagcataataggtgcttcttttcaagacaaagaaggattcaaatgggtatgctcacttcaatgaactctcttctttttgttttattgatctcactctgtctacttgttgtcaatgcaagaagatgataatcaaatgaatataccgtcacttcttgcagaaagactgatagataactggcttgagtggaaaacgatttccattcaatacagaattttgaagttttcgtcttatgaatccattccttgcaattagttaccaactaaacaagaatgcaatgatctcgactgtattctgtctcatgttagtcactattttgctatgtgtagctaaacaatgatgtagtcaacgtgatcaacataagcttgggaagcattgtggcgattttgatgcaacagtttatactccagaactgggtcaagtaaaacctgccacgaaggtcatgtattctcagtgaggttagattctttttttatattgttaaacacagccttacgtattcagtggtgttataaattatactctgttgtgtacaactagtagtccaacatcaatgaggggaaaaaacttctgggaccattgtctagcaattattggatgatatttatgtgaattaagtttgcctttgcaattgtcccgtagatagagaaacttataaaatttcttctgcttagggatccattcacgtgatttcttctatttccttcacatgaagtccaaattctattgcgacatcataaattgaagaacatgtaaaaaaagttatgtagcaaatagagaaagtagtgatgaaaatgtaagaaaaaagtttgaagaaaaggcaacaacaaagtaccaagaattggttgagaaagaagtcgtcgaagagtcgtgattttctcgaatacattcttcttttttgtcattattatgtcttgttcctgtcatctttagcaatattctcgacgttgcataagatagtgtttctggtggccaattttaatttagaagcctctagagaaaaatgcatccatcggcctagctgttaaacaagacagcgagacttaacaggcttgtttacttttagacttatgaaacatgaagaaaaattatacaatgcgttgcttctacgaacctgtggtccgcaataagatacgacaatggcccatgggccgcaacatctgtctaacacacagctgacaagtgtcaaaattcacacgcgctcctcaaacgcgtgtattttacgactgatttttacaccgccgcagcgcaaatctcgctttttctttcttaaagtcaaatgtccgccacggcgcgcctgaagaagactcttgcttgccctttttcttactttttttcaatgttttttcacttttttggttaaattctctaacatgggtttactactgtctcgataatagtagtaagtttgtaactttcttatttctggaactgatctagttctaaaatatgcttaattctttattaagttctaaaagaactactttaaaaattaataacctattattaattacgacaacatctaactaagccattaaatacaatattcatcgttttgcgtgagtccttcatacatgtgacgaatgtcccttccccacaaaggcacaaacctaacctaataaacaataccaaaaatggaataatttgatttttttttgaaatactatatgctagcgtagaatcaaacaaaatatgtaaaacgatatccttaaaacaaaatgtatactaaacaaatattagtttgccaaagtttgacgaaataataaaaacctaaatggttcgccgtgagtaagttcccatcttcttctcgaactttgccaaagtttggtattgaaaaaataataatattaagacacagagagagagagggagaagaggatctctgtgtgtcgtccaaatttcaaagtgatgatgttgtagctgtgtggtagcgattggcttacacgcgtcatactttaattagataattttatttccttattacttaccctctcttttctcacaaagagtcatcaccagctctgatcaaataaaagcgttttctcttcttcttgctttcacagttacccaaaagtgtgattaaatctttcttttttttgctttccttctctaatcgttggtgtgtacgctaaacctagatttcgctggattgtttgagta

SEQ ID NO: 5725 - DNA, 3000 bp, Unknown
  misc_feature (1)..( 3000): cDNA_ID_1829156_gDNA_ID_1620813_Annot_ID_50617 3000 nt of promoter + ATG
atgggagttcgagctaaaaaagagtttgagttgacattaaagattgagccatcatgctaatcaaccattgtcatgcagttggtttagccagtccagtagaaagtgactatttaaatgctatatataccaattagtgttatgcttagaaaaaattatttacggcttgtaaaacacagccatatacatagtctgaagataatttggattggatctaagtaatattataaaatgaaagttcaattttatttctatttctgttgcagtaaagttttgaactttcgtgcaaaaactattcttaataatttagagctagctgttcgaaactttatagtttaaacatcccttaaaaactgttaaagcaaactcaaagctctaaaattttcagcaaaatattatagtactctttcttatggtccaaaagcttaatcatctggaaagttttaatgcatagaataatttgattggtagcatgagagaccacgacgaggacctttacgtcagcgtataacttttggttcatgggtatcatctgactcatcatcgcataaatttcactaactaaaccaaataatcgattcctattttgtagctattgctgttatatattaaccttattaatattatcttacatacggttttatatattcgttttatatttaatctgattgcgtcaacgtgttcgagtatacagttgcggacgaaattccattttcagacgactgatgagatttcaaatcgaatcttttacaaaggctgcaacttgtaaagtgcttagaaattttcttccccatggattctatgttgataaatataattaaattagagatgcttctcgtggtagcatgtgtaacttttcgctaaactttatttatctttcttaattaactttttgtatggcttttgttgttgttgtcgacgaccattttttattgctttaagatctaacttgagggttaagaaattaccagtggtttcgccgttgtcagtgcactaattttttgtgttttctttttctgctcttaaaatgttagcactatcctaaagtgtaaattaagaaacagatttacataactagctagtccatagttccatatgttatgactttatagatttaagaaacatcaataagttttgtttttgaagcttttttggggttttaagttgacctgttgatgggcaaattacttaattacttatccagagtattgtgtggtcaaggaagataacgacaggagttaaggaaaaaataatgatttggtttctttcaattcactttttgtccagttttgttatttgtacaacactttcttgtttcgaattaatagaaaaatattcaatgcaataatgagttttattaacttaatcagtttgaatttacctagttgagatatcttgagcctgtttaatattgggtcaacttcttcggcctatattttagttgagctttgtagttgaatttcactaatcactacgcgttggaaaatatgtgattgcaaatgcttagattaaatctaaattctaataagatggccaatggatgtggagattgtaccccacgcgtcaaaaaagataaagattagagaatggtcactatttgtagtttgatctttccatgcacgtagtgttagctttaaattattactctagttcttgcaacttttttgcctccttttcttttggttgataaaaacgaaaagatcatattgcttgccagcttctagagatttttattggatgagattcgtttatagggtaacctaattagtaaaaagatacgaaattaataatcgtaatttatttaatgttaagtaggattcatgaaatcaaaatttatttgattcaagggattcacattgtagaaatttgtttactctagttttaagaatttgataattaaccattcgatacagaatatggataacacaagaacaaagatagtttcgtcacttcttaggttaagaactaaataaaataatatatgtgaagcatactaattacctttttcttaggaaatgcgttcatgtacaatccacaataatttgtccgtattatgtttggtgacttgcttaggttatagcattgtttaatttcgtcccattttgtcaccattcaaaaatataatatgtggacaaaactataagttatgtcttaggttgttcaattaaagagctcgtacaatagcttactaaatttggccaaaggagagacaaaaaccacgtgaattcggatatttcgaggtcaaattcttaggttttgttggccactatatattacgctacgcagtgccaaaattatcaacatacgtggagcataaccggtccggttagatctcaaaacttaccccacttctgataagattctagaccggacaatctataaaggattgcactcgatacggaggatctgatcctactaagggttgttcccattaggcgagacgttaggaccggctttatatccaagtagtccagttagggttggacaggggaccggttaggaccgtctagtatataaattgaaatagacatatgcatctagaatatgacctcaatacggaaaaggaaaaaagatctcaaaatattgaattttatcaatatccagatttctaaaatatttaagacattacatatttttttaatatcaactttgatattcaaagtacaggaagcttaaaattcagtaacatctctaacaaatgaacattaaattgagaaatatcgaggtccaaaacctgtttttacaaggatcaaaccgggccagacttctagaattggtcgtaactgacaatgtgaaccggtccgaattttggagttaggccagtttagtacaataattgtagttgggcctattttgttgggctcgagacttttctcttttagagagaccctctaaacggaaaagagggccagtggtgacttcacgaatatctctcttcagacgtggtttgctccagtccggtgagcgcggcgccgaggaatagagattgattcagcgacaatg

SEQ ID NO: 5726 - DNA, 3000 bp, Unknown
  misc_feature (1)..( 3000): cDNA_ID_3078217_gDNA_ID_1620813_Annot_ID_169155 3000 nt of promoter + ATG
gattcttttgttcgatgatatagaggatgcattttgtaagagagacatgaatgaagaaaagagagtttgactcaaaaactaaggaaatggaagtatagcttatttgattttattgttgcaaagaggcacatcgtagagtatatatacacaaaaggcaattcaggttaattaattaccttcccgtttttcaattggagaattttgattattattttttgtctacatttcaaaatgagaaagaaaataatcatttaatacgtggaattatagtttagtaatacatggcatgaaaataattttatcaaattttatttcggcatcaaaatttgtgtgttttttttttttttttttgaaattaaacttattgttatgatgcatttattgagacattatttgatcgatagtagcaattttaggagagtgtctgttgtatatatatatgaactatgaagattgaaggctatttgatgtactgtatatatgtaatacttgggacatagctaaatatgcatattgtgtcaatttcttttacttatctagcgttttctgtcaaattcattttcagtttgtagattggtaaaagtgaactgagaaatacaaaatgtctttaatgaaattaggtgtttactatctagtttctaaacttttggtaattcagtagagcggcacaatttgcagtttcctacgaagagatgattatcttgacttttataattagcatcagatatccgatcgccaactaatccctacaagtaaatcagtccaaatagttaagtggtccgcacagaacaagtttgtttgcagtggaaactgaaacatcaaatatgtgcgagtttacatcctaacctaggttctttagtgaaattgatcctctcacaacttacaagtccaaacaaaatatcttcatcacttgagttgagtccatctatcgttactgttttcagacaaatccaatggtccccatatcagcggctgctctcatctccttcgacaagtccacattatatcttatatcgatctatgctattttattatacaaaattagaaacatttagtaagacatcgacacatcggtaattatgtttcatcttatcatatttatcgggaaaaaaaaatgattttctctattaaaaaaaaaaattatccttttttaccattatgtagttgaatttaggttgcttcttaattttttttaaaactgttcaatatttactcacacaattaatattgtgcctttttaaaaatggaagtcctaatttttgttaggctatcaattttgctgactaattaatatattatccataagaaattaacttttatttaggcaaatatctctgctaaacttggcaaacatttatcaaaatctacatttaatacctcaaaggatttcataattgtcttgccaactgaacccaattattagaggtcaaacttgtactactaactttaacaagtcaaagatattaataacttgtactctattcttatcatctcattgcccaaaaaaacaactataaatacttacacaaaacattaccaattcggatctacgattttcaattaactctcttcttttttttttttttttggtttttcatttaagtctattcaatcatggaaaccggtttaaacatcttaaagctatcgctatgcgtcagcctagtcgtggttggatcatatgctcaggctcccgcaccatggaatccatctaatgggtttcgtccggggacatgtgaccactacgagtgtcccacctataaattggtagaggccggatacggctttgagatccgcatgtacgacgctgccctatggatatctactagtcctatcccctccctatccatgactcaagccaccaaaaccggtttccgacggtaaatgaataaatcgaatatataagacttggtgttctttcggtttctttatattataaactgaagttgactacgtttttgggtttatagattaaataggtacatagaaggagataacaagagcaacgtgaagatgaacatgacagctccggtgatcgcacaagcaacgcctggaagatcagtctacacggtctcactctacctcccgaagaagaaccaacagaacccacctcaggccgatgatctccacgttcggtctacgaaaccaacttacgtagccgtgagacagatcggtggctacgtgtcgaacaatgtagccaaggacgaagctgcggctctgatggaaagcctccgggattctaactggattttgcccatcgagaagagcaaaggaaagttgccggcgtattttctcgctgtttataacccgccatctcataccacggctagggtgattaatgagatcatggttccgtttaacatgtagatcatgttaatgacgccctcacgatttgattgttacgtagcaattggattagaagaggtggtttagaaccgatcgatactgtaacagcagcttgcagcttctggtttaaccggtataaattgtatctctggttaagtggtgattaatattgttattttgtaaaggtggggaaaactgtaaccaaaaagtttgataaaagattaaataataactaagattattgaatcaaaattgaaaatcaaacctaaatatcatcgaatcaaaaaaaaactgtaaatgattttttcagtttcgctttttttttttttcagtttcgctttctagaacacttataaagctgtaaaagaaagcacctgatcaaaaccatgaaaaaaaagagtgaaaaataaatattaggaaaatataaattaaagcgataatttatgtaatttcgatatttttaatgcatattatttttgtcggccaacttgttatatttaatcatgtgtttacaatgcaatttaatcctatccgaagatgaaccacacacataaaaccttatctgttacaaaaaaaatgtttatgtttttcttcataaatgtataaaaccttgtatcagtttacgttgcatggccgcaacggaaaacaaatccgcca

SEQ ID NO: 5727 - DNA, 3000 bp, Unknown
  misc_feature (1)..( 3000): cDNA_ID_1829116_gDNA_ID_1620813_Annot_ID_169154 3000 nt of promoter + ATG
gtatgaggcaagagtcttcctgctacccaatagtttctaccaaactggagtctaggaatttcgagaacgacgttatcactctcacatgggatatattctatggagagaatatcaagacgagctgcacgcacttcaatgctatcaatttggttgcatgacatggacaagatccttaacgttttatgatcaatcttcaaatgaccactggggttgaagaaaatgatttgtaggataagaacctcgagggaggggcaagacgagatgacttcgttgaaaacatcaacctcagcaaagatttgaaacaggtcaaggtacttgagatttttacaattgttaaaagcttgtgcatcttgtaatatgtattgatatagcgagagtgttcttaggcttggatggttgaatgtctctgtggacagcttgagcacattgtcttcacctgttggtgcgaagcgaccattaaaatttgcaaggataagatttttggtgtgtttcatactagtcagtgattggatccaagaagcaagcatcccgtcttccaattggtatgaataatgggatattatgcaagtctctaaatggccattgtgcttgtttataacctgaaaaatgcaaaaatgattaagatttaaataaggacaaacaattatgaagagtctatgttttcaatttatacgtgtttctctttatatcgtatatatatgttgaattttatagaaaaattgttaatatgtaattttatgtatgtgtgtatttattaatctatgtagaaaaaggcatgagatcatacttctctagattattgatcataaatttgtttaacataagataacgtttcgggcgaaataccgttatttgttttaaatgtaacaatgtttcaaaaaaataccgttatttatttccctctaaataccgttaaataccgttatttgctatttattttattttttaaaaaaaacataaatttgatacatatacatgtctatgatttcacatttatatgtatgaaatttcttataagtcctcaaaggcaatataacaattttcatcttttaatccaaaattccttttatcaataactgatttaaacttgtaagattgaatattgagagaaaaatgaaaagaacctcggttataattgacaaaaaaaaaaaaaaaaaactcggttatctgattagcggcacgatctaataattgtggcaggacaatcccgttgatggtgatggtctttcgcatgtcaaagcaaagatttgacacttgtttccatgtatccccccattgtttggacaaaacacatgtctttatcgcttcttctgtggacaattctgataagattttggacaacatatcgtcaggaagttgattaacattatcgattgcatcgatactgattcttttgttcgatgatatagaggatgcattttgtaagagagacatgaatgaagaaaagagagtttgactcaaaaactaaggaaatggaagtatagcttatttgattttattgttgcaaagaggcacatcgtagagtatatatacacaaaaggcaattcaggttaattaattaccttcccgtttttcaattggagaattttgattattattttttgtctacatttcaaaatgagaaagaaaataatcatttaatacgtggaattatagtttagtaatacatggcatgaaaataattttatcaaattttatttcggcatcaaaatttgtgtgttttttttttttttttttgaaattaaacttattgttatgatgcatttattgagacattatttgatcgatagtagcaattttaggagagtgtctgttgtatatatatatgaactatgaagattgaaggctatttgatgtactgtatatatgtaatacttgggacatagctaaatatgcatattgtgtcaatttcttttacttatctagcgttttctgtcaaattcattttcagtttgtagattggtaaaagtgaactgagaaatacaaaatgtctttaatgaaattaggtgtttactatctagtttctaaacttttggtaattcagtagagcggcacaatttgcagtttcctacgaagagatgattatcttgacttttataattagcatcagatatccgatcgccaactaatccctacaagtaaatcagtccaaatagttaagtggtccgcacagaacaagtttgtttgcagtggaaactgaaacatcaaatatgtgcgagtttacatcctaacctaggttctttagtgaaattgatcctctcacaacttacaagtccaaacaaaatatcttcatcacttgagttgagtccatctatcgttactgttttcagacaaatccaatggtccccatatcagcggctgctctcatctccttcgacaagtccacattatatcttatatcgatctatgctattttattatacaaaattagaaacatttagtaagacatcgacacatcggtaattatgtttcatcttatcatatttatcgggaaaaaaaaatgattttctctattaaaaaaaaaaattatccttttttaccattatgtagttgaatttaggttgcttcttaattttttttaaaactgttcaatatttactcacacaattaatattgtgcctttttaaaaatggaagtcctaatttttgttaggctatcaattttgctgactaattaatatattatccataagaaattaacttttatttaggcaaatatctctgctaaacttggcaaacatttatcaaaatctacatttaatacctcaaaggatttcataattgtcttgccaactgaacccaattattagaggtcaaacttgtactactaactttaacaagtcaaagatattaataacttgtactctattcttatcatctcattgcccaaaaaaacaactataaatacttacacaaaacattaccaattcggatctacgattttcaattaactctcttcttttttttttttttttggtttttcatttaagtctattcaatc

SEQ ID NO: 5728 - DNA, 3000 bp, Unknown
  misc_feature (1)..( 3000): cDNA_ID_1829148_gDNA_ID_1620813_Annot_ID_169141 3000 nt of promoter + ATG
aaatgattattgacgatttttaataaagtcaatgaagttaaaaacaaaattaggtaagtaaaacaagggacggttggctacagtgcgtttacgtttgcgattgtggtatacgtgttaggtaccatgtgtggctctcaacttctcaaacctttcatttacgatctagggtcattttcgtcattagatagcaatcgaatttgtatttgtaatgatattcttactatattttaataatagtcttttaatatgggatatgtaatcatttattgcacttgcccatatgcttaattagagatcaccgacacattccattattgtcacttgtgatcttgtgagagtgaatgattaactaaaatatttgtaattgatttgattttcctaatttctttgatcattaacatctaaagacgccttggatgatttgtgtgaaaaatagtttaacgggggtagagtagagaaacaaatttaattcagggaccattttagcaaacaacgtgtttaattgacaaaaggcacgtgagaccacgtgagtacttgttttggtttcttcttcatcggtccgatcagagagagagaatcgccggtgagaaaagaaaatggcgtcggcgatttctctttctctcttaaacggagcaacgcctttgaaatcgaattcgctccacaaatctagactcactccacttcatcttcgaactatctcttgttctagactatcttactctccctcgagtcgcgaaatttctctcaaaactcaatctactgttcctatttcgtgtaggcgtagtaggtttgacttcgttcctcgttgcggcatttcgtcgaacgatttgcctactgagaaaaagaagagctttggggagtgggttgagtttgtgggagaggcggtttcgacggcgtttccgatatgggtttctctgggatgcttgttgggactgatgagaccaagtactttcaattgggttactccaaattggaccattgtaggtcttacgatcactatgcttggaatgggaatgactttgacccttgatgatcttcgtggcgctttatcgatgcccaaggagctcttcgctggctttctgttgcagtattcggttggtttgcttctcaatgctctatctttagtgttcgattgttacgaattatgcacaagttagaagagaaatcgagaaagatgagatcttgaaggaaccggtatagatgatctgataataggtttgtttggtttggtaacataatcttgtggagtagttagagttattgcttgagctcatgattcctgttttatgatcttaccaaattatagttttgaaagagtagtattagagcatggataagttcatagcttgctgatgaatagtgttgcaggtcatgccactatcagcattttttgtgagtaaactcttaaatttgccaccacattacgcagccggtctcatattggttggttgctgtccaggcggtaaaatacaattctttacttgattgcattatattaacacttgtatggtgctctgatgcttttccgtttgttgtttgaaggcacggctagtaatattgtcacatacatcgcgcggtttgtaatccaaacaaaaagaaacgacttttgagttccataatacaactggatgatctgagtttcttttttttcattgtacagtggaaatgttgcgctatcagtgttgatgacagcagctagcactgtttcagctgtggtaagttactagattatgacattggtttttctattcttcttgtagataaagacaccccatttaatccattccgttttctagattatgacaccgcttcttacggcgaagcttgccaagcagtatatcacagttgatgctcttggattactaatgtcaacactacaggtttggttggttcagtctgtttcttattcggattagaacgagcgagtttttgttcattgactttacccttcttggctcctgtttgtgtgtggtcacaggtggttcttctcccagtgttggctggtgcatttcttaaccaatactttaaaaagctggtgaaattcgtctctcctgtgatgcctccaattgcggttggaacagttgcaatcctgtgtgggtatgctatcggtcagaacgcatctgcaatactcatgtctgggaaacaagtagtcttggcttcatgccttcttcacatctctggatttctctttgggtatctgttttcaagaatactcggaattgatgtggcatcatcgagaactatctctatcgaagttggcatgcaggtaactaaacagtatcttaaatgaaacggtaaccagagctattgaaaactcaatgtcaactgaggctttttttcttttcattttgtattggtgaagaactcggtgcttggagttgttcttgcgacacagcattttgggaatccactcactgcagtaccgtgcgctgtttctagcgtctgtcactcaatcctcggtagcgtcttggctggaatttggagacgcagtgccccaaaacagcttgaagactaaaaagaaagcaaaggaaagttcatgaagtcctcactgtgttactcaatttcaacatctttcaggaccatttagttaagtttgttgaacaaatgaaccaaaacgggttatgtcttgtaaagctttggaagatttttttttttttttctatgtctgagatttctcttgttattcttcaaagaattttgtgaattcgaaacatgaaaatcatattttgttcatcgtgaatcaagtgatgaggttgaaaaggctaatatgtaatttctaacatttgtggagggtagttttggggttttcaattaggaacagctagtcttggtcgcagaggataaaagacgttttaagtcgtcttctccaaatcgattttctttcacctttctctctgatttcaatttcaatttttgttcgtttttttcttccggaaaattggttgttgggtggatcaaagcttacgagatttgtacttttgttctggtgctacaagtcca

SEQ ID NO: 5729 - DNA, 3000 bp, Unknown
  misc_feature (1)..( 3000): cDNA_ID_3078234_gDNA_ID_1620813_Annot_ID_169140 3000 nt of promoter + ATG
cctgtaacacattcgtaatgaagattagcatactaaaaaagaaggagatatcgataaagctagagtaacagagcaagaattagttataccatggctttggttttcgagtagaaagagccagtgaagttgggtgtgtcttcctccttgaagccaattcctgaaccttccggatgcttgtcgtcatattcgaatatacaaccagtagcgaaattcatcattaggagtccgtgctctctgcagacatcagctagagtcaatgtgccagctacattggcacggatagtctcggtcttgtgagactcacaccagtcaacattgggtctcccagtcacaccagcggaattgaaaacatgggttggcttaacactctgaatatcctgcagaagagaagatcgatcctccaaccgacctttcccatactcgtaagcaattccttgcttatcacatatctttccaagcagaccaccgatccatccggtctttccatatatcaggaacttcagcgaaggcttttgaggtgtgccgttgctcctttggcttggaacaaccatatgggtttgacttggtttttcagataaagtagctgccagcgaattgtcctcggagccatcaaagtgtcgcccaccaggcatcatcagcatccttggatgaggaagcaatgctccagaaacatcaccccaccactccgggttctgtgtgtaccaatccatagttttcttcaacccttcttcccacgtggttctctctgaccatcccaactttttgagcttctgatcgtcaaggaagtacctctgatcgttaaaaggtctgttgtcgacaaacttgatgttcgcctcagggtccatgttgaagagtttgcagatgtctttggcaacatcattcactctcctctccttcttcgtcccaatattgtaaacatggccaacttctcccttgtgaagaacaacttcaaaagcctcagcaacgtcttcacagtagaggtagctcctgacatttgatccatctccatgaatgggaagaacctgccctctcattgccagcaaaatgaacttaggaatcaacttctcaggaaactgattcggtccatagacgttattcccacgagtggtaataacaggcaaaccataagatctaccataagccataacaagcatctcagcaccagctttcgtggcagagtaaggattcgtcggaagcagctgagaagcctcatggttaccaacaagagcatcctcatcagtttcaccataaacttcatcagtactaacatgaataaacctcctaatctgaccagtaactttacaagcctcaagaaggacatgagttccatagatattattcttagtaaactcgaaactgttaccgaaggaattgtcgacgtgagtctgagcagcgaaatgcatgatggtgtcaataccttcagtgatgagaagatgattcaccaagtcagcactagcgatatcacctttgacaaacttgaagttcggagagtgcttagaaggattgagattcttgagatttgaacagtaatcaagcttgtcaagcacaacgattttgtaatcaggatagcttcgtatgagtctgttggcgacatgagacgcaatgaaaccagcagctccggtgatgagaatgttcttgggagtgtacgaagccatgatcaaacgctgcgtttaagaagaatgaaatcataaacactcaaatacgcagaaatgaatcagtagatctaggaaatcaaacgcataaaagcttagatccagatccgaaatctcgattctgtgattatgaccatcggatcaaagagagagagtacgaaagggtaaatgaaactcagtgaagcattatgatcaatgtaaaattcgagataatggagtataaaggaagacgagagattcaggaaacataccttcgaatttttcagatcttcaacgatcgcaagagaattggagaagacaattggaaaattccgaggaaaacgtgaagaattttcgacggtgacgaagctgaggaagtagcgaaagaaacggagaagaagaagaatcaaaattcaaaaaagagtcttctcgttcgtcacacagcaaaaatagaagaagaagagaacgaacactaaagactcctggagagggaagagtctacgggaattcattatatactgcttgcacttacgaaaatacccttctcgttttcactcttttacaatagcgggtaggtacacgacttgactcgcgtgttgatgatcgcgcgttttgtcaaacattaacttcgcatgtcagctaattactaacatgttatagtctaaaattagtctagatttgatttagaaaatggaattttataattataaaagactaaaaatgtgaatatgaagtatgaagtaacgattgtacgaaaaaaaaacaagaatagaaaatgattattgacgatttttaataaagtcaatgaagttaaaaacaaaattaggtaagtaaaacaagggacggttggctacagtgcgtttacgtttgcgattgtggtatacgtgttaggtaccatgtgtggctctcaacttctcaaacctttcatttacgatctagggtcattttcgtcattagatagcaatcgaatttgtatttgtaatgatattcttactatattttaataatagtcttttaatatgggatatgtaatcatttattgcacttgcccatatgcttaattagagatcaccgacacattccattattgtcacttgtgatcttgtgagagtgaatgattaactaaaatatttgtaattgatttgattttcctaatttctttgatcattaacatctaaagacgccttggatgatttgtgtgaaaaatagtttaacgggggtagagtagagaaacaaatttaattcagggaccattttagcaaacaacgtgtttaattgacaaaaggcacgtgagaccacgtgagtacttgttttggtttcttcttcatcggtccgatcagagagagagaatcgccggtgagaaaagaaa

SEQ ID NO: 5730 - DNA, 3000 bp, Unknown
  misc_feature (1)..( 3000): cDNA_ID_1807002_gDNA_ID_1620813_Annot_ID_169139 3000 nt of promoter + ATG
agagatagttctcgatgatgccacatcaattccgagtattcttgaaaacagatacccaaagagaaatccagagatgtgaagaaggcatgaagccaagactacttgtttcccagacatgagtattgcagatgcgttctgaccgatagcatacccacacaggattgcaactgttccaaccgcaattggaggcatcacaggagagacgaatttcaccagctttttaaagtattggttaagaaatgcaccagccaacactgggagaagaaccacctgtgaccacacacaaacaggagccaagaagggtaaagtcaatgaacaaaaactcgctcgttctaatccgaataagaaacagactgaaccaaccaaacctgtagtgttgacattagtaatccaagagcatcaactgtgatatactgcttggcaagcttcgccgtaagaagcggtgtcataatctagaaaacggaatggattaaatggggtgtctttatctacaagaagaatagaaaaaccaatgtcataatctagtaacttaccacagctgaaacagtgctagctgctgtcatcaacactgatagcgcaacatttccactgtacaatgaaaaaaaagaaactcagatcatccagttgtattatggaactcaaaagtcgtttctttttgtttggattacaaaccgcgcgatgtatgtgacaatattactagccgtgccttcaaacaacaaacggaaaagcatcagagcaccatacaagtgttaatataatgcaatcaagtaaagaattgtattttaccgcctggacagcaaccaaccaatatgagaccggctgcgtaatgtggtggcaaatttaagagtttactcacaaaaaatgctgatagtggcatgacctgcaacactattcatcagcaagctatgaacttatccatgctctaatactactctttcaaaactataatttggtaagatcataaaacaggaatcatgagctcaagcaataactctaactactccacaagattatgttaccaaaccaaacaaacctattatcagatcatctataccggttccttcaagatctcatctttctcgatttctcttctaacttgtgcataattcgtaacaatcgaacactaaagatagagcattgagaagcaaaccaaccgaatactgcaacagaaagccagcgaagagctccttgggcatcgataaagcgccacgaagatcatcaagggtcaaagtcattcccattccaagcatagtgatcgtaagacctacaatggtccaatttggagtaacccaattgaaagtacttggtctcatcagtcccaacaagcatcccagagaaacccatatcggaaacgccgtcgaaaccgcctctcccacaaactcaacccactccccaaagctcttctttttctcagtaggcaaatcgttcgacgaaatgccgcaacgaggaacgaagtcaaacctactacgcctacacgaaataggaacagtagattgagttttgagagaaatttcgcgactcgagggagagtaagatagtctagaacaagagatagttcgaagatgaagtggagtgagtctagatttgtggagcgaattcgatttcaaaggcgttgctccgtttaagagagaaagagaaatcgccgacgccattttcttttctcaccggcgattctctctctctgatcggaccgatgaagaagaaaccaaaacaagtactcacgtggtctcacgtgccttttgtcaattaaacacgttgtttgctaaaatggtccctgaattaaatttgtttctctactctacccccgttaaactatttttcacacaaatcatccaaggcgtctttagatgttaatgatcaaagaaattaggaaaatcaaatcaattacaaatattttagttaatcattcactctcacaagatcacaagtgacaataatggaatgtgtcggtgatctctaattaagcatatgggcaagtgcaataaatgattacatatcccatattaaaagactattattaaaatatagtaagaatatcattacaaatacaaattcgattgctatctaatgacgaaaatgaccctagatcgtaaatgaaaggtttgagaagttgagagccacacatggtacctaacacgtataccacaatcgcaaacgtaaacgcactgtagccaaccgtcccttgttttacttacctaattttgtttttaacttcattgactttattaaaaatcgtcaataatcattttctattcttgtttttttttcgtacaatcgttacttcatacttcatattcacatttttagtcttttataattataaaattccattttctaaatcaaatctagactaattttagactataacatgttagtaattagctgacatgcgaagttaatgtttgacaaaacgcgcgatcatcaacacgcgagtcaagtcgtgtacctacccgctattgtaaaagagtgaaaacgagaagggtattttcgtaagtgcaagcagtatataatgaattcccgtagactcttccctctccaggagtctttagtgttcgttctcttcttcttctatttttgctgtgtgacgaacgagaagactcttttttgaattttgattcttcttcttctccgtttctttcgctacttcctcagcttcgtcaccgtcgaaaattcttcacgttttcctcggaattttccaattgtcttctccaattctcttgcgatcgttgaagatctgaaaaattcgaaggtatgtttcctgaatctctcgtcttcctttatactccattatctcgaattttacattgatcataatgcttcactgagtttcatttaccctttcgtactctctctctttgatccgatggtcataatcacagaatcgagatttcggatctggatctaagcttttatgcgtttgatttcctagatctactgattcatttctgcgtatttgagtgtttatgatttcattcttcttaaacgcagcgtttgatcatg

SEQ ID NO: 5731 - DNA, 3000 bp, Unknown
  misc_feature (1)..( 3000): cDNA_ID_1829152_gDNA_ID_1620813_Annot_ID_169138 3000 nt of promoter + ATG
attcgattttgctctgtttgaataagtttccggaatttaagtagaatttgatatgcaagtgattgtatttggatcctagaacttgatcttatgggatcataatccatataaaaagtagactaatgctaatttacgttagattagagtgacacatcttgtttcctgtttaaggcgtttactaatcttatttggtttacttactgatgacttatgagtgatgaccaccacatacataaatttaaaattataggatgctttctgtttcaatatccaaaaagtatagtaatgatggtgtgtgttggttgagttataacatcatcaactattgattggataataatctcgtattttttagcactaaaagactcatttgcatgtaaacttttccatagaacaaatcacaatcttttttagtgataaatattgttacatctttttcaaaagggatatttttactcaatatagaagatctttggtagggtcctagtgattgtggattccgtgcctacttgaatgaggtcactgcagtcttcacgggaaaaagcattttcattcttatgcaatctctcgtttatctatctagtttggttgaaacagtgccacttggttacattttagtcttagatgttattagaacagatgcaaggtgtaagagattcttgttgcatagtcatgggagttttcttgtgtgtgtttttgtttacttcactcacatgtttcttggggtttcttaacttatatagttagactttcaactataaatttgtaaactacaggacataggcgtaaagcaaaagtgagagagcaaatcgtataactttatttttgcataaatatatgatgcccttagatttgctgtcttattaggtggaccaccggtttcttatactttacttttccttgttttttttttttttaattatcgacacatacaattggacgcattatgtgttgtccacgcacacacactaatactactgtgtataaacactaagtcgtcttcttcttcttctaccataaaaaaaggaacatcgtgtcctcatgcttgttgttagcttgggaaatcatgcgacagtttttgtttttaatctattttcaaagtcaatatatgaacagtaaggtttataacaaaaataattgcatccccgacaagaaagacgttgaatgatcgatcttttgaagccatttcttacttactgtacattgttttctaatgtgcatatcattcaaaagtttgacatttgttatctctgcaagagagtgtgttgtagaaagtcagttgtcgaatttacccccctttttcaaaagtcacattcaggtcactgcttggaaaagaaacactttttttctttctgactcgggtatccgattctcttttcttctgttgttactaaacaagagttaatttgcttgacagtagtcttataatctttgggaaaaaggttagttaaattgtattttatctggtgtctttgtgcaacattatagaagacactaacttaagcatcctcctttatgcataatttgatttgaccccttacttgttagtggttgaaagctataacgaatatcaaattggagtttaattaatcttattttcacacgtgtttttgacattgtggctaccaacaacatctctgtccataccaagtgcttgtttaacgtttacatgagacttcagtttgtttgttttttggctagttaggggtaaaaattccattcttcttttttattggtctgtaaaaaaaattccatttcaagtaagaagaaagggagatgtttctacgttgtattccccatagtcaaatctaacgtcagcttcggccgagtgagaggggtcaatttcattcagcttaaatccaacttttttttctatgtctcataaataaatttctctttggttacaaaaaaaagtaaaaaagtttggtcaggaagagaggagcgaggacccaccgattacgtcatctcgtctaagaagtaatcagaaaaaaaaaaacctaatttttaaaataaaaacatcttctcgtgattgcgaagtttgtttgtgtgtgctgtgtggtgaagggtgatctctctctccgccccgaatctccgggcgatgcgatttttatcactgttggtttaataatctacttcacggtggtgtgttttaaaataactgaaatagttccggtcgaaatttgtaggttttcgagattttttttttttttggttggaaaaataaaaagtctctgttttcagaccgaatcttttgatgtatcacttgcatggctgtgaaggctctgtgtagcctgtaaagcttacacgaggattttgttgctccccttaatttccctctaatatctctccttctctctctctctacgataataatgtcttctctgcaccgtttcctttcgccttctttctgtccgtttccaaatttctttcgtttcttctttttggctctatttacttgccatctctctcgatgataacgacatgaaacccacctcaaacaaaaccacattcacttattattagcctttgtttttttttgagtggccgtgaaggtgtgtgattctggtgccctttcttcctttttgtttccctgcttaaggtattcctgatttttttccgtttcttgggatttattctgtgccattttttttgtttctgtttccaaattcttggctagttaattacgacctcaggatcatgtggatcctgttctttttgttatcctcttcatcagtgtttgacactatcttgtgttttttccctctttttcaataaccttagatgcttattccttggcctgatgggacacaagtgatatcagtgtatggtgatagacaacgacattttcatattcttccttttttttttttcttctttaatgttatttatgtttttttacttgacacttggtttcttgatatgtcctgatttgctttgacaacaaaaaatgcaggttaccgttgatagagtggtgttttggttctgttttggtgtgagcgt

SEQ ID NO: 5732 - DNA, 3000 bp, Unknown; identical to SEQ ID NO: 5725
  misc_feature (1)..( 3000): cDNA_ID_3078241_gDNA_ID_1620813_Annot_ID_169136 3000 nt of promoter + ATG

SEQ ID NO: 5733 - DNA, 3000 bp, Unknown; identical to SEQ ID NO: 5724
  misc_feature (1)..( 3000): cDNA_ID_1829164_gDNA_ID_1620813_Annot_ID_169134 3000 nt of promoter + ATG

SEQ ID NO: 5734 - DNA, 3000 bp, Unknown; identical to SEQ ID NO: 5723
  misc_feature (1)..( 3000): cDNA_ID_2992588_gDNA_ID_1620813_Annot_ID_169132 3000 nt of promoter + ATG

SEQ ID NO: 5735 - DNA, 3000 bp, Unknown; identical to SEQ ID NO: 5722
  misc_feature (1)..( 3000): cDNA_ID_2108291_gDNA_ID_1620813_Annot_ID_169131 3000 nt of promoter + ATG

SEQ ID NO: 5736 - DNA, 3000 bp, Unknown
  misc_feature (1)..( 3000): cDNA_ID_2160275_gDNA_ID_1620813_Annot_ID_169129 3000 nt of promoter + ATG
gcatttatgcgaattcgaaaagaggattgcaagtgaagtgtgaagctgagccgacgacgacgacttctcttgttccggcgaatcaacgatggatgttcgacgaagaagaagctaatggccctgtaacgataatttttctatctccctctgtgtttagcatctacgcatttataaagtgtcgcactttagctcttgctttgaatttgaagtatggcttgtttttttcttctcccaattgcgatttattaagtagtggattttgcctttgactcattagctgtgttgtctgcatcaattggcttcgaaaattgatgtttattcttctgaatttgttaacttggacgttttatgaaattattaatgtttggttggagagaagttaaaagtctttggcttgaaacctttattgagtgtattctatggtttacaggacatctggaacacgacatggtatccaaaagcttcagaccatgtgaacacggacaagccctggtttgtggttgatgcaactgacaaaattcttggtagattggcatcgacaattgctaatcacatccgtgggaagaatcttgcctcttacactcctagtgtcgacatgggagcttttgtgattgtggtatgagtttctttgagctatctgtagagaataagaaatttgatgtgctgctttagttaatttcttcctgaaggaggagccttgggatttggttttagtaagattcacattagcagcaagatgtagagcctctatgtagatgtttgggcaatgcttgtaacttggtacctctaatactgttttcaattgtttggttaaaggtgaatgctgagaaagttgctgtatctggaaagaagcgtaaccaaaagctgtacaggaggcattcaggacgacctggtggtatgacagtagagacatttgatcaattgcagcagagaattcctgaaagaatcgttgagcatgctgttcgtggaatgcttccaaagggacgggttagatacataatccacagctctttattagtctcctttaagtcttaacacttagcaaatccgtgtttcttcaaacttatggattgaacttggaaactacttgttgcgatattggtattgattgattactagttttccaactccctcttaactttggtctgaccattttgtggcagcttgggagagctctgttcaatcacctgaaggtgtacaaaggccctgaccatcctcacgaggcccagaaaccgcttgatctgcctatcagggacaagagaatacagctgcaaaaatagaagctccaccactgttccattatcgccaagcgcagagagttttttcttctcaggtttctgtagtttcttcatcccaaaaccagaggaggctttacagattcttgttttcgcttctatcaactctgttatgctacaaaactttctaatttgaaatatttctcgttatttttttttgctactgaatatcttcttcaacatgaaaaagatgacatgtaatgaatacaaatgccataagcaacagtagtcaccattaacaaaaacttcctcttcaattggtaacaaaccttcccaatgagatcacagatgcaaggaaaatctaatattcatgccttaatcgagtcattacttaaaactgaaatttttaatgctggatccaaaatttgaatgttaaatatacataataataggaaatacaatttgaatgtttggaatcgctaacgactaatgctagatccaaaatccggttagtattcatatcattatgtaaattttgcatccaaataaatttaaaaacaaacaaacaaacacaaaagatttttaaaatccgacaataaacaaaatcaaaattttaaaaactatttttaaaaatccaaataaaaatcttgaatgttaaatctacataataatatgaaaacaagttgaatgtttggaatcgctaacgactaatgttggatccaaaatccggttagtattcatatcattatgtaaatttagcatccaaaaaaataatattaaaactattttaaaaaatgcgaagtaaaaccttgaatgtttaatctacataataataggaaaaacaagttgaatgtttggaatcgctaacgactattgctggatccaaaatccggttagatttcatatcattatataaatttagtatccattaaataatataattttaaaaaataaacacatgaaaaaagatttttaaaatccgaataaacaaaatctaaattttaaaaagtactttaaaaatccgaatgaaaaacttgaatgctaaatctacataataatatgaaaacaagttgaatatttggaatcgctaacgactaatgctggatctaaaatccggttagttttcgtatcattatataaatttagcatccaaaaaaataaaaacttttaaaataacaaacataaaataaatcaaaatctttattaaaaaaaaaaaaaaagaaaaggaaattaagaatcaacgaacctgactcatggtggactaattatgactctctcggcatgactcatggattgttgtttactaaagcccattcgttgtaatctgaagcccatctcttcgtctttgacttgggcggaaactgcaatttttgatgatgaagaagatctcgcttttcaggtctgaaactctgaaccaccgaaaccccagatctcgtcgtcacgttcactcgcgattctctttgcccgaaatagatgcatccagattttgcgtcacgtcagactcgtttctagaactcaaagtaatcttcctgtataattagcccgtgatcgtcaaaaattgatcatacacgagagacatctctcgacatggcgttggaccaacgcggcaacgccgttggtaccgttcagcgatgtatccggatcatcaatttcacggtcacgagatatcagcgatcgtatttgtaaaacagtcgcagagaaagaaaatatttttttagggtttagaagaaggagtaatgatttcttaaggaaagaagaaaagatg

SEQ ID NO: 5737 - DNA, 3000 bp, Unknown
  misc_feature (1)..( 3000): cDNA_ID_3078252_gDNA_ID_1620813_Annot_ID_169126 3000 nt of promoter + ATG
gaaggagatgcttgagaatgtgctcctcaacagagctttttgacagagtaagccgttggcaagcatcgctcttggtcagttccttcttgatggtccagtactgttgctcctcctcattttctttttcctctttcaagataatctttggattggtagttgtaggcacagtctgaaaatttgctagactggtatcgtgagtatttgtcatcgaacttgtgtcgacaaatccaggattagggatcatcaaaaactgcccagagattctttgtgagccaagcgaaaagttagtctggtatcttctagacagattacctgcaaacaaagaagaagtgatgttatgaattatatgtgaagcatatctttgatttgctagctgcgatgttattactttcgatgtaatttgggttctgcgagaagctatgatgactctttaaggcttcgtctgtgttcaacggagacgtcccctgctgctcttggctcataaacgtctgactcttctttgctgaggatttagagaggacgaagagaggcattttcgtattattttatggcaagagaaaggatcttgagtggtcttttcgtggtgcttggctcgattcttctttcacggagatagagatctatgttccttggttatcaagaaagatgacttctgcgattcttggcttatattcttccgactcttcttcgccggagaaggaggtcactgtttccttggatgctaagaaagaaagaccatctcttgcgcttcttcgtcggagaatcacagtaacttcggagagttatcgttgagacaattttagagagaaactttgatcgatattgatgggagggacacgtattacgtatatgtagacgtatttaatgatttttttttttccttttatactatagtaaacataaatgtaatttggtcaggggggagggacaccagccgtaattctctgtttttaataaacatattagtcacctgaaaacatctttaaaaaacacatttaattgattcattcacaaaattttaagaaaaaacttttcaatgtcaatcattaacaaagaaaagaaaaacaccttctcaataataactaaggtaaaatggagagtctgtattttatctaggtaaaaaaaaaaaaaaaaagcaccttcattatctatcgagagtctgcaaacacgatctctctagctagttagggatttttctctcaagcacactaaagtggattctagagtcaacattaccccaaaagagtccaatcttgtctccttccttcaattctctcctcccaacaaacgctttagcccagccaccgttgaaaacatagctttttgatgttttgacgtgtctcttgaaaaccatatcgtgctcagtgtacgtgtcgtggtcgtacgctttaacatcgactccaatgccttcttggattttcttttggtcatctgtagggagatgtctcatgatgtggttctcggcatcggttgtgttcagcaaaagtcggcattgatgattgatatcactttccttcagtgtcttcttgatggtccatgtgtagggaggtagttccgtcaagactctggttcccttctcctctactattttctctttcgaaagagatctcatcttcttaaactttataatatcttcagttaaatctttgtttcctgcacaagtaacattggaattaatattagggttgtttcctaaaatccccatatagggatctacggggaagcctttctccgaggattccgcgtctaacgagcaatgagtcgtcaagtcttccttcgccggagatttaggaacgtcgacaataggcatcaccgtttcctcggattccaaagaagaggactccacataaattgttcttccgaacaggaccaggtatacagttttttgttcttccttcttcgtcggagatatagaaacgttggtgagaggtattgctgtttccgcggatcccaaggaaacgttgttctcatgagaaatctctcgctgttcttcggccataactcttcttcgactgagatttaggagcttaattaggagagagttatcgtccgaaataattatagagaaaagactcgaaagattatttgtgagtaaaagggattgatgagagtagtatatatagaagaacggtcaaggatataggttttgtaatgaataagacctaatttggtcaaaactctatccccctaataatttattccaatagaaaatcgtattttttgttcgcagaattctcttccacatatttttatgtttctcaacaaacttatttttatgttgatcaacaaaaaataatggatattattacatgggagaaatggaaattctctggagatattggaggagctcgaacgttaatctgcaattttcagtttatcacgacgtgaaatttgaaatagactcacacaactagtctacgaggcccactggaagaagaagtggattgtataaggtgaaacactcactaaaaaatatagatagtataaaccaaaccgaaattttggctacttcatttcggttttattgggtgaaaccgatggccaaaaggaaagatgaaaaataataatcggttccgttcgattcgaaaccaccaaaccaatattgtattctaactttatccgaaattataggaatgtaccaaatttaatcgaaatcattgaaaaattacactttatttttcttacaataaactgaaccgaagttggttttcagttccaaatggaaaccgaatttcaattctagaccccaaaatactattcgaagaatgtacaagcccactaagaacaaataatagcaataagaagatggctctcgcggcccaacccaaacaaaatcgcgtcatcacgtgagtggcacgggcctacagcaattccacaaccacatcgaatcgatgacatttccatttgctttaagaacatccgccgcgcgagaactggcgggaaaattcagccatcgcctcgaagaaaaaacctcccaaatctgagaaatcggaaaagatg

SEQ ID NO: 5738 - DNA, 3000 bp, Unknown; identical to SEQ ID NO: 5731
  misc_feature (1)..( 3000): cDNA_ID_1829152_gDNA_ID_1620813_Annot_ID_50618 3000 nt of promoter + ATG

SEQ ID NO: 5739 - DNA, 3000 bp, Unknown; identical to SEQ ID NO: 5730
  misc_feature (1)..( 3000): cDNA_ID_1807002_gDNA_ID_1620813_Annot_ID_50619 3000 nt of promoter + ATG

SEQ ID NO: 5740 - DNA, 3000 bp, Unknown
  misc_feature (1)..( 3000): cDNA_ID_2992506_gDNA_ID_1620813_Annot_ID_50620 3000 nt of promoter + ATG
acgttattcccacgagtggtaataacaggcaaaccataagatctaccataagccataacaagcatctcagcaccagctttcgtggcagagtaaggattcgtcggaagcagctgagaagcctcatggttaccaacaagagcatcctcatcagtttcaccataaacttcatcagtactaacatgaataaacctcctaatctgaccagtaactttacaagcctcaagaaggacatgagttccatagatattattcttagtaaactcgaaactgttaccgaaggaattgtcgacgtgagtctgagcagcgaaatgcatgatggtgtcaataccttcagtgatgagaagatgattcaccaagtcagcactagcgatatcacctttgacaaacttgaagttcggagagtgcttagaaggattgagattcttgagatttgaacagtaatcaagcttgtcaagcacaacgattttgtaatcaggatagcttcgtatgagtctgttggcgacatgagacgcaatgaaaccagcagctccggtgatgagaatgttcttgggagtgtacgaagccatgatcaaacgctgcgtttaagaagaatgaaatcataaacactcaaatacgcagaaatgaatcagtagatctaggaaatcaaacgcataaaagcttagatccagatccgaaatctcgattctgtgattatgaccatcggatcaaagagagagagtacgaaagggtaaatgaaactcagtgaagcattatgatcaatgtaaaattcgagataatggagtataaaggaagacgagagattcaggaaacataccttcgaatttttcagatcttcaacgatcgcaagagaattggagaagacaattggaaaattccgaggaaaacgtgaagaattttcgacggtgacgaagctgaggaagtagcgaaagaaacggagaagaagaagaatcaaaattcaaaaaagagtcttctcgttcgtcacacagcaaaaatagaagaagaagagaacgaacactaaagactcctggagagggaagagtctacgggaattcattatatactgcttgcacttacgaaaatacccttctcgttttcactcttttacaatagcgggtaggtacacgacttgactcgcgtgttgatgatcgcgcgttttgtcaaacattaacttcgcatgtcagctaattactaacatgttatagtctaaaattagtctagatttgatttagaaaatggaattttataattataaaagactaaaaatgtgaatatgaagtatgaagtaacgattgtacgaaaaaaaaacaagaatagaaaatgattattgacgatttttaataaagtcaatgaagttaaaaacaaaattaggtaagtaaaacaagggacggttggctacagtgcgtttacgtttgcgattgtggtatacgtgttaggtaccatgtgtggctctcaacttctcaaacctttcatttacgatctagggtcattttcgtcattagatagcaatcgaatttgtatttgtaatgatattcttactatattttaataatagtcttttaatatgggatatgtaatcatttattgcacttgcccatatgcttaattagagatcaccgacacattccattattgtcacttgtgatcttgtgagagtgaatgattaactaaaatatttgtaattgatttgattttcctaatttctttgatcattaacatctaaagacgccttggatgatttgtgtgaaaaatagtttaacgggggtagagtagagaaacaaatttaattcagggaccattttagcaaacaacgtgtttaattgacaaaaggcacgtgagaccacgtgagtacttgttttggtttcttcttcatcggtccgatcagagagagagaatcgccggtgagaaaagaaaatggcgtcggcgatttctctttctctcttaaacggagcaacgcctttgaaatcgaattcgctccacaaatctagactcactccacttcatcttcgaactatctcttgttctagactatcttactctccctcgagtcgcgaaatttctctcaaaactcaatctactgttcctatttcgtgtaggcgtagtaggtttgacttcgttcctcgttgcggcatttcgtcgaacgatttgcctactgagaaaaagaagagctttggggagtgggttgagtttgtgggagaggcggtttcgacggcgtttccgatatgggtttctctgggatgcttgttgggactgatgagaccaagtactttcaattgggttactccaaattggaccattgtaggtcttacgatcactatgcttggaatgggaatgactttgacccttgatgatcttcgtggcgctttatcgatgcccaaggagctcttcgctggctttctgttgcagtattcggttggtttgcttctcaatgctctatctttagtgttcgattgttacgaattatgcacaagttagaagagaaatcgagaaagatgagatcttgaaggaaccggtatagatgatctgataataggtttgtttggtttggtaacataatcttgtggagtagttagagttattgcttgagctcatgattcctgttttatgatcttaccaaattatagttttgaaagagtagtattagagcatggataagttcatagcttgctgatgaatagtgttgcaggtcatgccactatcagcattttttgtgagtaaactcttaaatttgccaccacattacgcagccggtctcatattggttggttgctgtccaggcggtaaaatacaattctttacttgattgcattatattaacacttgtatggtgctctgatgcttttccgtttgttgtttgaaggcacggctagtaatattgtcacatacatcgcgcggtttgtaatccaaacaaaaagaaacgacttttgagttccataatacaactggatgatctgagtttcttttttttcattgtacagtggaaatgttgcgctatcagtgttg

SEQ ID NO: 5741 - DNA, 3000 bp, Unknown; identical to SEQ ID NO: 5728
  misc_feature (1)..( 3000): cDNA_ID_1829148_gDNA_ID_1620813_Annot_ID_50621 3000 nt of promoter + ATG

SEQ ID NO: 5742 - DNA, 3000 bp, Unknown
  misc_feature (1)..( 3000): cDNA_ID_1829144_gDNA_ID_1620813_Annot_ID_50622 3000 nt of promoter + ATG
cgttttctagattatgacaccgcttcttacggcgaagcttgccaagcagtatatcacagttgatgctcttggattactaatgtcaacactacaggtttggttggttcagtctgtttcttattcggattagaacgagcgagtttttgttcattgactttacccttcttggctcctgtttgtgtgtggtcacaggtggttcttctcccagtgttggctggtgcatttcttaaccaatactttaaaaagctggtgaaattcgtctctcctgtgatgcctccaattgcggttggaacagttgcaatcctgtgtgggtatgctatcggtcagaacgcatctgcaatactcatgtctgggaaacaagtagtcttggcttcatgccttcttcacatctctggatttctctttgggtatctgttttcaagaatactcggaattgatgtggcatcatcgagaactatctctatcgaagttggcatgcaggtaactaaacagtatcttaaatgaaacggtaaccagagctattgaaaactcaatgtcaactgaggctttttttcttttcattttgtattggtgaagaactcggtgcttggagttgttcttgcgacacagcattttgggaatccactcactgcagtaccgtgcgctgtttctagcgtctgtcactcaatcctcggtagcgtcttggctggaatttggagacgcagtgccccaaaacagcttgaagactaaaaagaaagcaaaggaaagttcatgaagtcctcactgtgttactcaatttcaacatctttcaggaccatttagttaagtttgttgaacaaatgaaccaaaacgggttatgtcttgtaaagctttggaagatttttttttttttttctatgtctgagatttctcttgttattcttcaaagaattttgtgaattcgaaacatgaaaatcatattttgttcatcgtgaatcaagtgatgaggttgaaaaggctaatatgtaatttctaacatttgtggagggtagttttggggttttcaattaggaacagctagtcttggtcgcagaggataaaagacgttttaagtcgtcttctccaaatcgattttctttcacctttctctctgatttcaatttcaatttttgttcgtttttttcttccggaaaattggttgttgggtggatcaaagcttacgagatttgtacttttgttctggtgctacaagtccaatggaggcggaaggagaaaaacagtggagttctctcatagtaccttttgttctagagatagtgaaagagaagaacttcacaactattcctccgaggtatgttcgggttgatcaagaaaaaactgagatcttaaatgattctagtcttagttctgagattccagtcatcgacatgacacggttgtgttctgtttccgccatggattccgagctcaagaagctggatttcgcttgccaagattggggattttttcaagttagtctctttacacaccttgaatctttgtgtttctcgtaaaacgtgacttctgtttttgaaaatgctctcttgctggttacagttggtaaaccatggaatagactcgtctttcttggaaaaactagagacagaagttcaagaattcttcaatctccctatgaaagagaagcagaagttgtggcagagaagtggtgaatttgaaggatttggacaagtgaacattgtctcggagaatcagaaactcgattggggagacatgtttatcctcaccactgaaccaattcgatcacgtaaatctcacttgttctccaaattacctcctcctttcaggtacgagtcttgttgtagttgtgtgattacgaattagtctctaacaactgtaaactgaaaaatccgtttttgttttcagagaaactttagagacttactcctctgaagtgaagagcatagctaagattctgtttgcgaaaatggcgagtgttctagagatcaaacacgaagaaatggaagatttgtttgatgatgtttggcaatctatcaagattaattactacccgccatgtccacagccagatcaagttatgggtttgactcaacattcagacgctgcaggtctcacaatactcttacaggtgaatcaagtggaaggacttcagatcaagaaagacggcaagtgggttgtcgtaaaacctcttcgagatgctttagttgttaatgttggcgaaatcttagaggtaagagagattactagaaacctcttcccatttctatgaagaagtttttgctactgcattcttctgatgtgagtgttttgtttgctattgtaaagatcataacaaacgggagatatcgaagcatcgagcatagagcggtggtgaattcagagaaagagaggttatcggttgcgatgtttcatagtcccggaaaggagacaatcattcgtcctgcgaaaagccttgtagataggcagaagcaatgtttgttcaaaagtatgagcacacaagagtactttgatgccttctttactcaaaaactcaatgggaaatctcaccttgatcttatgcgtatttaaggaaaaagactctcataaaacatgtttcttcgtaattttgtaattaagagaaatctttcatcttgcttcttgtcattaaagacattaatacacacgctttaattaaggcagttaatgaagaaaagtaagaagaacaaaaagaggtgtagggattggctgactattgggcttttctatggacgcgaagcagcagattatagcactcctctctccccacaaaacacaactcagtaaaccaccggaagacgatacgaaccgttatattaacagccgtcgacgaagttcacaagacgcgacgccggagagaaaaagtcgagggatcaacactttcgacgatttttcatttctctttttaactaatcgataggtctgtagttgtaaccagcaaaaaaagagagggttttcttggtttataagggtttcgtatacaaagtcgagtttttttggggtgaagta

SEQ ID NO: 5743 - DNA, 3000 bp, Unknown
  misc_feature (1)..( 3000): cDNA_ID_2785812_gDNA_ID_1620813_Annot_ID_50624 3000 nt of
ctcatgcctaatgggagcttggattcttttctacacggtacacataaaacagagcattaagcacaaaacgtgtatttgagtggtttctttagccacaagttttttttgttatttgcaggaagaaaagctttggattgggcgtcgagatatagaatcgcagtaggagcggctagagggatttcgtaccttcaccatgattgcattcctcacattatccatagagacatcaaatctagcaacatacttcttgatcacaacatggaagctagggtttctgatttcggtttagccactttgatggagccagacaagactcatgtttcgacttttgtggctggaacattcggatatttagctcctggttggtacacaactgatagattcaaatatataaaccaaaatttggattgcatttcgattttgttcatgtttgtttttgttataaacagagtatttcgatactggaaaagcgacaatgaaaggagatgtttacagtttcggagttgttctgttggagcttttaactggaagaaaaccaacagatgacgagtttttcgaagaaggaacaaagcttgttacttgggtataaagttatctatctattttccttgtataagttattaatcttgtttggtttcaagcgacgtcgttgtggtgtgtaattgtatacaggttaaaggagtggtaagagaccaaagagaagaggtggtgatagataaccgattaagaggatcatcggttcaagagaatgaagagatgaacgatgtgtttggtatagcgatgatgtgtcttgaacccgaaccagcaattagaccagccatgactgaggttgtcaaattgctcgaatacatcaaactttccacacgttcctctttttgatgtttctcttgtcaagaaaaataatcaaattcagttccaaaataaagttttgctgaagaaaaagatttcgagatctgcttctttgaaaagctaaattgtaatttaatactccatattagtatagtaaagattatttataattgatttgttttagtatggaataaaggattattacacacaaaaaagccttatatcaactattcttttttaagattctcgtacaaagtgggcattggatctttaatttttccctaatttacagctcagctcacgttttgatgtcttgttatttgatcccaaatgttctcactactacattaaaccttttgaagcaattagcaaccttttttttttgttacttagcaaaaccaaaccaaacattacgtttatataacgacacttttgctaaaacggttacttttcctagaagcaatttgctggattattcacctcaaaatcctaaaaacattaattagcattagatatctaaaaaaagtgaaatacaaatctttgtttctttttaaattgttttattttataaaattgattcacttgctcatcatttatatacaccaaagagtgtagaagagttctctcactcaaacaaaaatcaaacaatggctaaagcatggatctgcctttccttcctcatcttcctctaccttgtctcaggtatataaattaccagtttaccactaatcagccatcctagtttaattaatttaataatcctaattaacagtatcatcctcatgttctttccttttaacagaacgaaacttcatcaacgtcaacgcagaggtatttgcttagaccaactatcaaattgctatctgatttttttttcttactcaatgagtttttgttctaagttgttgttatagaccaagacttggtgtgtggctaaaccttcttccgatcaagtagcacttcaagataacataaacttcgcatgttctcatgttgattgtcgtgttcttttgagtggatgtccatgttactcccctagtaacctcatcaaccatgcatctatcgccatgaatctttattaccaagccaatggaagaaactattggaactgcaatttcaagaactccggactcattaccataactaatccgagtgagtttgctctttctctttaattatgctatcgaaaaacacttctctatctatatatagagagaagtggttttaaaggtaatttcatttttacctttaagtatctggttaattatattaaaggtaatttcattttttctatatgtgtaggctatggaaactgctactatgaataaacatgagcaagaaaggaaaaaaaaaaaccatatttcttacaagcaaacagaagaggaatgtgttttcttgttgttgcaatgtttatgagttataatttaaatttccaaagttcgcagattttgattaatcaaatttgataacataaaagcaaaaaagaaagtatccaacacttatcaaaatttgatcacaattattccatctcattttcagtaatgacccttattacgtactgaccgtaaacatagaacttaccgtaattaagcttttaaaattgaattcttcaccacatgaacatttggaaatatgtagaacaacgtaacgttttcttttcttttttctttggtgtcagaaactaacgcatttctaaagattttttttttttataaaggtaacgtatttcgatatactcgaatgttagtatgttaaaccattggataaatgacacgtggtgaaatcttagcctcaagattagataagcgtagactaatcaatcgtttccctcttctccttggtattgaacaaaaacacagtcgtcactttcgtgcctcccgaatgatctcatgtgggcttgtctcgtccacccaacaaactatagaaaaaaaactcgatcggctgatacttaatcacccacttgattttgtatttttgtacctttttttgttgtaatttttccatacacccaatttcccgtggaagaaaaggagtcagctttttcgtttgctttaaagcttgaatctttacatagttccagttactttctatagagcttcataatccctagttgcccaaaaggattctgggttttgtgagaatgatgacgtc

SEQ ID NO: 5744 - DNA, 3000 bp, Unknown; identical to SEQ ID NO: 5727
  misc_feature (1)..( 3000): cDNA_ID_1829116_gDNA_ID_1620813_Annot_ID_50629 3000 nt of promoter + ATG

SEQ ID NO: 5745 - DNA, 3000 bp, Unknown; identical to SEQ ID NO: 5726
  misc_feature (1)..( 3000): cDNA_ID_3078217_gDNA_ID_1620813_Annot_ID_50630 3000 nt of promoter + ATG

SEQ ID NO: 5746 - DNA, 3000 bp, Unknown
  misc_feature (1)..( 3000): cDNA_ID_2992558_gDNA_ID_1620814_Annot_ID_50631 3000 nt of promoter + ATG
gtgtttgttagtgaaattgtttaatgcatgaaaaactcgatatcttttcctgactttcttaatagttttatatttgtgagttaatatctttctatctccatattatttgtgtgttgtttttgtgttgtcaaaacaaataaaatcatgagagatagcttaaacataattttgttaccctttttttaaagtcaattaagagtaagcaaatatttaatctttttgttattaagaattgataagattttattgaatatattaattcatctgcatcctagatttttataaaatagttcattgtaaaaagtgaatcgccgagttatatatgcgtatctaatctaagtatcatcacgacgttcagctctaatctaaatcaaaccacaaagtaatcaatattgtaattttctaagtttaaggacttcttttgttttggaagcgtgtaattaattaagggccaaacatgtttttccattggctcttctttgccaccagaagcaagttgcaaaagagagtgaagcacccaaattgattaaaaagaattaaaaaaaaaaaaagggttcaaatcctttccatcgtgctgcaaattgcactttttgttggtcatccaaattgctcattaatcttcgttaaaaaatatataacatttgggtgatgattaaaaaagtagactgtagtggacccgccacacctaatcgtacccaatgataatccggtaaggttcggttccatttgtccgcattcccaaacttagaaaatgaaacggaaagaaaaacataatgtgttttagtttttatcttaaaaaactatagacaaaaactcaaaacatttttcggattgtataccaataaatagagagaatgtagttttaacctcgcaagtctcaactgatgatccgactcgtccaaagcatgtttatagatttaactagtttagctaccattcaaatttgatttttaggttaccgtccatttttataggaccaattctataagaagtggtttagatatcgggtagattttcattttccgacttcatgcatgatttagttcttaaaacttgcatgtttggcttctactaagacaaccctcgtttttctgacgactcacgtggtcaaacggtgcacaaaggtcacgtgaggcacgtgcgttctactgtttaaacgcctcttctcttttgcttcttttttgccaatttgaaagagataagaatacaaattaaaaagatgtttcttccactttcctcatcgccgttctatgctcactttctttggtcggatttccaattacattgttaactattagtggtcacataattttttcatgacgtggatcacacttctctttttacatgtctatctccttaattagtatctttaattgctttcgacatcaaaagctaatatctatgttttacactctattagttgtttaatattcacaatattcaatatcaaatctcaccgtatttggaaaatgtttattagttcagtacatgacacactcgtaatcaacattttgaattttttaaaatgttttatttgttcagtacatgacacactcgtacatttcgaattgcttactttttttgctttaacaacgtccaagtacaaaggagattctctaagactacaggatttgactttttaccagagaatctatcaggttaaaaacgatacacacacacacacacaaatttacaaaaacaactctagtctctctacttctaaaagtttaataatttgtttttaactttgaactacaaacgaactccatttattgtttcttggatcacgttaagtaacgtggcagctgaacgttgacctatgactcaaagtgagtcccactctaactatcatcttgacggctcagagttctccacgagtgtgaagtgtcaatcggaggagggggtaaaaccgtaaaagcttccgacacgtcccacgaaaaaggataatacgagaaggctcttctcatcatccaacggctcacgatttaacaagactagtctcgcttctgtctcttctcatacccgtcgatctgtcttggcttttcagctatcgccacctcttctctcttttttgcttatctcttcaattttcggatttaaattttacgaaaaacaaagaattaggataatactatttgtctctctaattctgaccataattaatttttattttcatatttgacttttacaaattcaagtgtgggagttcctttattcttgttgtatcactctcaatgcttaactagatttgacatccacatatgtgtttgtccgcttattatacatatgatgatatgaaaatatatcaatcattatatcattcgtaagctgaaaaattagtatgctatttttttctatgtcgaaacgtaattatttatgaccatatttgaacaataatatcgcattttcaccttttatttttaaccttttaagactttccttttaggtcttctagatgcacactggacagacacgcatattcaagatacgtgtgtttttggaggacttcaaaaaaaaaaaacgagataatgattttcccaaattacataaagaagaaaacaaattgattttcccaaataaaggagtcagaaaaatataatttaggaacaaacaaaaaagatacctttaataataaacaaaaataactctaaaaatattttaaaatgaaattcgtatgaaatataaaccgcataaacttatcgtgaccgccttcaaataaaaataaaaccctttattttctctctttcagccgccgctttcacttacctcttcctcttccttcttcttcttctaccttcttctcgtaaaggttttgctacacactggagctcgcaaatctggctatcgaaaaccacaatcacaaactcaacttcggggccttcaaggccaatcacaagaaagtcatggtgagtcttatttttaattctttttgtttgtttttaccttgctatcaatcttctccagattctgatttggtttcgttttgttcagggaccaatg

SEQ ID NO: 5747 - DNA, 3000 bp, Unknown
  misc_feature (1)..( 3000): cDNA_ID_1829219_gDNA_ID_1620814_Annot_ID_50633 3000 nt of promoter + ATG
gtagtagtcgaattatagtttgtcatacgaaagaaataaattagaaacaaattataaaaattagagatagaagagaagtgattagtgagtttatggtccaatccattgaactcgactttccgtaccaactcacagctatttccctttaacctttttccactttaaattaatataattatgtacataaatgtatacgcatatatataaccatcaaaagttaacgatcagcttacaaaatgatgacatctttagagaaagaaaaaaaaagaagcaattacactctcttttatttttgtcaactcttaattccactatattacaatatgaatggtttttgatgattaattttgatgaagaatgaagagagtgaaaatattagattttttcaaatgtttttctagatattctaattagttcttaaaacataattttagctaccatttcatctaacatattctactacaattcactctctgtattttattcatctatcattcttatactaaaacttatctatataaaattttcttggtaccccttttcttcttttttattcaatatattattaggcatataaagacacaaaagggaaaaaaaaggattaacatcaccattagtaaggaatgtaagaatagatgtagaagtagaacgaataaaaggttgacacattaataaaaaaatgagacacgattaacaacgatagattataataatgttaaaaatactcataaagagcgaattaataacaacgtcgttttatggaacaagaagagaagaagaaggacaatgagccacttgcatgcgcgtagggacgatacataaaacccgtacgtgtgaggtgtggcctctctatctcttgtcttgtccaatctggtgtactaatgtcttgaggagtgttactttcgtagttattcagattccgtatgggtaatgatgtcgtttcacttatcgacaggttttgggtgggattgtttttttcccttaaccttacgtgatcgcgacgacttctccgtaacgcggtgtcgagatctaagcttcgtacgtaaactaagctcttggaatttaaatgatatatgtaaacacgaaagatatttctaagttagtttttacaatctaaatttcaaaccgaaatctaaactaatcttcgaaacgtatacaaaaaaactgagtatgtttatcatttaaaacctataagtaactgatatacttcttacataagcttctgtacatctcagttctataatcgattagacaatttgttaggcaaaaattgttagtaccatgtcctaaaagaaaagtcgacgatcgtttcgttatcactaaccacttaggcatgttacatgttcataactaaatagtacaacgattaaataaatatagatatattacacgggatatgagttataagatagttggttcgtgggacctacattaaaagatggtttataataatgatttggactgttaaattctatatttttagcccgtagaaatcattctattcgataaaaacgtaacagagtgatataaagaattaaagatcgatcgaggttgaggttcgaaataacgtggtcaagatatgggaagaatatataattatagaagaatttagaagaatattgataaatgttaatattgaaatttaggaagtttaacattatctttaaatatattatttatatttatgtttatcttaatctctatacaaaagaatgtaagttataatattatctttatgagaatctattacattttttcttataaacactttgtgttctttacttttattaaacttatcggttatcattaatcaacttattatggtatggtaaattagtgcagtaatgcaagacttaccttcaaatcaaaagacaatagttcgagtttttctttcaattttgtttgatatcatactggttttaaataccaaaactactaagattttcacatatgaaaagtttaatctaaaattttagtatgaaatcctccaattatattttagaaatgacaaaaaatattttctcctaagaaaatgttctatttcatgatataaacttcatggtaattatagacttttacattaactataagaaaatacacaacatatgtgtcaatgttttgaatcttaggtacacatatcccaaaactcaactatataaatcaaacataaaatacatcaatgatctaaatatctcctgccacatgaattttttaaaactcttttaacaagaattgactagaaagaaaactctttaaaaaatatgttgactagaaagaaactcgttaacaaaatacataaatggtgtgaaaactaaaatggatccgttaattcagggtacgagaatttaaagagaaacagtgttgaaattacttttaactagataaaaagcaaaatgaagtatcttggatccttcgactacatatctctctcatatgggcggctcgaataaatatcagaaaaataccctcactactcttcaaatttacacaatatgccatcaccgtagaaaacaaataaggaaaaaaaaaagctatcgtagaaggtaaggacttgaagacatcagagaccaaggaccaaaaaaaaaagaaaaagctttgattaccagaagaagaagaaggacaaagtttgagactttggaagatttgaagaaggaagctctaagctggtgaggagagaaaatcaaatccttttctcttagtttccttgattggatcgggaaaatctacaagttgaaagattcgttttttgaaatcatttcgaatctgaacattcgatttcgagtcatgttttgcttgatttgtcttaagctttcgttgaatcgaagaagcgtttatgcttgaaagctcagattttgtgtttactgattagctaagagttagatatgatgagtagctacgttggttcgttcctcccctagagatctccaactgaatcatcttcttcttcaatctacaaaaggaggactttgaaaaagggtcagactcagatcgagagatatg

SEQ ID NO: 5748 - DNA, 3000 bp, Unknown
  misc_feature (1)..( 3000): cDNA_ID_1829215_gDNA_ID_1620814_Annot_ID_50634 3000 nt of promoter + ATG
catgtaagcacctattgcggattagagggagcatcgatcatgtgacatagtgtggctccattatctttaaagttttgccggagttaattatttatgacaaaattggtgtactttattccaagatttaataatattttttattatttatttgttttacttaataatactttttattcaaaagtgtaaacacaaagtaacaatgcctatgctgttttttttcctatcaattatttaaccgctgcatttgattagtatatatggaaggaatatttaactaccgattatcacttacggttgttaatgacaaatttttacaagtaacaattgatttgaaaaaggtcattcagaaaatcatcgctagtctgccacaaaattcaaatgtgttacaatgtatcatagttaactacaaaatcctttattataacaataatgggttgaccactataaatcctttatcttgttttatacatttcggaggctaattgacattttggtctgaatatatccatgcataattaaaatttcgagtaatattgtctcaatattccttccatatatactatgaataaactattagagattttaacaaaccctagaaagtccaaaatacgttttttgtgaaacatacgaagaaaatagataacatatatgaataatatgcgtagaaatattgacgaaagtgacgaaatgtaacagttttcgtatcatgtatacgtgaatttccatgtcaggaaccgctactagaattgataaggtcaaaagatgaagctcatcgtgacattccaccaaccgaaagtactctcaccgcttcacgcatgacccaaatatatacaaaagtagaaaaaaaaaagcacaaaaacaacgtgtagaggcgataatcataaaattgagttcttatacctatacatttgaaaagcttgatataaagaaaaatatgtatcatagacggatatatatagctcgtgttgcggcatatattgtcagttagttcatgcctattgattgatttatttgtgtagctgtctctttgacgaattaactcaagttggtatattgttaattagttttaccagctactcactttattgtcgatctagtgcttaccaaactaatggcaactacaaattaaagtcgtctccgtatattaacgtatttttcaattctatttacgcgtataatatatcttcgtcaactattgtggagtagatctaaataaacaaacagcggaaaactaaataaatgtcataatatgtaggcaagaaaacaaaagagccattagataatgtgtgtcttgtattgtatttattgaatcttaccaccgaaaccgacatatcattagagttttagtaagcacgtcattttcagttagtaggttggaaaagaaaaattctcatcttcaatatgaaaatataggatgagtatctttttatgaacgttaatcgcttagttgtggttaagttatttaaagtaaattttaatcaagttaggcagtaaaaaataaataatgaagaataactatcttctttacaatatgcaatttaaatttctatagggaaattatttttcggttatagtagtagcacaattgaatcttattgatgtatttgaattatactaaatattttcattgtatcacccaataaaaagctttaatgaaagagaccaaaattaggaggttagatattacataatcatcgttaatatgcaatcaatataattcatgaaacgagagagttaagaatgagaacgtcgttttctaatgtggaacagaaatcgcatatccgttttcgtaatagcaaggcccatcccttctcacgcgctactttatccgacccgatccaacctgatccggataatataacgaattatggtaaatctttgaattagtgttaattaatattgttggctaaaatctaactaaaatactacaacttgctatggtgatgtcaaaaactgcatttcatcctattaaaggatgccacgtgtatttatcttattaagtccattacaaaatgtgatctttttacctataatcatggatgataatttttcaatatattagtatttttaaacatattttgaaaaattattaattcttatctcaaacaccactttaatcattaagaagctcctttaattttcccttcggagttaaattatccttttcactttaaaaattagaaagtcttgcaaaataagaaaatttctgaaacttatagataattgatttgtcattttcaacaaaagttctattaatcctcctttcataaatataaaaagatgaaatccttttcttcatggataaaagtatatttggatatgatattaatgtttaatgacgtcattaaatagtagcaattagtaataatgaataatgatgacaatcataaacagaacttgaagttaacaattttaacactgataaaaacatttggataaatctctgtatccaagatttacatgttccaacaatatacgctactatatatatatttcttactaattaaaatgagttttaatgctaatctatgctaatcaaaatatgaaaaatacaaagatattggttaatcgataaatacaataaatcagattaacgaagccctctgttcaacaaagaggcttctcgatctcgtccttaattccttccttctctaagccagctgttttcttcttcttcttcttcatctctctctctctctcgtctcctactctctctttgctcggaccaaaatttcctcaaattcctcctctgttaatcgccggcattgtctttcttaccgatccgactatctcagcattcgaaatctccggcgacaaagcctgatctcaaggttagttgcaaatcgcttttttattttccctgaaatttctctgatctccgtccatgtcggtttagttttttatggtcgtgaattttcgttagagctggctgcaatttcgtttgatctgatttattcttacgcctttgattagcttatcgttcgtgaagcggtgaaaatg

SEQ ID NO: 5749 - DNA, 3000 bp, Unknown
  misc_feature (1)..( 3000): cDNA_ID_1829211_gDNA_ID_1620814_Annot_ID_50635 3000 nt of promoter + ATG
ctataaccgaaaaataatttccctatagaaatttaaattgcatattgtaaagaagatagttattcttcattatttattttttactgcctaacttgattaaaatttactttaaataacttaaccacaactaagcgattaacgttcataaaaagatactcatcctatattttcatattgaagatgagaatttttcttttccaacctactaactgaaaatgacgtgcttactaaaactctaatgatatgtcggtttcggtggtaagattcaataaatacaatacaagacacacattatctaatggctcttttgttttcttgcctacatattatgacatttatttagttttccgctgtttgtttatttagatctactccacaatagttgacgaagatatattatacgcgtaaatagaattgaaaaatacgttaatatacggagacgactttaatttgtagttgccattagtttggtaagcactagatcgacaataaagtgagtagctggtaaaactaattaacaatataccaacttgagttaattcgtcaaagagacagctacacaaataaatcaatcaataggcatgaactaactgacaatatatgccgcaacacgagctatatatatccgtctatgatacatatttttctttatatcaagcttttcaaatgtataggtataagaactcaattttatgattatcgcctctacacgttgtttttgtgcttttttttttctacttttgtatatatttgggtcatgcgtgaagcggtgagagtactttcggttggtggaatgtcacgatgagcttcatcttttgaccttatcaattctagtagcggttcctgacatggaaattcacgtatacatgatacgaaaactgttacatttcgtcactttcgtcaatatttctacgcatattattcatatatgttatctattttcttcgtatgtttcacaaaaaacgtattttggactttctagggtttgttaaaatctctaatagtttattcatagtatatatggaaggaatattgagacaatattactcgaaattttaattatgcatggatatattcagaccaaaatgtcaattagcctccgaaatgtataaaacaagataaaggatttatagtggtcaacccattattgttataataaaggattttgtagttaactatgatacattgtaacacatttgaattttgtggcagactagcgatgattttctgaatgacctttttcaaatcaattgttacttgtaaaaatttgtcattaacaaccgtaagtgataatcggtagttaaatattccttccatatatactaatcaaatgcagcggttaaataattgataggaaaaaaaacagcataggcattgttactttgtgtttacacttttgaataaaaagtattattaagtaaaacaaataaataataaaaaatattattaaatcttggaataaagtacaccaattttgtcataaataattaactccggcaaaactttaaagataatggagccacactatgtcacatgatcgatgctccctctaatccgcaataggtgcttacatggatgtttaaaccgaatttaggcggacgagagttcttagttgtttatatatacgtaatttgttttgttgtatatgtgcagtaacaaaaataacatcgctttaaaacaaaaaaaattgaagtggtttagcataattttagatattaattaatcttggtaaactcttaaaaaaacagttttgttttagaatattaaacaaaaatacataattgaatatgatgctcttgttacgtggatttccacacatggcctttttgggacattttgattttccacgtctcaatatttcacacgcctacttatgtgatgactgatgcgtgattagtcaattttctgtattaaattactgttttgtttgtttgtcaccattctctgtatttccttaaagagtaaaagaaagtaaaaatttagtcaccggttgagtttttttctttccaaacaagagttttaatgatggagtgagtttttcttgtactttgtcatgttgttatggtagttgattcttgttatatcgatatataacatgagaactctttttaatacaaaactataaattatacgtgttgcatgtttgaaaactatattatcactaagatcaatagatctctttagagatttgacaaaaataaacaaagacatatatataaattttttggatatttttatggactgcccagttttcacatgataacacatgaaccttcgtctcatatacatgtgccatcttttactaatctaagattgcattcaaagtaatcagcctccatgtcattgtcaccatttaaagtttttcccattccttgttcattattacacacacattatatttgtcagcgattattaatgttgaggtattaatattttgacaattttaattcttataataaacaaaaacacttgcattcattctcaaattaacaaacgcaaaagaaagcatgagaccattgtcttattacgttgggcttaggaagtatgtacaggcccagcccaatccatgtacagagtcggtttcgttattggatccatagtttcaaaacggcatcgttaaagttttccaccttaaggcggtatcgctagcttatagaaagaattcgcagtcgaataaacgaaggagtgtctcctttagtcatttaggtcgattattaggagatagaggacgtgagaagggagagatctgagtctcctactagggtttcttctactggattgattcgttgcagagagtgaagctaagaagagattttcgtagctgtttctgtaagttttttttaatctccgtttcctcgatttgggtgtggttttattagggtttatcatctctgggagcttcttcgtttcacttttggttcgtttcttcgatttgaggttaacattgtgtatttttttttgttcctgtttgatttggtttctaggttttcggattggtag

SEQ ID NO: 5750 - DNA, 3000 bp, Unknown
  misc_feature (1)..( 3000): cDNA_ID_1829207_gDNA_ID_1620814_Annot_ID_50636 3000 nt of promoter + ATG
acccgtaaacatgtccgcttgactgctgtggatctgatggcttattctcacatggataacccgcagagtcctgatttcttgttagggaagctggaagaactggacccttttgttgaacaaatccgcgaggaaacactgaaggagacactgtgtcatggtattggatacttgcatgagggtttaagcagtctggatcaggagattgtgacacagctctttgaagctggacggattcaggtttgtgtgatgagcagttcattgtgttggggcactccattaactgcgcatttggtggtcgtaatgggaacgcagtattacgatgggagggaaaattcacattctgattatccagtccctgatctgcttcagatgatggggcgtgctagccgaccacttcttgacaatgccgggaagtgtgtgatcttttgtcatgcaccgcggaaggagtattacaagaagtttttgtacgaagccttccctgtggaaagtcagctccagcatttcttgcatgataatttcaacgcagaagtggttgctggggttatagagaacaagcaagatgccgtggattatcttacatggactttcatgtacaggaggcttccccagaaccctaactactacaatctccaaggtgttagccacaggcatttgtctgatcacctatcagagctggttgagaacaccttgtctgatcttgaagccagtaaatgcattgaggtagaggatgagatggaactctctcctctcaaccttggtatgattgcatcctattattacatcagttataccaccattgagcgcttcagttcactgttgtcttctaaaaccaagatgaagggacttcttgaaatcttaacatcggcttcagagtatgacatgattcctatacggcctggcgaagaggacaccgttcgaagattaatcaatcaccagaggttctcttttgaaaacccaaaatgcacagaccctcatgtgaaggcaaacgcgcttcttcaggcgcatttctcaaggcaaaacattggcgggaacttggcaatggatcagcgtgatgtccttctatctgcaaccagacttcttcaagcgatggtcgatgtgatatcaagcaatggctggctgaatcttgctctgctagctatggaagtaagccagatggtgactcaaggcatgtgggagcgggactccatgcttctgcagctccctcacttcacaaaagacttggccaagaggtgccaggagaatccagggaaaaacattgaaaccgtattcgatcttgtggagatggaggatgaagaacgccaagagcttctcaagatgtcagacgctcagcttctagacattgccagattctgcaaccgcttcccaaacatcgaccttacttacgagattgtgggcagtgaagaggtgaacccagggaaagaggttacattgcaagtgatgcttgagagagacatggaggggaggacagaagtgggacctgtggattcactgaggtatcccaagaccaaagaagaaggatggtggctggtcgtgggcgacaccaagacaaaccagttgctggcaatcaagcgtgtctcattgcaacggaaagtgaaggtgaagctggatttcacagcaccgagtgaaccaggagagaagtcatacacactatacttcatgtgtgactcttacttggggtgtgaccaagagtactcgttctctgttgatgtcaaaggatccggcgctggagatcgcatggaagaatgatttgttattcaggttagttccacagttttctggtcatagttttcggatttagattctgtacatggttgtagtttttgtgttacgaacttggctttactagattctgctatgtgcattgaccaactcgctttcatctattgtttgagtaatttgttcatcaatctgctatttttctgtttcgtctgttttctttttgcatgagctatgtattaggttttactcttgagcattgatttacttatctaggtattagaatacaggtatgctcatggtatatatatacctagtattgtgaaatgattgattgataagttagtgaacaatgttgatcagcaaattgttagaaatctgtataattggatggtgatttgatgtgtgctttggatggtgatttgatatgtgtgcatcactgctatatgaaaactgctttcttgaatcatgtctcataaaaatctcacatgatgttcctttaaaatagctgataatagattttgtattttgaaatccagaaaatgacacataatttctcttctttgcaggctatgctgattctggagagtgtgacttgtcttccaaaaagcctccgtaccgtttgggtctctgcaatcttagctctctgagaatatatattaaggtgtaatcgtttttttctggtcttttactattccaattactctttttatgtcgtgcatcgatttttaatcctatgtatggcttgtttctagttttgtttggaccaaactcgacagaggagccaatgtcaaaactacaatttgagtttgtgactttgaaagctgagattacttgaaagaattttaaatgcagcagtgttcattttgtaacatctgagttgtgtgatactggcttattgagtcaccgatagtttttccttaaaactaaaatgtactattgcaagtaaaaaccaaacaaaaaaaattcattcaaacttgcattataaccaagtaaacgtgatcaatagaaacttgcaaaatcacaaccaaaatatttgtccaaacaatatgtagtcaaaacagtctgttgtgttcataaaaaagtcatataacgatacaccaaaaagaaagaaacggaggtgtttggttggtagtatattcctcctcctcctctttcttcttctccctcctcactatatattttgaagtttattaacaagaaccaaaaaaagtcacactcgaagtctcacaccacaccaaccacttcttcttcttcttcttcttctacataaaacctaacgcc

SEQ ID NO: 5751 - DNA, 3000 bp, Unknown
  misc_feature (1)..( 3000): cDNA_ID_1829199_gDNA_ID_1620814_Annot_ID_50639 3000 nt of promoter + ATG
gaagcttaattatgaaaagccaatgcctattcaaacacaagcactccctatcatcatgagcggtcgagactgcattggggttgcaaaaaccggttcaggtaaaacccttggttttgttttgccaatgctgaggcatattaaagatcagcctcccgttgaagctggtgatgggccaattggtcttgtaatggcacctactagggagcttgttcagcagattcacagcgatatcagaaagttttctaagccattgggtataagatgcgtccctgtgtatggaggatcaggagttgcccagcaaattagtgaacttaagcgaggtactgagattgttgtgtgcactcctgggagaatgattgatatcctttgcacaagcagtgggaaaatcactaatctgcgaagagtcacatttttggtaatggatgaagctgatcgtatgtttgacatgggttttgagcctcaaattactcgtattattcagaacattcgaccggaacgccaaactgtgcttttttctgccacttttccacgccaagttgaaactttggcacgtaaagtcttgaacaagcctgtagaaatacaggtcggtggaaggagtgttgtgaataaggatataactcagttagttgaagtcagaccggagagtgataggttccttagacttctggaacttcttggggaatggtctgagaaagggaaaattctggtctttgttcagtcgcaggaaaaatgtgatgccttgtatagggatatgattaaatctagttacccttgtctgtctcttcacgggggtaaggatcagaccgatcgtgaatcaactatatctgattttaagaacgatgtctgcaatttgttgattgccacaagtgttgctgctaggggtctagatgtgaaagagcttgagttggttgtaaactttgatgcgccgaaccactatgaagattatgtgcatcgcgttggcaggacaggcagggcagggcgtaagggctgtgctgtgacatttatctccgaggatgatgcaaaatatgcaccagatttagtcaaggccctggagctttctgagcagccagttcctgatgatctgaaagcacttgctgatggtttcatggtgaaagtgaaacagggtattgagcaagctcatggaactggctatggtggtagtggctttaaattcaacgaagaggaggaagaagttagaaaagcagcaaagaaagcacaagcaaaggagtatggctttgaggaagacaagtctgactcagaagatgagaatgatgtagtaagaaaggcaggtggtggtgagatctcacagcagcaggctacttttgctcagatagccgccattgctgctgctgccaaagctgctgctgctgctccagtgagtgctcctgtgacagctaaccaattactggcaaatggtggcgggcttgctgccatgccaggtgtccttccggttactgttcctacccttcctagtgaaggggcaggccgtgctgcagccatggttgctgccatgaatctgcaacataatctggcaaagattcaagctgatgcaatgcctgagcactatgaagcagaacttgaaatcaatgacttcccacaaaatgctcgttggaaggtcacccataaagaaactttgggtccaatatcagagtggactggagctgctattaccaccaggggtcagttttatcctacaggacgtataccgggacctggggaacggaagctgtacttattcattgaagggcctagcgaaaaatcagttaagcacgcaaaagctgaactcaagcgtgttcttgaagacattacgaatcaggccatgtcctcacttcctggaggagcatccgggagatactcagtcctttaatgtaagtcgagaattctagtccaatttacaatctttggtgataaatttatgctaaatgctttgctttagccttgcatgcagactattttctttcttacataactcttttaatctcaaagttcagacttatggatctttagtttctgtcttttaacaggaaagcaacaatgaggtgtgtgattataagggattcaaatcactgagagttttattaaacaagtattattggttgatgttgtggaatacaatctctgcacaattgctaaatctttttacagacttgaacttgtcgtgattagagacatggtctcataatgcttgttgtttctcatcccgcaactcttttcctctttttaattctattctctttttctttgtcatgtttatacaatgtcctcgatgggtttgctaatgagcattaccgcgtggtggctgttaaatgatgggtaaaatctagtttgatggaggttgtgtttggcactatgcttgttagtttcttgcatcaagttccccgttttacagcttttggcatcttttctgcaggggaaatctgtgaaacatgaagctcccggagagatgatatgtaattttttgtgatagacaaggcaaagcttttcttacctctccaatgggtaagacttggagcttattcagttatgtttctggatcctatgtctgtgaagctccgactatatctgcttgaccaatattcttttgagggaaaagtttacatctactgggggagttcatggacttgcgacctacttaaacgctgaaggatgctttccgagtaatggtaaaaggggatggtgcattcagtatgtagtagacataggatttatgaatcaagatagtagtactcaagttttgtggatcaaaatttaaaactaatgcttctgaaacagtgaaacagatggtctattatgtgttgatgataaacggctattctcgtagacaatagagaagcttgatccacatgaaaggttgttggtggccaaagtcgatttgtgtgaccgcacctttatcaaacaatgaacataaagaagtgtcagaatgttaagagtaatttctggaaaagggatggaacattctattcactccaaatgttagagtagcattgcacaactctaatg

SEQ ID NO: 5752 - DNA, 3000 bp, Unknown
  misc_feature (1)..( 3000): cDNA_ID_1829191_gDNA_ID_1620814_Annot_ID_50641 3000 nt of promoter + ATG
ttctaggatttcacccgtggtagtatttaattgtataattatattttaattgtcattctaggatttcactcctaattctatcgcaaattattatcaacccaaaccagtcaattctaaaatatcacccgtagtaaaccatcccatattaatatcgattcaaactcgtcaattataggatttcactcgtggtagtatttaattgtataattatattttgattgtcattctaggatttaactcctacttctatcgtaaattcttatcaacccaaacagtcaattataaaatttcacccgtagtataaagtttaaatatttataatgtttaaatttattataaaagaatcaaaatgtgttttaaaaaaattaaagttttaagttttttttttttaatattgttaattttgtttagtgtttaagattatgtaattatattatgattgttattatatgtttttttccatagcatactatcccatgttattatccactcaaacccgtcacaccatataaccccgtcccgtgaaattaaacacaaatttgtcattttattataaattttaaatatttataaaattagaaacttcaaaaaagattaatattgacccaaacttcatcattgaattttgagtgttatatctaagatttctctcgcagtatatcgtcccgtattaatatcttttatattgtttaaatttcttgtaatatttaatttataattttttaaactttttaaagtttcaattttttaaaataaataaccctagtaaaacaaaccattttaattttggacacctcataaatcaagtttcatgctcattcgtaatcgaaatcattttggtcctttttatagtatggctcttgaccattgtccaatttttttaagcgatatagaacattctaaaatcgtaattattatccacccaaacccgtcctaccatataatccagtcccgtgaaattaaacataattttgtcattttcttataaatttcaatattataaaatttgaaacttaaaaaaatacaatatcgacccaatttttaagatttttcctgtaatatatcatctcgtattaatatattttttctatatttgtaatgtttaaatttcttgtaaaattcaatttataatttttaaaactttataagttttaaaattataaatatttaaagcattttttaaagataaactttataaaaagtttttaaaattataatatttaacatttgataaagttataatatttataattttttgaaacattttaaagttttaattctttaaaataaaaaatccgagtaaaatcggataactattttaattttggacgcctgataaatcaagcttcatgctcattcataatcagaatcattttggtccttttataatatgggtctgaaccattgtccaatttttctaagcgatgttggacattgtacacatattatttcttcataggttgaataatatatgtccgttttaaaaaatttgaattacatcatattcagaaaaaaatataatattttattaactatatatattttatataaattcaaaataaataaagtataagatcaaataaaattgaaagaagaattatatatttatgtttaaattaggtagaaatattttaggaaattagttaaggtaaataagaaatatggttagtttagagatattgtttatattaaatttggtaattaaatcattaattttcgtttttaattattagtttttaggtaacttttccaaaaactaatgttatccaagatcagaactgaattaaacatgttatccaggatctgaacagagttaagccgagtaaaacccacccatttgaattaattgttgaattatggctcaaatcttcaacattatcttcaaaaatcccctccaaacatgtatatatagatatttccattatgatatagttttcacatcttaactccaaatcatgaaacctaaattttatttccaagtctcaacatcatatattttaattatcatcttgaacttcttgttaaaaatataaaattaattcataaacttttctataaacctaagttttttaatattttttgtatcgtatttatactaatttcgatcttctttgtttcctccgtaatcgttgtcgtaatttcgtaaacctaaatttcatatagctcctttcttctatgtatatatgttttgtacaatgtttcatatatataataacaccctttggcaaaaaaaaaaaaaaaactttttcaatgtttatctttcgtggttattacatatagtagaaatcccaacattcaacaacaataaaaggttacaaatcctatatttaccaaaaattaagaaagtctaaaaagactaatagatacaaaaagaagaaaagaaattgtttactttttgagtgtaaaacaaattaaagttaaaaaccacataacatcccccatcccatcttttttactaataccttcctccattaacataagattgtctctcctctttcgaattgtctctcctttttcagctctctctctgtatctccttcttcttcttcttcctccagcttctttcaatttctccggctgctaaaccctagcgcgccgtcggagtccctgcgttctcataccaacctttactcgccgtcgccgtcgctgcagaactggtaagcatatgtttttttttgctgctctctgtattctatggaagctgaaaggtcttctcggcttgtttatctgtggtagttttgattaggatgaggttttgtagtaatagagtgagtgagtttgctccaattcttaattgcgtttagagatagaagagagagagagagagaagctatagtttccaggcggagaagaaagacaattcctttttgtttaatctggaatcaccaatagttagttatatacagtttttttatcttcttcgtttttttcttctggatttgttcttttgtccttgtcttgctgtgactgactactccacaacagaaatcgaagcttaag

SEQ ID NO: 5753 - DNA, 3000 bp, Unknown
  misc_feature (1)..( 3000): cDNA_ID_2168553_gDNA_ID_1620814_Annot_ID_169170 3000 nt of promoter + ATG
catgcatgcacgtttttggttatttagaaatacggatatttcagttaacattacagtgcagttcgattcgattagttcggttaaagtataattcaagtcttacaggaaatgtttttggttttctttacttcagattcttttcgtttaatttggttctgctcctaagtcctaattatgaatttatgatcatcagattatactctctagctgcttttgtttctgcaccttcgagagttttggtgtctattataattttctgacggatgtgttacatataaacttttttaatcctgttttatcttcatttatcaagtacatgtagatcaaactaactcgcaaaattcacaccaagaaaaaagaaaaaaaaaaaactaactcacaaaagtgccctttcagagagagttgaggttgagggcctgaggcaggttcaattgggcttggaagaacgcttaatttggtttgtaaagcccataatatgtcattacacaatacatgacccagacggatgtagctagctcgtattagcccatacggatcaaataaagtaataaactcattagacgaagatggcagtttcgtaaatacgaattattttacgttcgttatatgtaaaatagggatcgatgaacctggattgatcctagtactgttaaagagacacgtaggatagtgactcttgtcggctaaatacttttatagcgtaatctttgtccgtatacttggtttggttcctttgaaaagctccttcccgaaatcgaggacctaactccgatgaatgatgtcgatcgtatcttcatgcgtattcatagtttattcatttctctgagattatatcattcattcaccttcttgtctttacttttttgctccttgtctttacccttatacgaagagtccttttaaattttcggatgacaatttcgaattgataagtaacttccatacaactcctcaccatttcggagggttagtcgaccatatcactactctaatggctatgcgtggtttactattcgtatgtatgcttgtggataattctacaaacaaaaaaaaaaattgttacttcaaatttaaagttcgttacacttgggttatactattagggttaattactcgaacttatttcttttaacaaaacctagagtttttcttgtttctattgtaccatatatataaacgtgtttgttagtgaaattgtttaatgcatgaaaaactcgatatcttttcctgactttcttaatagttttatatttgtgagttaatatctttctatctccatattatttgtgtgttgtttttgtgttgtcaaaacaaataaaatcatgagagatagcttaaacataattttgttaccctttttttaaagtcaattaagagtaagcaaatatttaatctttttgttattaagaattgataagattttattgaatatattaattcatctgcatcctagatttttataaaatagttcattgtaaaaagtgaatcgccgagttatatatgcgtatctaatctaagtatcatcacgacgttcagctctaatctaaatcaaaccacaaagtaatcaatattgtaattttctaagtttaaggacttcttttgttttggaagcgtgtaattaattaagggccaaacatgtttttccattggctcttctttgccaccagaagcaagttgcaaaagagagtgaagcacccaaattgattaaaaagaattaaaaaaaaaaaaagggttcaaatcctttccatcgtgctgcaaattgcactttttgttggtcatccaaattgctcattaatcttcgttaaaaaatatataacatttgggtgatgattaaaaaagtagactgtagtggacccgccacacctaatcgtacccaatgataatccggtaaggttcggttccatttgtccgcattcccaaacttagaaaatgaaacggaaagaaaaacataatgtgttttagtttttatcttaaaaaactatagacaaaaactcaaaacatttttcggattgtataccaataaatagagagaatgtagttttaacctcgcaagtctcaactgatgatccgactcgtccaaagcatgtttatagatttaactagtttagctaccattcaaatttgatttttaggttaccgtccatttttataggaccaattctataagaagtggtttagatatcgggtagattttcattttccgacttcatgcatgatttagttcttaaaacttgcatgtttggcttctactaagacaaccctcgtttttctgacgactcacgtggtcaaacggtgcacaaaggtcacgtgaggcacgtgcgttctactgtttaaacgcctcttctcttttgcttcttttttgccaatttgaaagagataagaatacaaattaaaaagatgtttcttccactttcctcatcgccgttctatgctcactttctttggtcggatttccaattacattgttaactattagtggtcacataattttttcatgacgtggatcacacttctctttttacatgtctatctccttaattagtatctttaattgctttcgacatcaaaagctaatatctatgttttacactctattagttgtttaatattcacaatattcaatatcaaatctcaccgtatttggaaaatgtttattagttcagtacatgacacactcgtaatcaacattttgaattttttaaaatgttttatttgttcagtacatgacacactcgtacatttcgaattgcttactttttttgctttaacaacgtccaagtacaaaggagattctctaagactacaggatttgactttttaccagagaatctatcaggttaaaaacgatacacacacacacacacaaatttacaaaaacaactctagtctctctacttctaaaagtttaataatttgtttttaactttgaactacaaacgaactccatttattgtttcttggatcacgttaagtaacgtggcagctgaacgttgacctatg

SEQ ID NO: 5754 - DNA, 3000 bp, Unknown
  misc_feature (1)..( 3000): cDNA_ID_1829187_gDNA_ID_1620814_Annot_ID_50643 3000 nt of promoter + ATG
cagttactgtcgcgtggaattcaatgttagagaactcattagagaaaactaagttaagttcttggtatccataagagtttatatatttaccaaacatggaataaaagcagttctaaattgttccgacaaacacgtaaactgatcaaaacatatatatattttttttttttcccaacgaccaaaatatctcgtaaggatgcagtagatatgtgaggttcggaggcactaaagaatatcaatttggtttcggttcataattgatcccttgatgatcttgtagctgttattgttcttctttttattgtggctagctattgcttcttcagcctacgcccctactccatatatgtatctccccagtctgctctcatgcgatcacgaaagggtatctcttttagggaaatccaacaactggtgaataaaatgctggctctttatatctagaaaaaaaaacatcaaacaaaaagtaaaggtcgtgagactaaatatcataccctctttaacaataaataatatgggcaaaaaattgtgatgatttagggataccgtacccatcaatcagtatgctaatttaacttctatatttatgttcttttgttttttttgctttcttttctcatcaatcaaaataccacgagccagatgtatataagatattaatgccatccttaaagtttatacttacatagcgattctattctctacagcacctttaaattttgtttttatagttttgaaagtgtaagcaatgagttcgctgtatataaaatgaaaaaaaaaatctagctagtcttgaactctcagttctcattaattttatgtacgttagttaaaaagtattgatttatcaattcgtggctttttttaaaccaagtaaagaacatgtattataacgagtttctaactcagctaagtttgattatattttctccaaaaactcgaacatcaatcgggtgaagactttcccccttctatcaggaattcagaatttaatttactaaatatcatactttggaaatattattcattgatagttcatagttgataatgaatatatggatgcataaaatccttagataagaaaacaatcaacaagtctaatcgagctctttatatcaaattatcaatcaaatcatactttttagtttgtcgcacggaatctaacatgccccgcatgttagctttgtacaagaagaaatacgtaacgatgagttgcacattattagagtaaattaaattgctttagttaaaatatttggcaatgatcttctgataaagtggatagatgaaaacgcccctgatattcttttctattttttctatattaaatcttaaaattgtgcctcatttgttttggtaaaaaataaataaattatttttatatcttaaaaaaaacgatttgattccattgacctacagtattgcgtattgtatgtcgtatgataataaatctacattactcgaaaaataaatatgagaatctaagtaccatgatatgattaatggtttgtgataacattatcactatgttatcatttggattcaaacctaaataaaatacgtgaacctaactaagtattcatcaatctatttatctaacaatataatggactgtaaatttgttctacagatcaataattacatggtcatatccttaatcatagcgttttgtggccatctcttctatttctctatatattattaagctatatatgaaggtatagtatatatatttataaataactcttacgactttgacttgacatttgattctacatagacaactctaatagtatgaattgaaaccagtattttattgctcctatcaacctggagaccttggtttcccaaatatacctatgttactataaaaataatatgtgtataataatattttttacctacgtaatgatgctcacaagtcacaagtttttacaggaactagtaaaaatcaatttattatcagtggtctccagactctccactatatttttttttataaacaaactcaaaagtagtgtgatcaatcagaaattacgggtcaactttttcgataatgcccaatcccattctcacatctttggcgacttgtgatctaccaccaccccatccaccaatttttaaattattttataataataaaaagccggagaataaaacaaaaccaagtgtcttttcaaaactaaatgcctatttattgtttttttctagtcaatttgtggagaaaacctatcaaactaaaaggtgttagaaaatattgttggattaaatattataatttgtatatagtaaacattaaaaggtgattttattgacgtataataatctaaaaaccaaaaataaaggtgatatattgaatagaatttaactatttagtaggaaggaagcaacatgggcaaattgccaatttggtttataaaggagcccacatgtttaccttactattttggactttctgagttagtgtcgaaggcctttgggcccataaatggaccccacaaaaagacaggacaaaatatccttagaactcgccacgtagatatctcgacgtggagatctgaccacgtgtacagtttatgtcctgattttcgcaagagtgacgtggacgggtcatgatccgcttatattttcactttgtctacaagccaagtatattaaattgggcctcaaattagcccaatcaatatatcagtacattattaatcaaaggcccaagtctcacgctagcgatcgtcgacaacgattttgagtctttctccgaagtcgccggaatcgtattcgccgatccaattgtcgcatagaaactgtcatctccggcgagagactgatctctggtaagtcaattcgatttcgcgcgttttataacttctggtattttcgtattccgttgctgagagaaaatattgcagagattgcttaacatgaagctgatactttaaccgattcatcaaattgacaaaaatcgttttcttctttagggattgatacagaactcgtagg

SEQ ID NO: 5755 - DNA, 3000 bp, Unknown
  misc_feature (1)..( 3000): cDNA_ID_1596158_gDNA_ID_1620814_Annot_ID_169187 3000 nt of promoter + ATG
aattatttttaaatacctttctattattattcttgcgattatcattgaaatatcaaactagttaatgttcatttaagatggaagaattggccaagaagatggacaaattaatctgatgttattgatgttaaattaactaacaatttttaattttagttaaaacgagagtttaatcgccgacactaaaaaataaatattcataaacgacaaaactaaatatcataatttatcgttgcttgaaaatttaacttgcatggaataaagaacaacgaacaatattatttaagttggtagaacccgccaagatgcgtcgttaaaaaaatagttaaattgattgtcttgatgttaaactcactaaaatactaaaaagtacaaatatgtaaaaatgagttttttcattcataaaaactaacctaatatttgtcacatttaatttatatttaaataaatcatttttagcaactaatacataaatatgctaaatttatctcaaaaaatattttgtttcaagattatattgttatcttttttaaccagcgtaaatatccagcttttttgtataacgttaaaaacagtatttataacactgtttaaaatctgatcactaatcaaattcttttttagttttttttttctatatcgcgagttggaaaccttatgaaattagtagttgttgagtactactccctctttttcactatactggatgttttagagtttaattttttttcattatataagatgttttacaaattaatgtatttgattttttacgactttttagattatgtagtttttttgtgattggttgaatttttaaaaatttaatattgaattattgttttagaaaaaaaatcttaaactatctgcttttaactcaaatatcctatatattgaaaatgaggatataatatcttatgatatctcaattagcagaagggaccaaaaagaaacagcaatgaaggtgaaaaacattaggaccggattagtgtggaacatgcaaatacagaggatccacgttataaatcaccgtcgtcgcaggttaataacgtgttcattgttatttttccgtaatcttatttgcttactcatttcatttttcgaaagtcagtatatgtcacacactttgaatcatagattggtgattggtggggataaaaatatcgtgcgaatatcttacaggaattcacatgtaatcatgtggcttaataacctcagctataaacataaaacacacacacacacaatagtggatctactataaatttgcggctaaaaaatattatagattttggaaggaaattacaaagattactatacaataataacaataaaactactatttaaaacaaaaattaaaaattaagagacagatggggtttgatgcaataggagacgaacatggcgtcaatgagagggcatgtgatttataatattagtgctttgtcactttctcacgtacctttttatgccctaccaattacttctcctctactagtattttttatattaattacaacacaatcaattttagaaaaatgcaacattgatagcatatacgtatagttttctaattctgtgacaagttgatgattttcttttctcagcacaaggctatttgagaatatataaaaatatctaacgtcctcttcatatttattaacgctggaatgagattttatgtgaaaaaagaaaactttggatagatattacatatgtacgagtacgacctagaaaaatatgacaatggtctttttcttgatagagttcgtgctcccaaatcatttgagcatttccgaccacgtggctccacctcaaacggatcttatgatatgttttattatcattttattttcattcttatatattttgttgattttttccctgcataagaaataacaatcatttatttctttttgtacaagcagtcaagtagatgtcctgtaaagttagaaccagtgagttttcaactgtaactttaacatgattcatgttttaaatgaatccactttatgaaaaatatggtgttaatttagatcatacttcgtagtggttggtgggtcatcattataaaaatcaagtttttacgtattaggttcttaaattttatatatcttattcaacaattagctgattaaaaactaagtaaaacgaagatccttatcctcctgacattgttatcagaaatcttggtggattgacaggtcaaactttgttctttacagaataaatatcttataaaaaaaaacagaaatatacttcaccgtaatctcatgttttgtgaattttatattgtctcattaagaattatgtttaaacaatttagaacagtgaacaaaagaagagctaattataatcaactaaacttcaacattcattcataccataaaaggttagtgattatgggccgcaaatccatgatttgtatattgttcaattaagattggtgatcaaaacatttttcatcagttaattacatagttggcccacttttgggctttcttattgttgaggttggcattttatcattgaggccttccttaaatgattacctctgaccgagacagaggtttctagttctgcacataattaaacaaaccatataccgcagggccggctcagaataataaaggacctagagctggaaaaaaaaattagttctcatttttgtgttttgttatatatcaaaatttttggaccctaactataatagatttacttttaaaaaaaaagaaattttgggtagaccctgtgcctcagctcctccagcacatgtgtaaagccggcctgcatatacgattagtacttggagtcaaagtaacctcatggaaagacaaaactaagcttaaagacacagactttacacaagttacagattcagactactttactctaaagcaaaaagagcgacctctatcgagtctccagcctatataaacaggctcttctcttccatttcctcttatcaagtgacaaaagaaaaacaaacgtactcaaatg

SEQ ID NO: 5756 - DNA, 3000 bp, Unknown
  misc_feature (1)..( 3000): cDNA_ID_2990593_gDNA_ID_1620814_Annot_ID_169184 3000 nt of promoter + ATG
aacctatcaaactaaaaggtgttagaaaatattgttggattaaatattataatttgtatatagtaaacattaaaaggtgattttattgacgtataataatctaaaaaccaaaaataaaggtgatatattgaatagaatttaactatttagtaggaaggaagcaacatgggcaaattgccaatttggtttataaaggagcccacatgtttaccttactattttggactttctgagttagtgtcgaaggcctttgggcccataaatggaccccacaaaaagacaggacaaaatatccttagaactcgccacgtagatatctcgacgtggagatctgaccacgtgtacagtttatgtcctgattttcgcaagagtgacgtggacgggtcatgatccgcttatattttcactttgtctacaagccaagtatattaaattgggcctcaaattagcccaatcaatatatcagtacattattaatcaaaggcccaagtctcacgctagcgatcgtcgacaacgattttgagtctttctccgaagtcgccggaatcgtattcgccgatccaattgtcgcatagaaactgtcatctccggcgagagactgatctctggtaagtcaattcgatttcgcgcgttttataacttctggtattttcgtattccgttgctgagagaaaatattgcagagattgcttaacatgaagctgatactttaaccgattcatcaaattgacaaaaatcgttttcttctttagggattgatacagaactcgtaggatgatcgatttacgctataaagaatgctacttgctcatctgtcttatcgtcttcataaattttgtgacttgttatagcgatgagagactgtaagtgttgttgaaaaacctcacattatccccaaactcatcaatttggattcttttattggtactgtagaaatgatgttatcaggtttctcttaggtttggtggaaaaactttatatgctgggaaggaactttggaaagagacactgccattgaaatctggatctcgagtttacaaattacaagggcttaagtcgaactcttggtatgaagtcaagatatcatacccagcttctgtatgtcaaatttgttatcttgttctatgttcttatgtttccaaggttcttgtgcttgttaaaaatctcatccttttttgttatgataacagataccggctctattttcgctgcaattactgaagaacggtgtaatgggtttgaaggttaaccatatgaggagattactaaacactgagaagttgatcttcaaaacagaaagtattgaagaagttgataacaaggtattgccatcttcttcagttagttcctaaaacttagaaagaagaacgaatacaagtttaggagtttgtttctgatttaggagggattgtatgttttggtgacggtggaacctgaaggaatcgtggctataccaaatgttaaagaaagaccgtccatcatttacaacataggcaagcttttttttctacttactatctcatcaatcttcttcttttcacaacataagaacttgtattaagtgtagtgcttcttctagagtctgaaaactctcatgttgacagtttgtgaagaacagctcttaggcatccctcactcaagctggtcagtggtggttttagtagttttgtgtctcgttgtcgcgttgattcttccccggttcctcccatcttatcttctgatcaaagatgtagatcgtgatcgttaagaagaagcatggttaatacagtttcctcacctctttgttttgttactctgttcgcattttgatgtttgttcatctaattttgtatggtttttagttcttacatgtccactgcctcattcatataccttaccttaccacaccgcactcaaagaagagtatataagtctacatgtgttagattgatttcatgtttttcagacgcgggaagtcctattctgaacttgtatggtttgatcgtatatagttaagtaacgcttatccgtttgaatttcaatccaacaaacaacattccacaagatgaataactctaaagtacaccgtattatcttttgggaatagggagtaattaattaaaagcaaagaggttacacatatttttaataaataaatgaatttttttttgttcatataatgtatgaaataaccgttaatttcccggcagtaatccgctaaaataactccaaccaactgtgataataaaagaaccaaactaggattcggacaaaaccacaatttgtgttctaattaattacagcgttaatcataattactagatgatttcgagtgggacccagggtgaagaacaactccttttgttttctctctctctcgaagaatttatgaatcataatcacgcatcatcgtcttcgtcatcaccaacttcttcaccatcatcatgaatgttaaaacttccataaacaaatccttccttgtccccttgtatttttctatctaaatccctaaaaccactcaaaatcatccctctttctctcctccccattttccccaacgcttgattcgaattcgtctctctcgttttctgttgttctaccaattgagcaaccctagaatcattcttgtgtacctaccggaaccgagtcttctcttcttccgtggcacatctttcaaagttttaaaccccttttcccctaacttcttttcatttttctgtttttttcccgggaaattttctctctctctctctattttttgtttctctcgtcatgatcattacttgtcaagtatgatcctttattaggtttctttggggccgatctcactttttctgtttctcaccctcttctcttcgaaggcccttgtaaaccctagaatctcctcttttcaaatttatatgttctgtttcttcatcttcaggtttaatcattcaatctatctctagggtttaccgggtcaagtcttaggatctgtctctatccatacttcatcaaagtttccgtctttggttctaatcc

SEQ ID NO: 5757 - DNA, 3000 bp, Unknown; identical to SEQ ID NO: 5754
  misc_feature (1)..( 3000): cDNA_ID_2168580_gDNA_ID_1620814_Annot_ID_169183 3000 nt of promoter + ATG

SEQ ID NO: 5758 - DNA, 3000 bp, Unknown; identical to SEQ ID NO: 5752
  misc_feature (1)..( 3000): cDNA_ID_2168576_gDNA_ID_1620814_Annot_ID_169181 3000 nt of promoter + ATG

SEQ ID NO: 5759 - DNA, 3000 bp, Unknown; identical to SEQ ID NO: 5750
  misc_feature (1)..( 3000): cDNA_ID_1829207_gDNA_ID_1620814_Annot_ID_169176 3000 nt of promoter + ATG

SEQ ID NO: 5760 - DNA, 3000 bp, Unknown; identical to SEQ ID NO: 5749
  misc_feature (1)..( 3000): cDNA_ID_1829211_gDNA_ID_1620814_Annot_ID_169175 3000 nt of promoter + ATG

SEQ ID NO: 5761 - DNA, 3000 bp, Unknown; identical to SEQ ID NO: 5748
  misc_feature (1)..( 3000): cDNA_ID_2168563_gDNA_ID_1620814_Annot_ID_169173 3000 nt of promoter + ATG

SEQ ID NO: 5762 - DNA, 3000 bp, Unknown; identical to SEQ ID NO: 5747
  misc_feature (1)..( 3000): cDNA_ID_1829219_gDNA_ID_1620814_Annot_ID_169172 3000 nt of promoter + ATG

SEQ ID NO: 5763 - DNA, 3000 bp, Unknown; identical to SEQ ID NO: 5756
  misc_feature (1)..( 3000): cDNA_ID_1829184_gDNA_ID_1620814_Annot_ID_50644 3000 nt of promoter + ATG

SEQ ID NO: 5764 - DNA, 3000 bp, Unknown
  misc_feature (1)..( 3000): cDNA_ID_1829176_gDNA_ID_1620814_Annot_ID_50646 3000 nt of promoter + ATG
atgttcccattttcctacaacttcctctcgtttaaaagaataagctttatcaatgagaataagacatacaaaacatttgggccttatactttttaaaaggcccaaaagtgcttcaacaagacggcacgtggtgagccaggtgacaagtgatacctccaaatgcggttatttgcgggacccacgtggtagccacgtgtagcaagcaaaggacccccatcctcttttgcatttttctccttacaccaaacatttctttctcgcagagaaatctctcttctcttcacctccatcatcctcctcaacccaaaaacatcacgacgaaattaaaaaaggtaaaatctgccactgagaattttctgtcatgcttaagcttcgaatttcttctcgttttttctccatgaatgttgcttgaattttcacaatcgctggacttgtaaggttgaaattgcataatccctatttatcttctgtggtgggaacaatgtgggatcgatttttgctgtaaaaagtacaaactggttcgtattcaagcgtagtaacctttagatttaaggaaaattgttgactttgagctaactagtgaaaaattgttggattgcgatattttctgggtaaaaattggttttttttttttttttgtattgtgaagagtatatatgaagcagagttactaatctttctcaaaatatcaacatagtcttttcaaatgtagattttgctgttaataagtgaagtttttagggtttaatttgaagatgttttctccttagtaatgataaggcaaaacattatggagactaaagtcattgttagaaaagggttaaacttaagagatctagggactaaaatgatggagattttcaatgctatgactaaattggcaaatttgagacacttaattatgtcctgtaactatgtttttggaatgtccttattgcttccatttgtgacaatgttgccactttcatatgtaatgcaggttcattgatatcgaagatatgagtctgtatagcgacggattatcgagtgatcagtatttcttggttaatttcatcatgagcaactacttgggtcctgatgtctattctgataacccaagatgttcatcttctcaaagattagctagaggtttgccaccttacactttgatgcacattggatcttcctctctaactgtttcccagctacagaacttgtactataatgtactcagaaacgccaagtccagcctccttcttcatccagacatgatttatatgtatctcaagggatatctaccattggaaccaagtggaaagtttcctcagttcacgcattttttcccgacgaatcttcacccgcagaaaaggtattccccgagccacgagattgtgaaaggaattgttgttattgatgatcctgcagtagggttcataaacaaggaagaactccaaaggttcagatgcttgtcgcgtttggacgacctgaaaatcgatagagtcacgtctttatctcctcgggttaatctggatgaaagccgggaaactgagcaggactgttcaagaaatggtgatgcgacagctaatggagttgtcactaacgaggactacaattcatctggtgagcttcaagaaacgtgcaagagaaaggaaggggaagacgcggttgctagttgcgtaatcagtgaaccagaaagactttcgggagacataccagaaagccagggaatgaagcaggactgttcaagaaacggagaatctgcattcagtggaattgtctctgaccaagactactattcatttgtaaagcttccagaaacatgcaagcgaaagaacaaggaagaagaagcagttactggtcatgctgttagtggaacgagtaaaacccctgaaagatttcgtgagacatacaagagaagacggttcaagaactcatcaaaaaaggcaacaaacaagaatggtgaaactcttatggaaagagaaaaaacagataagcctatacctttttcttcggagatgaaggaaagcgatgcagaaccgtcggttgtaactactggaacagccagtaaagaaactctaggatcatctgttggtgttgttgacattggtgtcaacaaggttgcttacttttttcaggttgctttgcccggtgtccgcaaagattacggtattattacactttgttgcacatctaactacttccatacacgccacatcgggtctaagtgctaacacatgaattggtttggtccttttgtgtgcaggtgaattcagctgtgagattgaatcagatggaaaggttatactggagggatcaactacaagaggcgaaaaaaatatcaagagacattctcgggtgttcgagatgaatatccggaagctgtgtccgcctggaccattcaagctgtgctttaacctcccgggaccagttgatccgcggctattctctcctaacttccgatcagatggtatcttcgagggagtcatcatccgacacaaaaactcttaattaaaccggaggttcctatacaagtttagaacttaggatctatgtagatcttttatctttatgttactggacatagaaggaaagcgaatcaaacagcatgcaaggataaatcttttacttttaggacgtgactctgtagattttgcatgattttgctaaatatccgttttcacaatgatttcatcaaactgagaatccgttaatattgtttctgtgttggcagtgttgctgttacttgttagtagttactgttctcatttctcaataagtgatcaaaccgaaactaaaacagtactgaaccgacggtttaatttggctagaaaaattcaaacaattatgatgttgtgccttaatgtgacaacatagataaaaagaagctcttacaaacaaactgactaagtcttcctcggagtcaaaatcataagcatattccatgctcataccaataaagtaatgaaaatgacaaagagacttattaatcgttataaagatccttgttctgtttcactcatc

SEQ ID NO: 5765 - DNA, 3000 bp, Unknown; identical to SEQ ID NO: 5755
  misc_feature (1)..( 3000): cDNA_ID_1596158_gDNA_ID_1620814_Annot_ID_50647 3000 nt of promoter + ATG

SEQ ID NO: 5766 - DNA, 3000 bp, Unknown
  misc_feature (1)..( 3000): cDNA_ID_1829172_gDNA_ID_1620814_Annot_ID_50648 3000 nt of promoter + ATG
ggtacgtgagaaagtgacaaagcactaatattataaatcacatgccctctcattgacgccatgttcgtctcctattgcatcaaaccccatctgtctcttaatttttaatttttgttttaaatagtagttttattgttattattgtatagtaatctttgtaatttccttccaaaatctataatattttttagccgcaaatttatagtagatccactattgtgtgtgtgtgtgttttatgtttatagctgaggttattaagccacatgattacatgtgaattcctgtaagatattcgcacgatatttttatccccaccaatcaccaatctatgattcaaagtgtgtgacatatactgactttcgaaaaatgaaatgagtaagcaaataagattacggaaaaataacaatgaacacgttattaacctgcgacgacggtgatttataacgtggatcctctgtatttgcatgttccacactaatccggtcctaatgtttttcaccttcattgctgtttctttttggtcccttctgctaattgagatatcataagatattatatcctcattttcaatatataggatatttgagttaaaagcagatagtttaagattttttttctaaaacaataattcaatattaaatttttaaaaattcaaccaatcacaaaaaaactacataatctaaaaagtcgtaaaaaatcaaatacattaatttgtaaaacatcttatataatgaaaaaaaattaaactctaaaacatccagtatagtgaaaaagagggagtagtactcaacaactactaatttcataaggtttccaactcgcgatatagaaaaaaaaaactaaaaaagaatttgattagtgatcagattttaaacagtgttataaatactgtttttaacgttatacaaaaaagctggatatttacgctggttaaaaaagataacaatataatcttgaaacaaaatattttttgagataaatttagcatatttatgtattagttgctaaaaatgatttatttaaatataaattaaatgtgacaaatattaggttagtttttatgaatgaaaaaactcatttttacatatttgtactttttagtattttagtgagtttaacatcaagacaatcaatttaactatttttttaacgacgcatcttggcgggttctaccaacttaaataatattgttcgttgttctttattccatgcaagttaaattttcaagcaacgataaattatgatatttagttttgtcgtttatgaatatttattttttagtgtcggcgattaaactctcgttttaactaaaattaaaaattgttagttaatttaacatcaataacatcagattaatttgtccatcttcttggccaattcttccatcttaaatgaacattaactagtttgatatttcaatgataatcgcaagaataataatagaaaggtatttaaaaataatttcttagtatttggggagtaaaacataaatactattttttttttgtcaacacattaatactagtattaaatttgccaaattttatgacacatattggagtgttcttccattttaaatgattttttgttctctcacgtaaattgtttattaaagaaaccacaaaatatgatatcgattcttcattttctggttttaactattgcaccctcatttttaagtaaaagaaattgctaatataacttttttttttggtaatagtttagtttataaagaaaatctaccctttcaattatctatcaatgttgctttttaatcaatttttggaaggtgtatctctgcaaaatataaataaactttgtttttctagtaaatttagagaaaacaatgactaaaaaggtccaacttttacacgaaagtgatagacatccggaccactcttaactcttaatataaatttgaaaaatctgactttcatattattttttatctaaacgaaaaaaccaaaatgttagtcgtaatccatgttgcaatgaacggaccccataaataattatcctcccaaaaatctactcataaacgagtcatgacaatgattttttaattaatattcagatattgtttcctcagatctctaatttttccccagatacttccatccgaaaaaaattgataaaataaaaaagctagattttattaatttattttaactagtcaattttttttcttttatgagtttctaactttctatataaagtttcgaaaacattaccaataatcgtcgtaaatcactccccacctcattcatatttttagccgccagaagaactgattggtgtaaaatccaattttcttgctgttgtgagttttcacttctccgaggtaaaaaaactaatcccggcggtgagaatctcttgggaacttgctctgaacgaaactttttgttgcaataattgtaaccaaaaaataaagaagacaaaatctttttgtccttattgtagattccatcgccggagcctgtccgaaaataaaatttaactaaacttggcaaaattcattcaaaacgagtccaaatcaaatcaacccctatttcaacgcctctttttctccctgatttatatatcggagagatttcaaggcaaagctttctcatttcctcgtaattgccggcgaattctactaaaggtgagacctttttcattttcccagaaagtgaagcaatctttttggggttttattctctttagctttcttaactgatcaaactaaaaaagcaattctgttttttctttcttccctcctataggttagttactctgcatttttgattactgtttgatgatttttatgtttagggtttttaattgagcaaattcttctgggtttatcagattttatatttttgtgaattggttaagatttagatctggatttagatttttctttgtttcatggttgactgaaagtttgaaacttcaaatggagaatcactgaatctgactgatttgaattttggtggtgtttctagagtttgttgagca

SEQ ID NO: 5767 - DNA, 2702 bp, Unknown
  misc_feature (1)..( 2702): cDNA_ID_2053825_gDNA_ID_1620816_Annot_ID_169250 3000 nt of promoter + ATG
gaattcattgagatttgggagggaactactagagactggcgtacagagaagtattggtgacggacaaaaaacagccttaaagagaaccttggttacctacaacaccaccgagagcacctaaactactatatttgatagacccgaatactaaggtggctgaactcctcacaggacctccacaacaatgggatgatcaataggtacatcaatacattgattcgtcggaccattatcccattcacaaaattttcattccttatgatctcaaagatgactcatatatctggaattacatgaaagatggtaatttcaccgtcaaatcttgattggagggctcttaacctcagtcttgaagaagacacatcacaagctctgcttacagttaacacagatatcccccaaaaatatggcgtctccaaattgttcaaaaacttaagcatttcttgtggagattttttcatccaaagcaattgggatctctgaaaatttaagacgacgaaacattaatgtcaacccatattgtccacgatgctgcaatgaggtagaaacaaataatcatgcaatgttcacatgtccacaggtgaaacaaatatggagagcttcaggaattcccacacatgtactttgagcccagacgagacaatgaagaataaagtccgctatttattaacgttgcatgaggatacaaaggttgagacaaccggacgacttttaccattttggctaatgtggcgtatttggaagagccgaaatgatttagtcttcaacaaaagagcaaaggatacaactgatatagtcaaacaagcgtccctcgacacaaaggaatggctagataacatgcgacccccagaaagaaatacccgagaccaactatcatctacatcgagaaaggctaattggcaaaagcctccagtaggatgggtcaagtgtaactacgatgtctctcactatgaaggaaagataaccgcgggtcttggctggatcatcaggaattcacacggcacatgtatggactgcggaatggggaaatttcaaggacgccaaacaattgaagaaggagaatgtactgcactcatttgggctatacaatgcgcatagggacttggttataggaaggtaatattcgagggtgacagcgtcactgttactagtatcatcaatagcatagagcccaatccaagattacgacattatcttgatttcatacatcaatggcgtaaagcttttaacttcatcgagttcaaattccgacatcaagaaaacaacgtctatgctgatgtcttggtcaagacagctaccaagagtaatacaaactttgagttatatcgaatatgtcctaggtttttatagccgtttgtatacaatgatgtaaaacatttgcattgataataatattggaaggaaaaagaaaaaaatctaaacgaaataaaaaatattaattctatatttctaagtaaactcttattcattatgtttaatattttgttactacatttatactctaaaacttcaaaaagtatttaagttaattatcttatgcttttgctgataaaacaaaaagtaagaaaataattctataggattttgtttactcacaagtgtaaaataattctttatgttttgtagtcaattttaacaaactttaattacaatgaagtaactaacgtcattacatacacatcttgtacaaaaaagaaatatcaaatcatctctctcttaactttattggatgaaagttcacatcaacaaaacaaacaataattattaataatttgtatgtagtaaaatcttataaatacaaaactgtaaagcaaactaaaaattatggaagtaagaacatatcaattattatgtcatgttaaaaccgattgcaccattttattgtatctatgaacatcatctattagttttttttagctggcaaacaagatcctaatttttgtataaaactttagcaataatgcattacaaaaaccttctgattgtcataaaagattaaattaagaaataagaatgaagactagagagaataaaactcgaaacaagagttttcttattgctttctctttctcttctctttttctctgttttctctatatcttataaatgaatgaaatgagttatatatagtagagcttacttagctaggaagtaaattacttagagaatagtaatggataaacatcatccatatcttaaagatgaagtaatggataaacatcatccatattttaagaaggaaataatggataaacatcatctatatcttaaggaagaaataatggataaacatcatccatatcttatggatagagatgaatgatggataatgacatccatacttatccggtttataacactgatcaaaataataccattattctacgttctctaatcgtgaatcctcataattgagatatacagttttattttttctgaagacaataatctacacttaatatacttgaataaaaaatttatttgtcttaccataaaaagaaagagtaaaatattgattttgatctcaacaaaatcatataaccgaagccgaaggatgtgaaacaaatgggcttctagtttgggcccaaatagcctaaagcgaagataaagcccataaaaacctaaaatgtaagcgagcttgcttgttgctcctataaattcataaaccctaacttcgttttcctctcgcagacgcagccatg

SEQ ID NO: 5768 - DNA, 3000 bp, Unknown
  misc_feature (1)..( 3000): cDNA_ID_2053800_gDNA_ID_1620816_Annot_ID_169260 3000 nt of promoter + ATG
ccaagcaaaggttttctctattaaagacgaaggttgtatcacaggtttcttagatggattaacacgattgacaacattaaagatatctttcaccaggattattagatgaatttgaacaagcctatttatcaatgtcaaaacaatgcaagaatggagtccacgaccattcttctcagcagagttaggtgacttaaataagcatttaattactatatgttagtttcttaatcatgatcaactaattcgggttcaaagacggaaacgtattgcgtatcaaaaagcccatgcaccatagcgtcatagcgacatagatatatataatcttcgttcactaggcgagtcaacattatacactacaagagtttgccatttctcggaggtaccaagtggcgaacagctcctgatgaaggagacctatcacctatgtgtagctgctagcgttgaatgacacgcagttatctataccagatttgctgattgtctcctagcagtaatcgtcgaagatgagtgatgaccaagcaacaagatgcacgttgtacttccaaatggagtgtcttgtgatgatgaccagaagagatcatattcatatcacatgttcatggatctactccgtttctgtagtttttaaatgttaaaattcaaccgagcactaatatattttgaactatttatgactaaaataacaaagtctcttgcccaaggtgtgtgtgccattgttgaggatttatcaattaacttattatcattaaaaatagaaattaagactaatgttctgttaatgtttttgttgcatcacaagttcaccacttaattcaaatccgcatattcatgttttagaagaaataaatagttatatatatctttagttatatttgataaaatgtattgataaaataattgtttgtgaattgcgaaaaaatgatggaagttttttcctccactttctgactaaaattttaaataatgtttcgattccagagataagttaaattctcagaatttttcgacatggtgtagattgatcatagtagtctcatgttctaaaaataaaagatatccattttggtgaactttagtcgcgtgtttgaaattagagccggtcatctgagtctaaaggctaaaataattaattttataaaattagaaacgacttgtagaagaaaaaatcgaacttggtacttagacaccaatttgaaagaccacttttactcactataacaactttttgtcaattccataattgtttgtaccgaagtcgtaacaacgaataagtaaagaattttcggggagacgaaatatcttttcttagctgacgaacgagaacggtaaacaacagaccgatcgaatagttacaagtaatttctatcgatcggcaacgtaacatgactcgaattgagaacaaaacgaaccgtcaactgaaacgaaccgagaacaaaaacaaaccgagaacaaaacgaactgagaacaataacaaaccgagaacaaaaacgaactgaatgacaatgcgttttagtccaaatataactctgattctctgagtatcatcttgtgtgccactatttcggaaatagtgctttatttataggacaagctttctgactttcttcggcaaattaccgttttgcccttcaggtttagtggactgatttggtggagaaattgctcattaaactcttaaatattagtttgggccaaataatatggagagggtgaagcccatgtccaacaataagccccccctagttcatcagacgagaattttgttgagtctggtgagcgtgtttcttgagtcggaatatgtcgatttggtcttaaacagagattacgccgtaaatatatttttttgaattttatgccttgtgcacgtttttctaggagcacggaactctgatgatttatgtcgtggatacgctttctccagagtgcataatttttttcggtggacaatatcccaagaatttttactgtagataatttcttcactatatatatctcatccttttcacttctcaccatttcaccaaaaggtaaatcatctttttctctcttctttatctctttctttccttcttgcgattggttgtggttcgtttcctccttagttcggcgaagcttgattcaaactgtggttcagcttgaatttcggatttggtgtgatttgttgagacattgatttgatgaggctggtttggcaaagcgttggtttgcagcggctggttcgttgagatggagactttgatttggaggttcaattgccgttcggtttgaagaggaggagcttcgttcggtttacagcggcttggttcggtgaaatccttgttcagcgaggagaagaagcgtgcggatcggttcggcgagagggagaagcttgaatcggtgaggagcttgcttggtgatctttagttcgggcctaaggtcttggtttggcgagaaggagaagtttgcggttcgatcggggagcttgtatcggctagttcggtgagaagaggagaaagagctggttcggttcggcgagaagggggaacttgaattggcggcaaaatttgacaatctatttggactctcttggttcggtgataagaggaggagtaagcctggttaagaggaggaggaggaagcttggttcggtgagaagtgagaagaaggaaccggtttggtgagaagaggaagaaacctaccggttcagccaaagaagaaggaaaccggttcggtgagaggaagagatttgcggttcggtttggtaggacaaccggtctggtttgggacgatggaccgtagttggtttgatttgaatggttatggaactaaccaagatgcttatcacgtgataaatgacggtttgtcgattgaagattttgaagggcgtgatttagctggttttctggcgaagttgatgatgggaatttgggagacattgaggcttttttaaatgtaaatcatgcggttataagtcatggtatcgtaaagactatgagtcagcttgaagattaccgtagagaa

SEQ ID NO: 5769 - DNA, 3000 bp, Unknown
  misc_feature (1)..( 3000): cDNA_ID_3078389_gDNA_ID_1620816_Annot_ID_169266 3000 nt of promoter + ATG
ccttttgcctatctgaaataagagtaaaaccatctccatcttgcagttttaaatcacttttcagcttcttaataaaccacaaccaagaatctatgttttcagtttccacgactgcccacgcaaccggatagaattggttgttggcatttcttcctacagctgctaagagttgtcctttcatattattttttaaaaaacatccatctatgccaattattgggcgacaatacgcaagccaagttttccggagagcatcaaagcacacatagaatttatcaaacttgactataccatctatagtgattatctcaacttccactgttgaaccaagatttgttctacaacaacaaatttcaaagttagataagcttgtaaacaaaaacaagaatcaaattcaaaatcgatttaaagatattttacttactccaaaagttgttccttgtaatcatgtattctagcaaactgctcatcatattcatcttgaatcattttcaatgcttttcctctagctttctgacactggttactggaggcaattagtgagtaccgctcttcaatagctttttgcattgctttcactttgaatgttggatcttgcctaatgtcattcaagaacatatctgcgatgatccgactcttaagaactttgcaaaacccgtcctttgtacatgcatgctcatcaatgaatgttttcaccatgtacactccaattttttcatcataagcacaataaattctgaatttgcagttacctccaatagaacaccttacttcagatttctctgatccccatcttgtgaacttaatattgactccttccttaagagcatagtcaatcacagcttccttaaactcagctatactgtcaaagacttgctctattctaatatcgccactacctttcttgcatctaacatatcgtctttcaccttcctcacaatctgagttcagaggggtactttcatcattatcatgctcttcttcatcaacaaagcctgctaagttctgctcaactcttgcttccatgtcaataaaaactctatcacactcagaaccatccccaacagctccatcaccagcagctccatcaccaatagaaccatcaccaacagctctatccacatgagaaccatcaccaacaactctatcaacatgagaaccatctccaacatcaccattttcttctttctccaaaaaaatatcgacagcttttgtccaaactgcggcaagacacattctttgaaagttttgatctccattgcacaattgcttaagctctgaatattcctcatatggaagcttataccaaattcgtttatgccaaatagattcgttcaatgactccatcaaattagtcaatactgcttgtggtttgctttcaaggctgagaatacctcctccaacataactaactttaatcccattctctacaacaaagttcccaccgtagtagcattgaaaaactgcatcttcagtgctgaataagaaagaaataaagtgagtttttggttgtgacattttatcgaacacttggtgttcataaaattacatatcgcttatcaactaaaaaaactccacaatctcatctaaactatagaaataccaaaggaattcattacattttataacaatacactcgcaatttgatgatttgataaaaaaaaaacctaaattttataaaccataaatttgaatgaaaattacctcattttccttcctcacaatagagattatgagctggaactcctattccactaatataagctcttcacgatagatgcttatggaacattgtcgtcgtgaaagaaaaagaaagaaaaaagaagaaggtgatttaagacgtcaaaaacgacgtcgttttacaaaaatttgtttgtctcttctttcatctaaaacgacgtcgtgtcatacgtggcctccacgtgagcaaccgttaacggtcttataacaccgtcacggcttaggcatgtattgacatgaatggtgtgagtttgggatttgaatttgaaaatttggtttgttaatgtatggatttgcacaacaataaacgttgggtatgaattgaacatactactttagctggggtatgaaatgaccgtttttcctagtatcaacaccatataaactctaaaagtctctcatgtgctgacacatcagctttttcaagtattctcagcttgacacctctgcaaaatcaacaaccaattagaacatttcatttaatacagatcatttgtgttgaccaattaaatcttagtatttgtaaatgtcattctattattaaaactaaattaaaattagcccagtccaaattcttttaaaagtaaactttctatgttacaacaaattttacattagcccagcccaagttgtttaaaaactatttttcctatgttattaactacatgggcctatactttctaaaacatgatatttagagaatctaaaagaagaaaagcaaaaacaaaataggacacctacaacacgtatcgtagatagagcgttaggttggttcaaagctctctcaacaacagccaagcccgcggccacacgtatcgtagatgacgttaggttggttcataaagggtaagttactaacacaatgttactttggtatggaataaacaaaagtgattgtacctaaggttgtaaaaccagggtcaatccttgcacgggtcaagagggtcttgacgacttcatctcagctcatgtacagctgaagacacatctttctatcaaattttggacctgcatcaatcatttagaaaatgttttcttaacaaataattgaaaacttacaagaaagtctatacacacaaaaaaagaatagttcatcatcattcctcttaactctattaaacgaggttttaacgcgccctcaattgtttctctcgtgcgattccgaaagcgaaaatctaggtcaccccattttcttcttccgccgctgctcctagtctcgttcccttggttggtccctcgccgactggtgggtctcccccg

SEQ ID NO: 5770 - DNA, 3000 bp, Unknown
  misc_feature (1)..( 3000): cDNA_ID_3593709_gDNA_ID_1620816_Annot_ID_169277 3000 nt of promoter + ATG
acgggttttattttgtaattgggttatatggtggatgtatttgaatcaatatttataaaattttaaaatattattaatatgctgttttaacaggggttaaaacttcagttttttaacaattgtctcatggattcgtggtataacgttacttaataacaattataaactgtaaaatataaatattttataaaaataaaatttgcaaattttaatatatattactttcaaaaaataaatcgtcccgcggtataccgcggattaaaatctagttcgttttattcttataacatagggaaatgtaaacattagcatataatttattgctgctaacaagcgaagcatgtttttgtagtttttttttttttgaatgaaacaatcttttgtagtttacaggtacccctttgcttgtaacttctagcaatttttctttctttattgtctgagttttgaaaattattaattagtgcagtgccttctactagactttactaaaagttaagagagcattattgtcaagtcatttctatcgatttcatgctttttctacccatcttatttggtcggtaaacaaaatgcgtagccaaaataatctgtttgattaaaatctcttatatgtttttatcctaatataaattcattgtatccgatacttgatacaaaatctgttatgtaaaacttcatttaacatatagtcaagcaaaagcaataaacgataacgcttgttactctttgtgatactttcatacattttttgtaatgctattttcttggtgatattaatatattataactagtttcattactttgtttttatttttgtgattgataacctactaatggcaaaccttttaagacaaagccaagaactctaattggtgagagaaagctctctaagtctaaaagtaatagtaaacaaatggtaacttacaaaattaactttactcaaactgacatatgcataaataaagtgaaagttataaattttaaatttacctaattttaaagtgttgatattgacctaatttttgttcagttagaaagatagttgataatattttaatcatatacgtatgtaatacatcaactatgttcacgttcacgtacgtatttaaatattcactttcataacaatacttgaatattttactctaaattggtttcgttgacatgcgggaatatagttatcacgataatcatatgacgcaattccatttaaaagtattaatatatttcataacaatgttaaataaataatcaatgataacatcatatatgtatgattggattccccaactatggaatatgattttctttacttgcttgcctaattttaatatcttttaacaactctcggttacctaattttgtaccaattattatgatttatgttaatagttaaccacaagaaaattttgtcttctgatttgcgaaattagttaactttgacttctgatttgcgaaaaaatatcagaaatatataagtgaagaattaaacaaatttgattagtattctcgaagaattgtaatatttactgaatgttttggatctgtttcatttgacccttgatgtaacgattgggacatagtcagccatctcataacccatttcatcatgtacccaattttattaaatatttttttctgacaataatctatcgtttatgatcaaatcttaacatcatttaaaactatttaagttctttaaattgttatggtcaatcgagaagatatatttgtctaattatatcaaatatatcatgtagctgtcgttctttagtataatcccaaacaatattgttctaaatcaaacaattttatttttcaataatttattcaaagaacctacattttaaaaacatacataaaatcaacaaaatatcgtggagaaatgtaataattgaaatttaatgattttatatcaaccacaaaagaccaaacccaacaaagacgatgtcgtgctacttctttgtcctttctcctgccacaagataaaaaatgaacagagacaaacaacgtaccagaaaaaaaagtttaactattcttaaaaatagtttcaactccaatccttaattgttccattaaatggattctgatatttttctctcgtcgctccattagctacttctccggtggatactttagccagcttttctcgagcgtttatccttacgtgccatttcaaaggtctaaatctttctctctctttatacatgtaagaagaatatgattggtctgtgacaagatctaaatgaaagctgaagagaaacctttcttgggttctgtcttttttcctttctacttctgaatccaagtaaaccaaggtttttagttcttgatataaaaagtaaaaaaaaaattgtgtaaaattggtcgtcactttttcacttcgggtgatatgaagatttttgctcctttgtctcaaatttagaaatttttatcttatcaaacttatttttgaagcaaatctatggagattaagagtgtttgcttcttttagccttttaggtgttcatattaatatatagtattaagcaacaacatgctgagaaagttctcattttttttgtttcttgttagttttccctgaaaaagcaaaagagaagaatcttggaatcttgcaacttgttttacatttccttattaagaaatatctctagatgtgttttctttaaacagaaactctctttcccttcaagtcaaaatcatgtacatcaaagataaatcttagaagcttgtttcaatggaattccatgtcagacttatgaatattccacttgaagttcaatttttgttgttgtttttcaaagtgtctagattctcaacactatgactcatcttcttacttttaagatttaacctctgttttatgatctccttgtagcactatcaaagtttctaaagaagttttggtttcttgttttttaaggatcatctgaagcttaaggagaaagtttctcgttgttgcttgatatattaatcttttggggtatttaaaagatg

SEQ ID NO: 5771 - DNA, 3000 bp, Unknown
  misc_feature (1)..( 3000): cDNA_ID_2033485_gDNA_ID_1620816_Annot_ID_169271 3000 nt of promoter + ATG
ctatggatacactatatgatttttaaaacttaaatacgcattccctcggaccagtctatatgttacatatggctctttttatgctgtccctaagagactcaactcgcaaaacatttcaagatgttttctaaaataaagtttatgtcattcgtttctaagaaaaaaaaagcaatttttcgttctttatgcacatacattaattgttgaacacatacatgaacttgagataatcaaatattttttcaaggatacattaacatatctttttagtctttttagcaacctgaacgtatcaatgaaaataaaaccatatattagaagtatttttggaatctctcaagatttttggtgaaaataaaacatatcaattgtttataacttttcatactccttttttttgttactatattaaaacatgaaaggctattcaaatcaacgaaatttaaagtgtagttgattgaaacgcaaccttttaaggttggagtggttgaaacattaacttacatgaacgtaaaatcgaatattgacctgaggctgaaaatcgaataagagacaggaaagtgccaactaatcgcatattaatttcccagatatcatccgttcaatcattatttaaatattttagtgataaactagatattgaaaaagtctcaaccagtcaccttttcatgagtgacattataaaccaagatatatattgagcatcgtataaatggccagcctatattacctgtacaaaaattataaatataagacaactatataaaagttaaagatatatattaaacgtacggactatcttattcttgagattaagtgtgtattgacaggtggtggaacaaatatgagttttaattagtttctctaattaatatataaactcatatttagttctatctcctgttgaagcacacattaatttaaataagattttcaatagtagactagcagccacatagatatatatgtatataatacaaataaagttacaggcgtcttaataaaatttgaaggataatgaatttattttttaggataaatacaaacttagtagtcattagcaacatatgtgactaatgaataaacttaaagatcagtccacaaatttattttatcagtaataaataacaaatgagaagcgatttatactgatatgtaaagattttgtgcaaaatgaaacttaaaaatcgtctattaaagtttaaaaaatgtaaatcaatcctatgaaattcaaaataataagcaatatatcatatttttataattttatatatattgtaaccattttcacgatcatatatatttgtttttaagatattgttgaactcttcatcttaaggggttcaatttgatatattatctatcaaaaatttaaaatttgataatagtaaaataaaagtatattacgtattattttaaacttcataagattattttatattttttgaggtgaaaaataaaaattgccagacaaatttaagagttttttcaataattatgctaacgtattacgaaaaagaagtatatctacattttaaattttcaacaatccagatagaagtttggttacgtatgcatgtctgtctaaagaaaatgtcaaacttctgacgatccgatccgtacacgaagtacataaatttgagtatgtaaatatttaagttttaaaactgagaaaagtattaattacttttgttagaacttatcaataataggtgcatgcaataaatagtaaatataaaactttctaaccttatcttaatacttcaacgaaacatcccaacgtgaaagcatggtctatgctgttacttgtgacgttgcaaatgcaaactttccaacaaaattttcagattaaatttaaaatatttattaattattgtttacgtaattttaccttttatatatgaaaaatacaaaatctttatataaaatccaatataaaatataatataagtatataactcatttttataattttatatacgttttcaccattatatatatttatttttaaaaattttaaaaatataactaaattttttatctcgaaaattttgatttgatatattatttattaaaattttataataataataataaaaaaagattatattatatattattttaaattataaaattattttgtactttttagacgtacatatatatatataaaattataaaaataaacgtctttgaggttttttttttcacaaaacttttttagataactgtttacacgacatcgtttttaaaatagcaatttgtgatctgccacgacgatgtcgcgtactatccacgtcagacaaacgaatatgatttcttcaatatatttattttttaatatatgcttttttggacaaactaatattttcgatttttatcatatagttttgggtcaaacagataggtacggtcgatgcacgttacgtgggtcccgcaagtggtgcagacctaacttcggtacagttatgtaataatcacctgctccaaatcctctgctcctaacaataaagcctccataactaaccactaatatatatccacgtggataattaaccacgcgtaaagatctcaaactccaaaaaccaaacacattgtttccgtactagtaagattaggggtgttttcgtcatttcgtgttattcctgtcacgcttctttcttcttcttcgtcttcctcatttttttcttctcctttatatatcagaaaaaataaaaatttagagagaggttcggttttgttttttcccaccggaaagtctccgactaatcggcgtgatgaacccgaaactgcaaaccgttaacccaattcggatcttagaaaaaccggttcaccactctctactctatctccgagctgtgtttctctttattccgacttaaaaaaaaagcttcaaatttttccgatttcgaatccattagagaaaacacatttctttctccttaaaaagtttctttttgttgttgttgtgtgtttatttctggttctgttgcaaaaatg

SEQ ID NO: 5772 - DNA, 3000 bp, Unknown
  misc_feature (1)..( 3000): cDNA_ID_2053783_gDNA_ID_1620816_Annot_ID_169264 3000 nt of promoter + ATG
tacttttctttttcttattaatacattaaagtgataagataaatttggaactttgcctaaacttgaatatggaagatcttaaacaatactgaatataaaatggagggtgtaccaatttataaaagctattactatgttataaatgttttcctcataatgttcatgaaggattaatctatatatatatataataaatataatttatatcgatattattaaaattctaaataataataaataattttattaatatttaatttaatattttttcaaaccaaatttcaatcttacacattcaattttttatacactttatattccaagtgtattcagtgtcattaaatactacctattgaaaatctaatttaaatgtaaacataaactggtgtacgtaaaaaaatcaaacagtatagatttcaaaagaattatatttaattgagaaaaagtaaagtcctacccgctctctggctctctgtcgcacaacttccttcgcacggcagccctccgccgcctaatgggctctccactgccttcggtggggactccgtcctcttccgttcaaccctctcagacttcttagccttctcagacagcctcacatgttcgaagtagtgactgggtctctaaggtaaaaggccatcctatgtctatctctgattttcagcctgatttttgtgtgaaaaacggagctgcaagtgttactatccctcccgaagtcgtaacgaattcagtgtcattgtggaagtgttttgtggttggttttttcatgggggatgccccacatgttggatctgtgcacgctactgtaaaccgaatctggactgtccttgaaaaatcttcaaagattgatgtttaattcttaaacaagactactgttttgtttagaatagaaagtgagaggattagagaccatgttctgaaacgctgctactggcatattgcgaacattcccttggtaatcaatgagtggaacccaacgtctgctaatgcactgccggatctttcagcgatgccattgtgggtggatttgaaagaagttccagcgcatctctactcccatgaaggcttgagttttctctctagcacgactgggaaatttgtcaagcttcatcctaatactgaacgatgtttaaggttggatgtggctagaattctagtagaggtgaacctgcagaagcctttggttgaacgtatatgtttttcagatgagtcggggaatgaaacaacagttcatgttgaaaaagtcaacaaaaatccagttaaggcagtcgaggtattgatagcagcagtgacatcagaggtacatgatagttctgacaaatctggccagtggactgaggtgcctcgcaaaagcccgcatacatctcccagtcgggacagtggtaagaaagaacaaagtcatggagtcattttctctaattgttttgaggctcttggtagcatcggagaagagggtaaagcttgagagaaacagtgaagaaggtgtagtgaacgtctgtcatccaagaagaaggggagctggttgaatctggctctgaagatgatgcaactgtaaaagtagtagcggatgatggattaggggaagaccaaggaaaagagtttaccaagaaggttcattcgggtgtcggacgacacagaaatcgctcttgtggccctcctaagcctatagtgaatagaaaggatccaaaaacaacaaaatccactttctcacggaagtaatgtcgtcctttttctcttggaacacgcgggggttcaatcaacctcgcaagcataatattgttcgcagttggattcaagcagttcgtccttcttttggtagtttcctcgagacaagagttcaggaaaccaactctctatcggttttacaatctattttacctggatggtcatacctcacaaactatgatcaccaccggctaggtcgtacctgggtagattcttctgatgttgtggtaatgactctcctcacaaagagttctcagcacatcacttgttctgtccaaattgtgggtacgagggagcaatttatttgttctttcgtctacgcatctaattttccttcagaaagacgtattttatggggggacttgtgtcaacttcgttctgctcttattcccccaacaacttcatggattgtctctggagatttaaatgaagtgttatctttctctgaccactcacgtgtgatggatttttctctcaatgattcggggatgagagacttccagaatgtagtgtcttactgtgatttggctgaccttcattcttcggggccaacttttacctggacaaataatcaagaggagaaccctattgggaaaaaacttgatagagctctgataaatccaatatggttatccactttcctttactcttatgcggcctttgaagcaggaggcatctccgatcattcccggtgtgtagttcatctctcttctccgcttttttaacttcctggcaagtcaccaacagtttctttccacagtggcgcaagtctggtatgccactccttcgcttttccattttcgagtggccatgtctctgatccataaaaaattaaagagcttaaaagttcaccttagagagttgaaccggactcagtatggggacctgcctcaaaagacaaaagacgcttacgggaccttctgcactttacaaactgaaactttacatgatccttccccgagcaatgtggcagcagttaaagaggcctcagaccgctggcacactctagcaagcctcaaaccttgaagaaagtttcttcaaacaaaaatcttgtgtgaactagctgagatgcgggttccaaaacacttcgtattttcaccgggttgctcaagccaatgcttcccgtaatgctatcaagtcgctcacgacggtttctggagaagtttgcacaaatccagaagctatcaaagcggaggctgctcgccacttttgaactttcttcaatcaagaagatcccagtttatccacgtctcgccggacctcctctcagatcta

SEQ ID NO: 5773 - DNA, 3000 bp, Unknown
  misc_feature (1)..( 3000): cDNA_ID_2053810_gDNA_ID_1620816_Annot_ID_169256 3000 nt of promoter + ATG
ttttgacagcctttcaggcagagatgggcactaatgcaaatgagcacggcttatcatcctcagacagatgggcaatctgagaggactatccagacgcttgaggatatgttgcggatatgtgtcttggattggggaggtcattgggcggatcacttgagtttgcttataacaacagctatcaggcgagtattgggatggctcctttcgaggcgttgtacgggaggccatgctggacaccgttatgctgacccaagtgggggagaggagcatatatggtgcagcttatgttcaagagaccacaaagaggatctgggttcttaagctcaacatgaaggaagctcaggatcgacagcggaattatgctgacaagaggaggagagagcttgagtttgaggttggggatagagtgtatctcaagatggccatgttgcgaggtccgaacaggtctatctcagacactaagttgagtccaaggtacatgggtccgttcaggattgttgagagggtgggaccagtggcatacaggttagagttgtcaaatgttatgcttgcgtttcacaaggtctttcatgtgtcgatgctgaggaagtgtcttcacaaggatgatgaggtgttggctaagattccaaaggatcttcagcccaacatgactttggaggcgagaccagtgagggttatcgagaggaggatcaaagaacttcggcggaagaagattcctttgatcaaagttctgtgggactgcgatggtgtgacagaggagatttgggagccaaaggcgaggatgaaggcaaggttcaagaagtggttcgagaagcaggttgctgcatgagtttgcctttccttggtttccagttttagtgttgttgagtttttgagcttctgagttgttgttcttatttctctttcatttgtattttcgtttggagttgtaacgattatgacatttgatgatttataagatgggtatttttttcttcttatatttgacttgagttgtcttatttaagaatgtgttgtgcggtttccaaaaatggaaagtttccaagaaaggacttgtctatttttggaaagtttgagtaaacaacctaagagagaggtgtgtttacgagatggtcgggggttggtcataaggatgttctcgaggggatatgatggatggtgaggcataaaggtgtcttacgcgaatccatgagagagtctggagatatgctcggaagcgtttagtattgtttgctcgaggaacatgagggtcccaacgacttgtgaggagcggtttatgctcctgaggtaccagtaacttgagggacttggtgtctttagagtgcgaggggaacggtggcttcgggtgacgatccgagagcgagttttgaggtactattttctccaagtatcgtaactcgatgactttgtggctgagagtgagccgacacaaatcagggtttgactttgagtggggaagataatacgtgtgatatccaagataccgtaggccgaggcctgagagtgacggtttatgctcgaagattgcggtctgagagtggagagtgagttgtaagcaacaatgactagtaaatcgtgagtataacgactggatagagagacctagaggggtcgggttggagggagtgcggaccgtagtgatggttgcacggagttcctcggagtggaagggagaagctagattcgaggacgaatctatgttagtgggagagaattgtaacgctcgtgaaccggaaaatcggttagggtttgtatttaaatcgtccggtttaatcagttgagttaattggaaagcctagagtgtgcctataaaagaatgaaactcgaaattagggctttacttagccctttttcgttttataaaagagaaaaagagagagaaggagaagaaccataatcgttagggtttgggaggaaacggttttgatatatcaaatcgttgtcaaaggtaacgaaatttggtagagttattaccaagtcttttatcgtcattctccatattacagaattggattcggatttatattcgttgagttatttgcagtttcgtgagacacgttttctcagacgcgaattaggacaagcggggattgtaactgaaatcgtggtttcgtctggtttccgatcggcacgaaattttgtgacgtctaaggctagcgtttcaccggagggatatgatagttaacagttggtttgtatttttagggtttcgtctttgagactgtttgtttctgtttttcatgtccagtttgcttcaaggttgcttttggttgtgacttgttgtaggacgtttttggactgtttcagacgcaaggagagtctctcccgggtttaattgttgttagaatcaatttgttaaggtgagtgcgtgaccatgagcttatctgagcgattggattgtatgatttgttttgtgtgatgatatgtaggtgcagtgaatgtgtttttgggtgaattgttcaatgactggtttgtttatgttgtatttgtgattataccccttttttttgcttgtgtgtatagctcgtagatgagaggatcgcctcactaagtatttgtgataatacttacgcatctctttctttttggtgcagataaagataaagtgtgatcgtgaaatcatgatctagaaactcatttggtttattttagtgttttggttattagaaccgattagggttgtgttaggattgttagtcatttttggttttgttggttgaattatttatttattcataaaatagtatttttgatttgcggtttaattgttgctttattggttggcttaattaaatatttatgaaaatatttaattatgtttttaaaaaaaaatggtcgggttgtttcagttagtttctagttcccttgtctaatctctttatatattgtaaaattctcatcccagtgatataacaaaatctctttaaaccttaatacgatatgtcgatctctaacctaaaacagtagccgacccctttatatttttttacaattcccatg

SEQ ID NO: 5774 - DNA, 3000 bp, Unknown
  misc_feature (1)..( 3000): cDNA_ID_1020960_gDNA_ID_1620816_Annot_ID_169251 3000 nt of promoter + ATG
agtcatcagattcaccttcgacggtagtaactccttcaacttctccaccagctggtcatcttggttctccatcagatacaccttcatcggtagtgtctccttcaacttctctgccagctggtcaacttggtgccccaccggctacaccatcaatggtagtgtctccttcaacttctccaccagctggtcatcttggttccccatcagatacaccttcatcgttagtttctccttcaacttctccaccagctggtcatcttggttctccatcagatacaccttcatcggtagtgactccttcagcttctccttctacttcaccatcagcttctccttctgtttcaccatcagcttttccttctgcttcaccatcagcttcaccatcagcttctccttcagtttctccttctgcttcaccatcagcttctccacaaagctcaatcggttgagatggattcgaaaacagcggctaactagaggtcatgtgatatgtgattcctactctaaaagccaaaaaaaaaaaaaaaaaaaaaatctagaaggtgaacaatatttgacaaacctcatttttggttttaatatatttaggaaaactttgagaacttcagattcagtattatatggtctgccaaattaatgtgaatatgagtagctttgtaaattcatgttaaatatcgtcatgtatatatgttgtaaaatttattaaaattatttagtacatcttgtttccgatgtatcttttgcactttttacgtttgcactttattcatatatagaagtttcatacaatatacaacacttaattttgactgcaccatggtgtttgaggacattcgggtcccttagcaagtaagtaatagactcatgcagcaataacattgtcataggattctagagatgaatatgaggtatttggttgtcattgtttagctaaaaaattagcaaaaacattaaatgtaaaattcgttaaaagcatttagttgtccgatgaatagcaaaaaaaaatattattattaagagagggatttattaatacgaactaaaataatactataaatatagctatttagcttaactaaagtgacttccacttcctgcgattaacaattcccataaaaaatatgtcattgtaattcttggaaacacttttgtataccaaaagaccaaggagaatattccatgatgaagcgtttaacttgatcacatgttatcatcgtcattagctcaaatcttcaaagatctaaaagtactacatctcttatgactcaaacttggcaatcactatgtatagtatatattctgatttagccactacacttagacgtatatgcttgctttgctttagtttaggttgaacctgatgttattgtgtatgattagaaattttggatcatgtatgtcccttgcttggatcaacatacataacttctttacaaaagctaatcaacgaatagaaatctgtttaaaaaaaatgatttggtcacctaagtcaccaaaattcggtcaaagatcttaagagaaccccacagttaagagtgtttggatggaataatttcaggataggtgaccttcctgaataatttgtagggccaataacaaatctttaaaacttcttagaacgtgacacgaccgcccaacagtggtgtgtccatatattcgagaagacgtgagatccactggtaggaattagagcagcagcaatggtggtatctattgtgagtcccttataataaaaataattaaaaagtgagggacagaggagagaggggctccaaaaacccttatttaaggaacagtctcaacaccaaatatatacatgtagcttttttagtagtcaaactctattaaaaaattaaaatataataacaacattagaatatatttttttattttttttttagggactctcatagtccctcccgttggaggtggtcttacaagttgtcttcggaaaaaaaaagttaaagaacagaaaattgatgttttcgtagtaaaagaaaaaatatatatactaaatgacctttgactgcaagaatgaagtaaataactatggttgaaaattatgagagaggaaaacacttttagacacaatatatgacatttttatcctcaaccacacatgatcttaccttcttcttctttcttgcttgcaaacttccccttccatcgcatatcaacaacatacttctctattctttctctcaccaacacaaatctctctctctctccaacaaattttctcgccaatatttctgaattttctttatacgtatgccgtcgacgaatctctccacccatctccttctagttctccctcctctatcacgaatctcttcatttctttgaaactttcaacctttgttgtttatttgtccactggatctcatattattaatactccatgctatttaacaaagtcacatataatatttgtctaacaaaaccccatgaaatatgtaaatatttatcatgttatccaataaaaacccatgtaattttgtaacaattctatatatttgctaatatttcgtgttttataagagaattgcatgcattttataaatatatcatactatttcagaaaaacacattattttagaaaaatatatatatagtgtatatatatcgtttatgtatttaaaagaattacataatttttgtaaatatatcatgctattttaaacaaatacatataaactttataactaaagctaatgctattttctgacacaagatcattctctcaattcttttccatttcatagttagtttgtaatattaccctaaaagaaaaaagaaaagggcaaaaaccctaaaaattcaataaaacggtaatagcaatcaactccttaatctcttaatgatttataaaacgtaccgaaacaaaacttaattattataactagcccctatagttattttaaataaatatctgtctaataaatttgaccaaacccttaagatctaattttctctgtttgatttgtcctctcaacaatg

SEQ ID NO: 5775 - DNA, 3000 bp, Unknown
  misc_feature (1)..( 3000): cDNA_ID_2053819_gDNA_ID_1620816_Annot_ID_169253 3000 nt of promoter + ATG
tcaaattttttactttctttgttttgattgggagaaaaatacccaaaaaagaaatagaatgacaaaaaatggtctatgaactgtaaagaataacaattgttttccttatatatatatagatattttcagatatatatattcataaaaagaaagcttgaatagcttaagtgttattttttttcttaaatgagactactgaactatatggtaaaatatatccaagatacattcatgaatgctgacgtattcccacaaaatattcaagttacattcaacattttataatttttcaaattgtaagtctgtaaataatttaatctgagatgattctatttaagcttaaatacgaagatgatcaaaaaaaaaactaaggggagttttttttttcagtgaaacaaattgtttctacctattaggaagagattttttaaatatatttgagaaatcttatgtcgtccattatttctaaagattgtaagtggtttcattaatctgttttataatacttataagatagttttatcgaaatacattatatatttaagctttatatatctagcaaccattaattttctattttcctctttacttgacctttgctccaatataccaaatttttctttcggttactattgtgaaattatcattttctattttcacataattagaagtttagaacaaaaaatcgaaaaactaatgactctctctctctctctatatatatatatatatatatatattagaaatgctgcatatctatatataaaattagaattaattattatcgtgaaatatataaatttcttgtttgtttaaatgtgaaagatgtccatttagaagtttaaaacaaaaaatcaaaaaataatgacttctaaaatactttctcgagaaagtgtccatatatagtggtattttagacttctaagattttagacatgtttgtttgcacattcagattgtcatctgaatgaaactgctaattgttgttcgtttttgtgtaaaaataagcatcaccatatcgataatttgaaatcattagtatagttaagactaaaaatatgagcattttagttatattttaattaaactcatctagacggaaatatacattaaccaaacagacaaaggtttattcagatcaacaatcaaaaattgaaacgaacaacggttagataaagcatcctgttaattcatttgaatgaaccatttagatggaaatgtcagaggagcgcttagtcgattttcaactaaggataaatatcaagcaatatagttagaggttatatatgtacatcaaagtcaatatgagacacatttaaccaatgttggtttaatgtgataataagcctgcaaaatcaaaattgtcaacaatttaatattccatgaaatttaatgaccaaacatatccaaattgattaccacttaatttgagacaagatgaccacaatatatttcaaaacaacaagcctcatcttaacaacaacattctaaccaaatcactaagcaaacgagaaattgacatccttctgtttgagaagaacattaagaaccttcgtgccctatctttgaggagatattgtaaagtttggttaagtttgattttattgattcttctttactatattttcatcttcaacaagtttggtattaattgagttgtaggggtgggcaaatattctgtaatccgaaaagccaaaccgaaccaagcagaaataaatgatttggtttggttatatagtttagcctaaaaagctatttggttgtcagtttcgttcgattttctgtttaggtttgatttggttaaaacccataaaatcgaatggttttttttctgatgaaaatttagaataattatatataattatattttttcaatttatattttgttaataatatccttcatattttttttattgagattagaattatttggattctattctttgaatattttgggtttacgaatctaaacttagattttgttccttgaattatgtttaacttattatttctatctacgatttcttttatttatgcagcaatagtttttggtggaaacatggattaagttttttttttaaaatcggaagcaaaccaaaaccaataactaataattttggttagctattatgaaaattctccagaaaagaaatgactttcgaaatccatttggttgtcaattttgttaagttttcagttttgatttgatttggttaaaaatcataaaattgaatggttttgatgaaaatttggaataattatatataattatatttgttcaatttatattgtgttaatcttcagatttttctttattgaacttataattatttggattctatttttttaatactttgggtttaagaatctaaactttgattaattttgctccttgaactatgtttaacttattggttgatgtattatttctatttaggtttgcttttgtttatgaaataattttttttctgtaaaaacatggattaagttttaaaaaagtcagaaccaaaccgaaaaaaataattaattatttggattagttatgaaagttctccaaaaaaaatatgacttctcaattttttttttttatgtccaccaaactatgtgaacaaaaaccttaaatttgattataccttaaattaagataattattaaattaaatttccaagtttagtaatttggaagaaaaccacaaacctattttggtctgtctctcacattcttaagtcaatcgactttcccgccaaaccccatatatcaaagcacccaaaactacgaaactctttatctatcataagcaaaactatccttgtaaatatttccaaaattatgcagaattcacactcctaaagaggctacgtaagcttcaaaacaacaaacagctcttcaaaaaacaaaaaaaaaacaaaaaaatcaacaaaaacgagctgttcatatatattttaaagaacaaaaactaaaaaaaaaaaaaaaaaaaaactttgacaaaaaaaaaaaatg

SEQ ID NO: 5776 - DNA, 3000 bp, Unknown; identical to SEQ ID NO: 5590
  misc_feature (1)..( 3000): cDNA_ID_2156314_gDNA_ID_1620817_Annot_ID_169292 3000 nt of promoter + ATG

SEQ ID NO: 5777 - DNA, 3000 bp, Unknown
  misc_feature (1)..( 3000): cDNA_ID_3078418_gDNA_ID_1620817_Annot_ID_169319 3000 nt of promoter + ATG
accaagctgggacaatttcttggccccagcttccccagaatacaaattttttctcttcactggatggtcagaatcaggctctttcttctttttctttttcttttttggctctgaaggaggattctccgagctcatttcacttgaagatcgtttagcaactttgactttcttgattacagaccctgtggaacttttcccctcagatgctgaggtatgagactcaagcagaggctggagagaacttccagctgatccaagatctgttccagcttcttctttaggtttaagactcgccatagcttcagatttcccatgctctggaagtacagcagctctttcttccattctctcctttgatttttcagctagacccttttcttcatcaagagagggctttgaagctgaaaattctttaccaggaatagctgtatttgaagaggcaaaatccatgctgacgatcccagacttctcatctttcattggagtttgaagcgtcggagctcttctctgcagcccaaaatccccatccaaagatccatcaattccctggatatgagaagcttctgaacttgcttcaatttcgccaaactgaacagacttatcaccagcttcatcccttcgtttgagaagatacttgtctttttttttagagaccttaacctttgtgggttttttagagctcttaaggtcacctagcgtttctgctatgaccagtgggccactcaagggagctggaaataagagaaattgaaacaacacatcacccaccaagaaaatgaacaataaagcaaacaaggtaaatgtatgcgggactctccatagtagaaagaggcgcagaattgttatcaggccacgttttcgaatgcacagtttagcatcaatgagacttcactattctttcaagcatgctatgtaaagaattcaactacaaagatataaatcctaaaatcatgagcacagaggatctaaaagtaaaaccctaaaaccaagttacagtatctaatatctatgtaacacatatgaaagctgtttcaagtctacaacgaaaaaacccatatacaaacaataacatgattttctgaaaagtggctaatacctcgaggcggtgctctattatgaggttccagcgtactcactgaactgcggggtgattttgtcccaaaggcctgtgcataagtttcatcaaactcctcaaacactgacttgcggaaagcaaaaaccactgctttcttcttcataaactttaaactgtctggatcacactcttgaggtgctaacgccaattgcttcacaaacgaaatggtttcagcgggtaaaaacttatccctagaattcttaatctgatcaacagagtaaacggcttgaagctcgtaatcaggcacatcaacagcaaagtaatcttccacattactaggcctaaagttataaggattccgacatttacaagtcaaaccaagagctgaccttctactcgcctcatccttggcttcctccacagctctcacaaaatgcttcgaaaccgtctgctgtgatttctcctctaaattcggttcgaaaggaataagctcagcaggatcaaaccaaccataactactatcaccgaaaaacgcaacaagaacatgatcaatcctcctcatacgacgaacagaaggagacgcaaaagcttcattgaatatatgaccaggccaccaaggatgagactttacctttccccaaaccaaatctccaacttcaaacccataactcaatgccctcgaaactccagaacccattttctcacttgcaacataatcatcaaactcagataaaagagatttataatccgaaactccttttttctcttccttcaaacccaaatctaattccttctcatcagcttcagaaccaagctcactagattgatcatcagagccatcttcttcttcttcttcttctttaacctcagaactctcatcatccttatcaattaaaacatcctcgcttttaatctcatcttcctcctcactccctacgacaccatctttctccgatctctcactttcgagaaccctagcgtcatttgtaaccgccgaatctagctccataggtgaagaagcttcaacatcatcatcaatggcttcgtgaacatccccgctcgaatcaactacagtatcatctggagttaccttaggatcctgaatcgaatccgtttgttgaacaatcacagcatcctcgttcatcaccgggattaatttagttttgtacattacaaatcgataagaaccctagcaacaacaacaacgatcctccgatgagagattatccgaatttggttctcgaggacaccaaatgaaagagacggattattgttaaaaaaaaaaaaaagctaatcgagagaaagacaataaattagatctactgattactattgaattgggcttacccggcccatataaatatttataagcccgtttaaggaaccgacgtcgtatgatccaaaaagacctgaaaacaatcgctccttcttcctcaccttcaagcgccgtcttcttctttgttttttgctctcggctgatctctgtattgggtacgtttcttatctcgatttcagtgttcatttgttttttttgtcttttcttatgtagctatgagacaggatccagaacgatgcaatagatataagagagccttcaggaaaattttgccatttttctccatttcacctgttgttgggttctagattaaataaaactagagtatagttaataatttctataggcatggttttagatttacattatagtgggagtgatgattcaaagttttagtctttgaacatttggccatggtagtttgttgttttaatacttgtttagggttaacaaaaaacctacttttagatctaaagactcagatttttcacatttatttatcgacttaaagttggaatgtgttaaagactgatagctctctctatatggctttctttggcagatttttgatataaggtttgaaatcatg

SEQ ID NO: 5778 - DNA, 3000 bp, Unknown
  misc_feature (1)..( 3000): cDNA_ID_3447156_gDNA_ID_1620817_Annot_ID_169323 3000 nt of promoter + ATG
tatacgttcctacaagaaaggagagtgtcaacattgctaagtatctttgtggggttggactgaaagctgcagcttataatgcatcggtatggactgataaatcttcttactttttcctgctataagaagccctttgcactgttttttaggaatgaaatttgtcaacctttgttaacttggttgtagaaattttgtttccaatttctgatggaaaaattttgtattccaaattaagagctgttctttttaaatattggtatggatgtatgaacagtttgttacgtttcacagttgccaaaaaaacatctcagacaagtgcaccaggactttcacgataataagctgcaggtatatacatagaaaagaaaaccttaatgttctatatgtgttatggctcaaacttagtgatctactctgttatccacttcgctattcctgcttctttttattggaatactacgtggaagatcactaacgttgttttacgcctctgcaggttgttgttgccacaattgcgtttggaatgggaattgacaagaaaaatgttcggaaaatcatacattatggttggctgcaggtctctcgaagctcttataagatttctatatttaacatttcacatctcctagaattacgtgctattcaaatttgttgagctctctaatactgaaataatgaaattttacagagcttggaagcatactaccaagaagctggtcgagctggaagagatggcgaattggctgagtgtggtgagttgattaatgatttggctgtgtaaatgtactcttgtttgtcatggctgatggaagtaactatctgatatttacagtgctctatgctgatctatcgagagcaccaacgcttttgccaagccgtaggagcaaagaacagacagagcaagcatacaagatgctatctgactgtttcaggtctctatactagtcagatacgtgggagtgcatattcacttatcgttctatattcttttatattcattctcctttcttatgcagatatggaatgaacacttcacaatgtcgggccaaaatacttgtggagtactttggggaggaatttagttccaaaaagtgtaactcgtaagtcctatccttttatctaaaacccatcaagtcaaactaccaaatagttgtaaaacctttccaatctatgaaacagatgtgatgtttgcactgaagggcctccggagctagtagatgtacgagaggaagctaatcttttgtttcaagtaatcactgcttttcatgtaagccatttgattaatcccagaacttcatttaaaagtttgcttgtttcgtatgagtgatatacaatcaaacatatttctatttagtatttgagatttcgtctactactgtataacctttctttctgaaacttaagccgctagtatattagttgcaggtagacaatgactctgagcatgcaccatatgaagattatggactcggcaacagcaaacaaaataaattatcccacaagccaaatcttctgttcttcatcagtaaactcagggaacaggtaaatcttctgtttcaacaaattacatagtgcattatgttcttgatgatattaatgtgatgcctttggttagtgtagtgtgaaaaattcaaggaaacagattgtctttggtggaaaggtcttgcccgtatcatggaagccgaaggatacatcaaagagatggataacaaggtacactagtaaccaaaaaaccaacctttcttatgatccatttatcggtaaaggcgtaaagctacgatcacatattcggttaaaaccatgttactgatctgtgttgcaggatcgtcgagttgagattaaattcatacaaccaacagaaaaagggaagaaacaactagatttccaagatgacaaaccactctatgtttatccagaagccgacatgctactttcgttgaaacaagatagaacatacagtggattctctgaatggggaaaaggatgggcagatccagagatccggcgccagcggttagagagaagagaaagaaagcctcgaagagaaaggaaaccccgaaaaaaacgaacacgaggacgttcttcgacgaagttacatccatggagaagcaaagaataagaatctcaaccctctttaagtaatgaatccactttatattcttttaccaaacccattattccattcatggatctttatggaagcataatacttctttctacaattgctatatcaggctccttctttgctctgagtcccatcttgaggcatagataccgcgccatcgagaagctgaggcttgtaaacgaggctttggtaacggcggaagagaacgtaacaaggcttcaagaacgtcatgatgtgattctcaaagagatatgttcttattatctcgttaacaccgagctccatgaagctttggtttcatctcgtgcagccattaatgatgcttcttcatttgtcatggagcttagaagattacagttgaatatcttaaactctctttcttaatcacattttttgtacttattacactaattaaaaccagagtttgggtaataatttttgtttccttaattttccgaattatccgctaattttctactctaattctctggatattttaaataatagtaataatctgctgtcaaaataagataagaaaaagacataaagctgattatcttgtagaacgtgtggggaatgaatctaacggctgatatcactcaagtgttcttttccaccttccttttacaacacccacgtgtaatgtcatacaaagaagtcattacgaccgttagatcaaagccaacaagatccaatcttaacggctaagataaattactacacggatcgccaacgtggcaatacgtggtatatacatacacgtcgttctttcctcattttaagcaaatcgtaaaccgccacaaaaccgaaaaaaacactaattgtgctttccctttagattcatttgtattttcttttggagcttttgaacaatg

SEQ ID NO: 5779 - DNA, 7 bp, Unknown
  misc_feature (1)..( 7): cDNA_ID_2166952_gDNA_ID_1620817_Annot_ID_169324 3000 nt of promoter + ATG
ttcgatg

SEQ ID NO: 5780 - DNA, 3000 bp, Unknown
  misc_feature (1)..( 3000): cDNA_ID_2166946_gDNA_ID_1620817_Annot_ID_169321 3000 nt of promoter + ATG
tccacaacattatctaccttcatggatttcttgtctattaggctgaaagtctcagtctcatagacagagatagtgtttttgctaagcttggcaaagtatttatcatcttttccaccagcccatctgtagaaaaagtttacaagatatcaacatatgtccataatagtggagaagatgataatattggctgtttatttttaggacattgacatgcagttgaaagaattacctgaaaacaggccaagaggcaccagcaacaccaccaggtcctccaattgaaaactcatcagcactacccttgaaatctctcatcatcctcccggttctcacatcaaaaaccttaatctcaactttctgaaagtttgacagaattcagcgtcacaaatagtaaaagttgaaaagaacagaagaaaagatgcactcacacttgcatctcgcgggttgcttggttcttggctatggtaagttacaagatatttctcacctggcgagaaatcaactagttttacctaaaacataatcaacaaaagatgcaattttcaggccaacagaggaaaaacggaagtaatatgtagcaattgaaaggaaattcaaaccatagaatgctgataacgcatgagacgcgtgaatgtatcagcaccaccccaaacagctgccccctgcttgtggagtgtcacaaggtatgtacctaaaggagaccactgcacataactctctgtccaatactgcataggaagagaacatcattaattcaaatgaaggtaacataacatataaaagtgctctaaacagtcaagtaaacaaataagggatattaattcaaatgaaggtaacataacatatacattgctctaaacagtcaagtaaacaaaagggatatacacacaggaagtaacttacaggacgcttatgaacaggttcaggcgccttctgcctagtatcattccagaaaacttcagtatcagggccagaacgaatgactagctggtctcgggctttttcatcagtaagccatttttgcaaattttcctgaaaaaacaaacaccatataagtaacgacaattagcaccacaaaaggctgcaatgaattaaaatatatacatgaaacaagagttatgaaattatagttattagttagtatacatcaattacgtaaaaagatcctaaccctaacgcagcaggcaaacacaaaataaatcagcgaattaccaaaataaagaagtgattacacagacacaatggaagttattcaaagaaaattattcaaggtacagggagtaacatgatgaaaactacacataccccagggacgtagggcctggcctgaggaggctcccactcctccttcacattcatcaacctgtcaaaatcatcgaacatgtttacagcaaagatgtgagacttgtccaacttgtagccatgagacttttccttagcgttttgtgcttcctgcaaagagccccagacattgagagaaactcttaggaaatactcaaccattaagaacaacctagtttgggctcctttctaacaagagaaataaagtattgaaacatatgacgccgacattattgcttcagaatccaacaaaacagagattaagctaatcaagtagataaataacctgaggagtgttgaactcaataaaacagtagcccaatgtcatcttggtatcgggatcaacaggcatccacagtccattttccttaatcacacctaactggttgtaaattttcttgacaacaccttcaagtttctcaaacttctccttgggaacaacagggaggtgatcgaccacgataatgttaccgaatccagtgtcgaattcagactggtcatcctggtaaacagcttcatcatcactacaaccatcacagaaaaaaaaagtgtataacgaatcagttccatttttcatacgttcatagataaaatgtataaatataataagctttgcaccatcaaggaaagagataaaccaattcgaaatacacaaaattttcatacatacaatagcaaaacctagaataaaatcatcccatcgtataaacacaagaagattagaaatagaagtgaccgtatatgaacaaccagagatctaaaggaaaatctcacctctcgatcccaaagtcttctccaggaggaagttggatggaatcaaaattaacctgagaccaatcaatccctaacttagcagctcgggcatcaatatcaacgacctccatgatttcaaaccttatatcaaaaatctgccaaagaaagccatatagagagagctatcagtctttaacacattccaactttaagtcgataaataaatgtgaaaaatctgagtctttagatctaaaagtaggttttttgttaaccctaaacaagtattaaaacaacaaactaccatggccaaatgttcaaagactaaaactttgaatcatcactcccactataatgtaaatctaaaaccatgcctatagaaattattaactatactctagttttatttaatctagaacccaacaacaggtgaaatggagaaaaatggcaaaattttcctgaaggctctcttatatctattgcatcgttctggatcctgtctcatagctacataagaaaagacaaaaaaaacaaatgaacactgaaatcgagataagaaacgtacccaatacagagatcagccgagagcaaaaaacaaagaagaagacggcgcttgaaggtgaggaagaaggagcgattgttttcaggtctttttggatcatacgacgtcggttccttaaacgggcttataaatatttatatgggccgggtaagcccaattcaatagtaatcagtagatctaatttattgtctttctctcgattagcttttttttttttttaacaataatccgtctctttcatttggtgtcctcgagaaccaaattcggataatctctcatcggaggatcgttgttgttgttgctagggttcttatcgatttgtaatgtacaaaactaaattaatcccggtg

SEQ ID NO: 5781 - DNA, 3000 bp, Unknown
  misc_feature (1)..( 3000): cDNA_ID_2166934_gDNA_ID_1620817_Annot_ID_169316 3000 nt of promoter + ATG
atcgtaatcaatagcaaagtaacaggaacagaaattcaacggactctggcactgcagcatacttccgatgcgcaggtaactaaaaagtctatgcctgtggaaactttgtctttagattgctcatgttcgaataagtatagacttattttgtgtactctttttgctaatagtaacagctacagaaattcttttctcatgattctgctttccaggaaatggagccagaaatgattgaaattgtcattgaatcaaagtcaatagcgcaagcaatggtggatgcagctataaaggtatttataatatatctagagacttcagagtcttctaaatacagagaagccaaattcatacaactctaacatcttttgtttaaatcgttgtcaaccgttttaggctgcatcgtcggggaagaacaatgaagactcagagaatatggttcaccaagctttaagctccattggcgaacatcagccattagacaactctatagtgcctggtatcaagcatcaagagtataccaatggcagcttggatcatcattccttaaacacagcagagccgatgagtaacggtttcatctcacaggaaggatcaggaaaaaacaaaacaccaatgccttcagagcttatcacctcttgtgttgcatcttggctcatgatgcaggtaaaggaaataattttgtcttggactaacgaaagtgtaatctaaatcaagaataccaaagttttcacttgatgcggttttgattagaactctttgtgtgttatttacctgcagatgatctcaaagaagcagtacccaccagcagatgtggctcagctaatggatacagtagtgaatgacttgcagccacggtgtccacagaatatgccgatatacagagaaattcaaacttgtatgggattgatcaagactcaaataatggctcttgtaagaacgtcatgaaacatttgtgtcctttgtaattaacctgacatcgaagataacacttggagatcagatttaattgtttggattgtagaggttagtttagtttatagttagttaataatttgaacagctccaaaggctgttgataattagttaccattgattctgtaacttttttttgtcatcattcattgtaactttggttaccttttactttggagctgttttttttttctttctttctcagtgattattttcttgggtcattttggatcctaatggctgaaataatttattcccaccttaatacaaaatctcaaatatatactattccttaactaaaattctagaacaatgccaaatggatatgtttgaaatacctttaataacaactaggatttaacctgtggtgtaccacggacaaatgttttattcatatataataatattaaattttacggtttttaatttagtatttaagttttataattttatattaatgttataactaaaacaaatggtgatgataaaataataaaataaatatttaacatgtgctatatcaatccaaactcgtcccactatatttcatatcaatccaaacccgtcccgctatatttctcatctcatgatatttttttataagtttaaataataataatgttttataaagttaaaatatatctataatatttaaaaataataattattttttacttaagttggaaagatttttggaaacgtttgttgagcgcaatataaagtatttaaattttcaaatctgaataattaataccaattatatatcttgaaagatctttggcaactattgttgaatataatatcttgtatttaattatcgacaggaaatatttaatgtcaatggcatgacattgtaaatacaagtacaaaatttatttgctaaaatggctgcaaaaatgtatatgtagatttacttctaattttaatgtttcaaaggacaaaactaggcatgaccataaaatccgaagcccgaaaaacctagttcgctttggttcgagtggatctaaagtgtttattttggggttttggtttggttcgtgtaggatctgaaacctgaacagatacctgaaatatcgaaactcaaacggatacatgtaactcgaaataatacgtatacataatttgtcggtaaattcaggttcaatatcaggtttcaattaaatttgagaaccagcccgaacccgaatagacctcaaccgatattttcagttcctaaatgtattttcaatctctttaccaaagtaacccaaaaacccaatctaaacagacccgaaaatccgaatgtccagacctaactaaaatcgtgagtcaaactcaaaaaatgattgattaacactatattatacttttacttagattctataaattggacacatgtatgggtgttattaagggttggaaacataaatttaagccatgaccttatttttggttggaaaattcttgttcttttttttgttagtaaagggctgttaataagggttttaatgggttagcgaacgacaccgtttataataaatatgtttgctaaacgacatcgtttgaccttagggtttattgtttaacatgaaagaacgtcgtttcaccaacgtttcttcttcctcgcaagtctcaaagccaggaacgatctcgccgtatgagcaacttccgacattaacactgtattgctctgccgtactctcctctttttcccttcatactcgtcttcacatctgaattccgacaagatattgcgtctgctctcctctcttccctcattctcgtcttctcattaccaaaaacatcttcttctcgtagctaactcaatccaattccaatctccattcaaatcgagcaccagataattttttctcctaaattctaatataagccctaaaattcaaaattgaaatatctatagaatctccttccgattcagacggataatcgccatcaacagcgtgtgaattcgatcaaaaatctgaactttccacaaagaaattcgaaagctcagatttttcgatttcgaaaattttgaaaactcagtta

SEQ ID NO: 5782 - DNA, 3000 bp, Unknown; identical to SEQ ID NO: 5588
  misc_feature (1)..( 3000): cDNA_ID_2156350_gDNA_ID_1620817_Annot_ID_169302 3000 nt of promoter + ATG

SEQ ID NO: 5783 - DNA, 3000 bp, Unknown
  misc_feature (1)..( 3000): cDNA_ID_3078433_gDNA_ID_1620817_Annot_ID_169304 3000 nt of promoter + ATG
agggtctctcctagatcggcagaactcggactaatctggacaaacattaatgtcttgcaatctccacctgtataagtcacaatgaaatagaaacaccatggagatgaaaaataagatgtcttatgaatcatgtggccataacaacggaagaaaataggacaaatgttactttacccaaagagttttgcagcatatgggtcagctttgagtttctggagtttgacaaaaaggaaggaaaaaagtgtcatcaacatcaatcagaaaatctcatatgcaaatgtcttaacaaaggggaagaaagaagggaaaaacctgtaaggaatgtggcttgttttggatgcaagggcagagataacatcaccgagtgctgaaagcgacttattgataaattgagattctttcagcctttctccttcaacttctacctttcctactcgctcactgccagccaagtccactaaccaaagatgacttctcgttctctgaccatttatcaaattctctcccttcactgtcactcgcagcaagctgaacaaaaggaaatctcttgttggtataagtatggaaaaggtttagtttcacatgaatttagtttctaaactctagtttgcttaccaatgagagcggctgctttgctcatttgcagcagttgaacccacagatcgaacagcatatcctttcttgagcagatcccacactccatctgtattgtaaacttgagcttcgactaatcctgggacttcttgcgtcccttctgctgattgcttaacctccaacctttatcaacacagcacatagtgttattttgctttttaacaagaaagatagaaactgtaaggcgatttattctactaccaaataatataatggaagacctactttttagggggctggtttgagttatctaccaagaggtcccttatcttctcattataaacctccaacatgctaactgatagctcaaacttcatgagatgacttttgctttctgaacagcgaaatagttcttctaaggtcctatagttcactcctctattctctggtgttccctccatggtaaatgtcttgccagttcccgtttggccataggcaaatatgcagacattatacccatccagcaccgaagtaactataggttttgtctgtgcaaaaacagtctctgcaaaagaaggtacagtcagataagaagactcgttggtgtagtgttcaaagagcaaaggtttagcgaaataaagttgcaaaggtagcgtctcaattaccttggccatcgtcaggcttaaagacatggtcaaatttaaaatgcttcttggaggaatcagatgaaagtatctggagctcgttttcctgtgttgtatcaaactcagctacagaagcacaaccattggctatttcagcttggtttagaggtctgcatctgcaaaagactctgatatttcccttgagttcgatcacttcattgtataatcgtttcctctctgatgactcttccaagtactgtttttcaagagctccaagcttagtagcttccattaaaacacgttgaggcatattagttaaccaaatcaaacaagttttgtatttagagaatctttgtcgaagaaatcagattcaaagtactcactgagaagctggagagcccttgaaatttctggttctactaaggaacaattcttgatctcttgcacttggtttgataccaacgcatgttcatccttcaagatctaagacatgatatagaacataaaacactagcagagactgaaagcaaatctgttgaaaattcatatttaagttcatcttgaaataacctcaacttactattgcaactgagaactcagaaggaactattgtaactgtgtttattcaagaggatgacaaagaaagtagtagtaccttaattttgtcactgcagtcgataattttctgcaaaattggaagtgttggtccattggcaggagaaacttcttggtttccacttgtaatagtatcctcactttcttccactatttcagccaaatcagtaatgcatcatatcagagtcaaagacacaagtgaatctaaaaatacatactacagtctactaaacaaagtacttgttaacagagtttcagattcatgggataagttagggacccaaaacctaaatcgttgataactgaaggtgaaccaatctttctgaattccaaaacaaaatgctaaaacctaattggattctcttcagaacaaatccaaaagaaccaggaatctcagagatataagtgtttgagatgtcaattcacaatcagagactaccaattaacaatcgaacgacttgtacactaatttttcaattcacgacgagaaaaccccttaccagcgtcggaattgtgattgttgacagaaacttccttcgattcacacaacaaaccaccatcgttgcaaatttcttgatgttgatctggcaaaaaccgaagatgatcagcgaaacattaaaaaaaaaaaacagatcaatcaagaaaaccataaatctgtaagaacatgaatcagaagagcgacgacagaaacaaagtatagtacctctttccatggcggatttgtgcctagagaacccaaagaacgttgaatccaaaattctgaatcaaagagagcgagagagagaccaagagagagtgagagatttagagagagattgagaacgagtgtagacgaatttgaatttaggagaataagagccgttggatctaaagaagctttgtaacgtctatattttattaccattcgttccacaaagaggagcgtcataatccggatccgaattcgtttattattcgtttcacttgaagtttcaaacctctcttttccagcagagagaaggataaaagttttcacaaattaagtaagacccctaaacttctattttatttataaagagccacaaatattataatttcacaaatacacccatgtgttccagttgtttgagtaaaatctacttcaattgatttgccaaaggcttgcctc

SEQ ID NO: 5784 - DNA, 3000 bp, Unknown
  misc_feature (1)..( 3000): cDNA_ID_1829294_gDNA_ID_1620818_Annot_ID_50650 3000 nt of promoter + ATG
tattcttaacgagttagttactgcatattttcttattttatagaataagttgaattcgatcgtacttattatctgtacgaactactggttttcgatgtaatgcagttgacaacaccataagagtataaaacctaaagctgtcaattgggcttgaccatgaccaaatggtcttgtccagttggacattttttttctcttcacaaaaatgaccaagcccaaagtgaccaagcccaaaagtgaccaagtccaagagtgaccaaaaccaattatatatgtccatggacataaaaaaaatgtttaacatcacaataataatctaaaatgaccatgacaaacattgtaattagacatcataaaaacattttaagacaacattcttaagactatccataaagttcaacatgaccatcattcttcaatcttctcttctttctccttctcgttctcctctttgttctcttctaaatctgcagttacaaccattaaacaagagagtaaacaaatctctaaagcttaaaacaactatacaaacaagaacttgtttcatttaccttaagcttcttctttctcttcttctttctcttcttctttctcttcttctacttcctcttcttctccctcttttggaaagcctcgcagccaattccttgtgcagattaatgcttggatattttcaggaagaagactactcctatatttactaaggactccgctgcctatgctaaatgacgactcagaagcaaccgttgttatcggaatggagagaacatcacaagccatgcttgataactccttaaagcgacaagagttatctttccaatatgctaggacattaaaatgtctaaaagcagccatatctaatgttggttcacctaaatatatgtccaattctgattttccactactaccaactttttgagagacaaatgcataaaatccctgagaaaaaattcacacaaatggagcatatgagatacaaagctgccagatagaagtctaaaaccaagcaatatataacacttcaagtctatcaagcttaaagcaaatcaagtgcaaaaacagattaaaactacaaaaacagtggctaagtaagaatttacttacactgtaacctgccggaatgtcttcttccaaagtttctacttgtgaagaggaggtgatgctacttggacgtttcttgtaagctttaaaaagcttatagatcttcgaacgcacatgagccaatctggacttactagttaatcgatctagagtactgaaacaatattccaaacatttcaacttaagtcttggatcgaatacagctgcaattgcgagaatgtcactatactcttcccagtatttttcaaacttaagagtcataatttccaccatttgacaaatagtctcatcaactgaaaactcatgagctctcaaccaacactctatcttccaaacttgcataaaatataagttggctgtaggataagaagaacccgaaatcagatttgtcatttcagaaaatggctttaagaattcacatatcaactctcctctactccaatgaccaactagtcaaacccgtttctgaccgtggatctatttaggcgtagtccattaaaaccatggtttagttgggctagaatttaattgtccacaacaatattggttgggctaagcccatggtccttttgaccaattgacagctctaataaaacctgtagataacaaaacaacacaagttttatatactataattaattgtcttctcaaagaacttaataggaagcaaaaaccatgtttgtttcatcccatttaaccaccttaaaatcgagatcaaacaattttacatatgcaagttcaacatacctccaaacatttagactcaagacgtctatccctacatacaaaatctccttgccctctttttttttgggtatgccaaaattttgaatatacgccaaactactttccaaatcgtttgcataacaaagatgaccataatctttttccttacgacgtttgtgaggtccactgtaatcatctggatcaagactctgatatagatatcttaaaccatatactatcgctaaaccatttagagtatcagtagtccatttattatttttaatggaccaaacacataaaattgagctgaaccgtatcaatccattaaaacttctgatatccaatattattataaataatactaaaaaactccttatgatactatatgaatatcacttatatacatgctcttatatggtgtgtagttttcatcccatccatgtagtcttctaaaggcgctgaccatgtcagtgatgacataagtccaacaaaggacatggttacgttggtctcgaatatactccgagacatctttgagcctttctctgatttcctcgtctagtagtagaaaattttctagtactcctgtctcctgatatcgtctaatatataataatatagttaaccttaaggcagtcaatcatcaatacgccatttatcctactaatttaactcatccaattggtgctacactattgacgtttgaaggttgggatgggtgtaacatatatcgcggacatgccttatccataaatacacttaaaattagtataaattttctgacttgccttacctgagtttgattattttcttagtaaagtattttgatattataatttggtagtaatataatcactataacatgcaagaactacaaaaccagaggtctctcaaatggacactcatttaattgttacgatagtaaatgtcacccatcaatgaaacctaagtcaattggatgatttgggcccaattggacctaattcggcccatttaatattccctcttttctaacctttgtttctcctcttgcttgctcacccttttccctgaatcttaagaattactaattcccggcgagttttcccggcggcggctagataatactggtttctgccagcaagatcgaaggagataaacttcgtaatcaaaaagtctccttctgataaaaag

SEQ ID NO: 5785 - DNA, 3000 bp, Unknown
  misc_feature (1)..( 3000): cDNA_ID_1842487_gDNA_ID_1620818_Annot_ID_50653 3000 nt of promoter + ATG
ggtggtttgtcgtattatggttttaaaatattcattgatttttggttacacgtttaaagaaccacttaaatagatgttttacgtataaaatgaatattgactacataattgacttcaggataatagatacgattgcgtaacaatatcgtattattgtatgccgacacctttgacagcatatcttcctttacattatttgtgaaccttatccacttattttattagagtatagaattgacttaaggatcggtttaagtatactgtgtgttcatcattggttttcatgtctgtaaaccaaacctctagctcctactatacaagagaggatgatgtaatcattttgactaaaaagaagtaatgagaataagtttgttccttttgctttcttaacaaacttttcttgatttcgtatttttattacgaaaatatataacttcttattaaactagatataaatatatatttagcataactcgctattttaatgcacatatttataaaatatataacttcttattgaactagatataaatgtatatttggcataactcgctattttaatgcacatatttataaaatatatatttgaaataatagaaagctatattaatttttaacatgttaaatttctagataaaacattatatctatttataacaggttaaacaaaaaaataatacacataaattgtaaatatatatatttacgtacgtcgttaagtagttaagtttgagctaacggttgtaaccgatctaaaatgaaaaaatgggtgacgattttcacctaaacttttcggattcttgctgaatcttaactagagtttggtaactatatggccggatgtcattgtcgaagccatctaatattgcgagattttggcagattttcaatggatctcaaccaaaatcatagtaactgtggtgtctagttccacatgaacaaaaaatatcatgcatttcccctaacacgtagaagtagaagaggtaacgataaaagttttgcccagataaaaagataaaagagagagaagaagaaataaatgtgggatttttatttaaaaaagaattaaatacgagattgatcagattggtggaacaaagctgtataaatttgttagttgttaactagagagataattttttacgaaatagcgtaaagctgtacagaatttgatgttacttttttgattggtaactatcaaagcggtatgccctatattaaaattgtattaaaattgtatgaagttatcattcaaattcctagtttaacttttggtctatgggaattagatccctaagttttacatcaacatatcatttgatcatggcagtgtacacaatagatttttcatatacttttgatcaattgtcaaaaaatttaataataaaatttaaaaataaatgaaaaatggttgacacacttggaccattacaaaaatgaggagctcaagaatcccaagtggttttcactttattctttacaaatttgtaccgccataggacaacttatgtttaattataaatattagcagatcaatttttttttagttgaatcgtgttgggacaaacatgtaatatgattttgagacaaactgttttgaattaatgacacaatttcatggtaagtaacatgccttattatataatctatgaaaaatatttggattatattcacctcctttattttatccaattagaatctgacacctaataataagaaaaagaacttaatttaattataaatttaatttgccactaaaacgaaattatttatctgtttgggtttattagaaaaggtgagagtttagattttatgattaaacaatataaatattagtttgaatttatatttaaattttacaattaaacgaggttaaatgtttgggtttagaaagtacgattatgatttagattttatgattaaataaggttaaatattagtttgggtttataaatagatttaaattttacaattaaacgagggtttagtttttttacgattaaatgagtttaaatgacggtttgagtttacaaagaaaaattaaagtttagatattggaattaaacgagttctatatcgggttggatttacaaaaaagtggattttaatgattgaattttttttttaatcagataacatgacaaattcaaattggttattaaagagggagtaaatgaattaggttcacctaaaggtgaacccaaaaattattcataatctattagatgattttatatttttcttttctttctctccctccattttgtttgaaattatggatttgattgctaacttgtataatagtaaaattggtgaattgacgatttttaaatgcaattcaacaagtattttatcaataaaaattatataatgttaaacaggtaaaaaacgcataactacgagtccctctgccgtagctattaaagcaaattagtatgtatgtaatagctattgaagtaattaagtaaacactacgagtccgacgttgtgatacaaacaatcccataactaaaatgtacttaggtctaagccagtaagttcatgtatataacttagaaagtggtcaatttgagcaattctcctcttttccttttgtactctaagaatcaatttgattttggtgatacaaaattaagtatttcattttcagttgtatattgacagaaataaaaaataaatcaattttatattattttatcttaacaagctcacttcagggccggtattgggctgagtaaggagtccaatgaaatatgtgcttcgacccttagattatttattgtttacaaatagacccctttattttgtaaaatagtaataagctctcttttttccctgtcgacgatttctctctctctcattaggctcgaaccctctttcactctttgtgtctgttaccaaactctacccctctctcttatccgctctattcagagaatcttttcttcaatggactttctctgaacactcaaatcgaacagagagtttaataaataaatg

SEQ ID NO: 5786 - DNA, 3000 bp, Unknown
  misc_feature (1)..( 3000): cDNA_ID_1808768_gDNA_ID_1620818_Annot_ID_50656 3000 nt of promoter + ATG
ttactcaccaccaccaccggttcactcaccgccgcctccggtttattcatcaccaccaccaccacatgtctactctccacctccaccagttgcttctcctccaccgccatcaccaccaccaccagttcactctcctccaccaccaccggttttctctccaccaccaccagttttctctccaccaccaccatcaccagtatactcaccaccgcctccaagccactcaccaccaccaccagtatattctccgcctccaccaactttctcaccaccaccaacacataatacaaaccaaccaccaatgggagctccaacaccgactcaagcaccaacaccatcctctgaaacaacccaagtgccaactccatcatcagaatcagatcaatcacaaattttgtcaccagttcaagctccaacaccggttcaatcctcaaccccatcctctgaaccaacccaagtgccaactccatcatcatcagaatcatatcaagcaccaaatttgtcaccagttcaagctccaacaccggttcaagccccaaccacatcctctgaaacatctcaagtaccaactccatcatcagaatcaaaccagtcaccaagtcaagctccaacaccaattcttgaaccggttcatgccccaacaccaaactctaaaccggtccaatcaccaacaccatcaagcgaaccggtctcatcaccagaacaatcagaagaagttgaagcaccagaaccaacacccgtcaatccatcatcagtaccatcatcttctccttccactgacacatctattccaccaccggaaaacaacgacgatgatgatgatggggatttcgtcctaccaccacacattggattccaatatgcatcgccaccaccaccaatgttccaaggatattaaaaccaatgtagtagtgacagtgttacccatttttaacatttctgtccattttttccatgtgaattatttgtatcaaacgaaaaagatattacaaagatgaaaaattaaaatgccaataattatatagtagattatctttcagcagatttttttttgttgaaattgaagtattgaactataacacgatgcgatttgttttttcggggtaaagaagttatcatttgttttggccattttatgacttctattctattatttgagaagcaaaacataaatatctatatttgtaaaatttaatatcttactagctacatatagtttaatattatacacatttaatctttcataactatgtcatgaattatttgacatttttcataagtcatgataaataaaattatgtatgaaataattgaattagggtttcatgttccaccagatgattgaacttgttctttattcggatagaattatgaaatttttatcttctattaaaaaatatattaacaaaattagatttaacatatattgatatctcattaatgtacttaacatgtgttaacaattttaaatttttttactttatataataaaattagaattttattaaaattatataatatctaaaatttgtactaaataataattcttgctgaattataatctagtttttttttttgatagcataaagattataatccgttaactttaaaaaaaaagcaagaaagggaaataaataaattattatatcctttaaagaggacaaaaatattaattatattgcgaaaaaaggagataaaaattaggtggaaaaggggaagatggtggggacgataagtttttaattagctaaccaaaaaacaaaaacacgaaacgagtcaactcaccggttccattacgagtcaaggagaaacacacattgacacgctcaagcttttttttttcaaggtcaagttggtttttttttttctttcttaaaaatatttatgttgggtcaggcttaaaccagagagagagtgtgtgtggtcgagccatttgaccaaaagcaaaaacttaaaactggtttcagatctgaagtaaaagggttttgcttcggattctccggcgtcgtttaaatgatctctgacccatcttccttggcttaataattctggtccctccttttatctctttttactgttgatttatctgaatatgccacgctctttcttccacatgtttattctctcttcctttcttcaacacaagcgtctggtaattgatctcttctctctcaaattgtgtttcgttctttttggttctgtatttggtttctgacaaaattgaggaaactggtgttgggtttgagtctagaactgccaaagatgtgattttgttttttgggtactgaaaattgagtgagatgaagtgataaagtgtcttttttttttggtaaattattcgaatggaacttgggatcggaactctgtttctttgttagggttggttgaaatctgaatctagtcttgatttttgtggtgaaatgagaggtgagtcagtgaaattttgaaatgtctttgattcaatttgacatcagaatactgctcaggttgtgtcttttgtcagatttattgagaattatcagcttccgactgtagatttgactttggtctcagtttaaagactatgagtggactttatagatctagaagcatgcgttgttttgattataagaaataaaaagagagtttttgctttaagctgtttgactaataacttgacttgggattatgatttaaccagcaaaactctcttttctccagccactgtgttttatgaatgtttgttgattccaaataatagtatgtgttgatcaaagtgaagtcatttggtcattacttggttctgagctttcagttgtttttgcacttacaatacctgatggtcatgtttgcatgtaggactaaggaaagccaacaacaaaatctggtttcaagacggttggcaggagtttgtcaaccgtttctccattcggattggtttcagatacaaagttacagtctacattttcaatttatcctccacactctgagatcaaccaccattctagtagtgaagctctt

SEQ ID NO: 5787 - DNA, 3000 bp, Unknown
  misc_feature (1)..( 3000): cDNA_ID_1829228_gDNA_ID_1620818_Annot_ID_169367 3000 nt of promoter + ATG
aacgcaaaaacttttgcgctggagtgacaaagagttggaccgatgtttgcactcgagcattctcagatttatgcgagacagctcataggatcaacagggagaaacaattggctttagagagagagaaattcatagaggatatgaagaaactcaggttgagtctccaacaagaaaaatctaataggttaagtgtacaacaagtaaaaattgcttctcctcctcctcctcgtcctcatcctccagttgaagacgaaacagaaaaggcccttagagagaaagagacaatggaggtaaaagagaaggaaggtgtgctggcggcagatgatcggacggttttcctgacgttttcaaaagggtatccgatctcggaagcggaagtaagggtttacttcactaggagattcggggaagtgatagaagcggtagagatgcaagaagttgaagcaaacgagcagccattgtttgcgaagatggtgatgaaactgcagtgtgcgtcgatgatggatgagattgtgagtgcgaggtttagaaacaagttcaccatcgatggcaaacatgtttgggctcgtaagtacgttcgcaagaatccttatccagcttcatcctctactcatttttgagtgtttctgaacttcttatttacatgttgtgcttgttgatgttgtcgttgttgttgtttatctaataaaattgtgtcgtcaatcttattattgtgctacacattaatatatgtttaaattggcgagtacaattacttttttactagttggtgttatttttatatattttgaatcatacaatgtttgagaaatataacgccggaaaacttccaagaacaaatgtatatctatgtataattaaattcataagataaaataaaaaaataatatatgattggctaattatcagtttctatatatttaattattattaattaattgatagttttttttatttgtttggtcttttgttataggatatttgatttagtatagtctgtcaaataatcaagaagatgttgtgccaacatcctccattagcatcatcgctccgaaatgttttatctaaggtcatgttacttagaatttgtgttgaatgatttaattacaaaatctacatcgtaattatatttgagttttaaaaatgtatatttttatgttgtatactttttaaaatcgacgtagcaatttaattattagtcaaaataaaaatgaaaatatgattagttcatagataactgtatcgttgtcgtttttagaatttttgttattacgtgggatatactccatccgttttaaatgaagtgttgttttagaataaatgcagttttaaaccgattaatatactacaagaacaaggtttttcttttccttcttcgatgaaaccatattggtgttaccctttcttctttggatttggattcaaaatggttttagaaatagaaataaactatcattgactcatccatctagatggaaggtcgggataccttaaataataaaacacgtagaacacgtagtaataataatgattagaaactaaaagttaatcgtaatgatcaatagtatcttgccaaggttagaacacttagatgaaagtaagcttgacacatatggtatctgtggttatgaaaaacattatgaaaaagttgtgcacatgttgaatgaagcagttgcttatcttctttcacctatatttatttaataaaatgatgataggattaagttttagggtaaaccaaacaaggatttagaaagagtaggaagattttgttttataccctaaggatgctagtagctcatgccacgatataccacttatggcgtgacaatcagcaaagactcatgtaccgatcattttcaagataattgaccgacatgtgttcgtaatgccaaaccgaagaaagtttagaaaactcatgggtttgtggcttccatgggagtgaactccagatcaacccatctcaaacttgttttgtactctatctttttggcaaggacacagttaatctttttgtataaccgctacatttcattatttatgatatttacatttttatcaaaaatgattcacgaagattaggaatatgttttcttatcgcacttaccattaagagggacatcgaaaacattgcatagaagaaaacaacacaaatgatggtttgattaagtaacaatggcgtgaacctctatagcaggatttaggctaaatctttgctgcgagtacatcatgtgacccaaatttttaaaaacgtatcaatttatcaagagtatgaacttataaggggtaagtaaatgagagataacatgtttatcagatgaaatcaaccaaagttttttttttttttgttgcttccacatgcgcatatgtgaatacgtaaactgccgacaaaaaaaaaaaacattctttctttattgcgttttctaagcgagaatgtcgatgtgatcagttaatgcgaacgggtaaaattagatcagtatttataaaaacaaaaaggcagtggaaaatctagggtttctaatattaatagccttgtaatcagcattaacttagagatatttaaatctcaagtttcattgtcaacagaacttattagttattattactgttgagtgatgactgatgaccaacaacgagtacttgatctttattgaagaacacgcaaagaacaaatagctctcgtagctcagttggttagagcacccgtttagtaagcgggaggtcttgagttcaactctcaacgaaagcaattttttaaacaaatttacattttacaaacagaaaatctagcctgtaacggaatattgtcgttgtgaatattttctttttgcctggctgtataatccccaaatatagaaataacaaaagaaatattcgaaaactttcttaaaaatagattttgagaaaagaaaaaaaatggttccttgttcctaggagaacaggaacagagttgggtgttccttgtttcatctcacattgaaaccaccggagagagagata

SEQ ID NO: 5788 - DNA, 3000 bp, Unknown
  misc_feature (1)..( 3000): cDNA_ID_1829236_gDNA_ID_1620818_Annot_ID_169362 3000 nt of promoter + ATG
cgttcatatatatgttatcatttcatgtcctcaaagatgtagcaaatgggaaacaaccaaatattgtcacaataaatcaaaaatatttgagaatggagataaatatcagtattcaaatattgtcgtttatatttttttgtcctttcattcattttcctttaatatatctaatcacttgcttggcagttaaatccgaaagcaaaactacaatatttttggggtggtttagctcataaacaaaatgaggtaaatatttagctaagatataatagggttctttatcaaggaaaaaaattaaagaaacgttacaaaaaggtctaaagttcgaaataataataagaaaaccggcatttgcttttgttttgcggttgtgataccttcgtcagttgagtttttgggcgagagaaggaatgagttgctagatatttaatgcttcaagaaatacgagctcacatgtatttatataatctccaataattgtctctatttttaaaaaaaaatataaatgaaaaatagagatttctatttttactctgatggtttctcagatagatatttatttgttagaaaaaatattaaaaaaaatagaaatctctattttgttttttttatctatagagaaaaaaataaagatgtgttggagtaaaatataggtaaaaatagagtaaaaaaataaaaatagagatgggttaaaaaactcttatttgatatgtttgtctcatgtattatgtcggaattgattcaaaactgaaaaatcgtgtgagattaatttaggcaaaatatttacattgttttggactttgtattgatttaccgtaaaactaattttttctgattcatcttctcccaaccaatttactcatatttttgtttgcactctgcaatttcctattaatgtcacacaatttattttcttaaaagtatatgaatgttagacataagaaaagcagatttcaaacaaatcttgacaatggattaaaacccttattagtttgctgtgattttcggcacattaaaattctcttaaattcgttattctttttcttttgtaaaataaaaccgcacatccatatgctaaaaacagattccacgaacatgaatattcattctgattttcttcttcttatttttttgcaattcggatgataaaacataatggatgatgtattaaagtcaaagattttatatagtgggttggttgtcgccttaggattagagtgactatgtaaaaaaaataaaaaaaataagtcaatgatactgcgactaagttcaatgaaagatcaatgagctttttattcagttattttttcttattattatttgtggtcctaattaaattttaaaatatactttttattgttttaatccttttcaattcaccaaaggtccatcattcacattgtcaacaaaagatttattgaaaagttataccacaagacttcgtaaaaatgaccaactttcctatatataaaaaaatagaatcagaatcattaatacaaattaagtacacacgcatatatatatgacatatacatatatataagagacaaatttgagctacacaaaatatctacaaatttataatatggaagccgtgattttttttttaatttataaaaatattaatttatacagcgatttgataaattttttaatttttaaaacttttctaaccaaaatcgttataatcaatatatttttaagacttattaaaagtaaaaaagaataattctgtctaaaaacataatattgttttgatgaaataaaaatattagaaatgaactctaacaataactacgacaaatttaagaaaaaccaacaataatatatagtcatatttcactaaagttaacacaattgttaatttataatatcgatgaaagtatgtatttatataacaatattctaaaaaaagtattatcttattaatttatcgaatcgtattaaatgttaaaatagcataactcagactagaattttttttttatttacagtaaaatgaatattaatttatcaaatatcaatctataaaagttatactgtataaatcatccatcacaaataaatattagtctcaacttcatttaacaggtttctaacctctccatcatattttttttttaataattcacactcacaatatatcaacacatacttataataattttgagcttctttttttctttttaaatatacaaattataatttttacttcatctactgagatctgaacctattatatatttgacgcaagtatcgaaaagttttttagaaaacactcattgtttcttatggctgattgttttttgtttacgtatatccatatatataggccttagcgttgaaccccgatagatcgtagagactacaagtaaatgttgatacccaattttttgcacgtataatataagaattattttccaattaaaccttactatttacagatgagtctagaattctctatctatttttaaaaaaatgattacgaccacaactaatatacaaacaagattcatttctttctttattttatttttatttttcaattacgacgtaaaggatgatccatgaactatattgtttgtattagagaatccaatcaaaccaatctctttggattaatatcaaattattttatccccgtatcttttacagtttcaatttagatgacgatttaagaagctgcaggcgtagcaattattttaataattacaaataaaattgagtgaaaactgtcaacagtctacttatgtgtaaaactaaataaatgaataaatcctcgaaatttaaaaataatgaagaagtcagcatcttcataatggattattataaatatacacatagatggatgttcagacttcattgagatctaagatcacttgaacacttataaaaaatattttgctcttctttctatatatttatataaaaagtcaaaatatcaagaagaggaagaagaagaagaaactcattttctccgcagagaaaatacaatccatg

SEQ ID NO: 5789 - DNA, 3000 bp, Unknown
  misc_feature (1)..( 3000): cDNA_ID_3078480_gDNA_ID_1620818_Annot_ID_169359 3000 nt of promoter + ATG
aaaaatagtagtagtaaataaacatccataatcatatgttaaagaagtaatgaaataataatatcttgtaagagatttattaattgaactatagtctcattcaatcaacgattaagacattattccttttcagcggtacaaaaaagaaaagaaaagcacgaaaatctaatattcagaaataatcaaaactaaagatctgaaaaatagctgtctgataactgtatttcaaattttgaaaataggtctataattaagttttatccgaatcttttgtttgttaagatttctgcttttcacataaaaaccccacaatccctacttaatctccattttcaccttaatatttatttcccttcaatataaaaaaataatcgtccaatagtttatcaccacgtggcacaaactaaagtattttggacaaattttgaattaatttaaaaattcaaaggattttaacaccgtaaaatgcgagtgtatgtatttgcataacagaaaagattctattttcttatcattttctcagtattttctctccgatttttccgtcgtttttctcgcttctctaaatgttaagagtgtacgatccatcacagtgaccaccacgcataaaagaaaaacactaacctccatctttttccttactttgtcttattcctttccgtcgtttcatttcccccaaaaagccatgacgaatcagtctcatgatgatgacgatgacgatgagcagcttcctcgttcgctattcagactcgtttcgcttccccaaaaaaccatgacgaatcagactcatgatgatgacgatgacgatgagcagcttcctctttcgctaaccttgggctcaacatcgtattcctctcagatccgtcctgtgaagtcaccggttcctatagctccaccaccggaattccctggacctgtgacaacgtggccaacacctgctgattttctggcgacgcggtctatggtgcctgatccccctccgccgtctcatcagatacctttatggatgagcaactattttcaacagacaccgaatccgcctcagctggttactcatttcttcccgccgtcaggtttagctccaccttcgtcaaatctaactcctccgccggtgaagagaccagtaaccggttccgttcgtatttatagatcacgatcaaccgtaagtaagaaatccgatacgatttctccgccgtttccatgggcgactaatcgccgtggggagatacaaagccttgagtatctcgaatcgaatcagatcacaaccatcaccggagaggtacaatgtcgacactgcgagaaagtgtatcaggttagctacaatctaagggagagattcgctgaggttgtgaagttttatttgacggagaagaggaaaatgagggacagagctcataaggattgggcgtatccagagcaacggagatgtgagctttgtggccgtgaaaaagctgtgaaaccggtgattgctgaacggaaaagtcagattaattggttgtttttgcttttgggacaaacgttgggtttttgtacattggagcagcttaagaatttctgcaaacattccaagaatcatcgtactggtgctaaggatcgtgttctttacttgacgtatatgggtctctgcaagatgcttcagcctaaatctgacctctttacctgtgtcgccggaaagcggtgagttaggttgattctcctatcctgggtttgattcaatttcagactacgtttggttgaatatcgtttgaactttgcttttacaatattttgtactgttgcttttaggtgatgaataattgtgagagaaatatgcaattgcattgcattgcatggattatcttttgtcgttttctgcttcgttgtatgtttcctctggactttgttttaatatctcattaatatagtatattatggtttttatatatgaatcatgaagtctataatctgttacatgtgtttatttggaattctcgattaataattgatagatattggtactggatatgattttcttttgaatgtgtatctcaactgtcaactttcattattattttttaatttgtctaaactaatttttaattatagtcgatttgaatattttgattttaaataatcgcgatttgaaattaaggaagatatttagaatgttaacaatacttctaaatctaaacgttttttttattcattctaatatgtcgcaaattcaaaattgatttttgtataacctctaatttctaaatatataaatcaaaattgtggataattctccaacttcaaaatatttatcatctctctatatatatcccataaatatgattaaattattgactaaataaattaaactgtaaatcatgtatacttgaatatatttcatatttaattgagaatggaaagataagtcagctcacaaattaccgaccctttcttcgcctaaaattatgaacatgtacgcatgtttttaactaccaaattcacaattcttgagtcaaatcttttgaaagttcaccaattgataacaccacatcgtgtcatcgttcataaactcaaataaataagatcgtgtttcaaccaaaaataaaataaaccgaatataacgtcgattttgtcagaccggttataccgatttggtctaagaacctatgagtattttactaatttaccccttcgtacatcctccacaacggacagaattatcaacccgagagcggagaagaaaagagagagaaaaaaagaaagggaagggacaaaaaaataaatggtgactcaggcgacccacaagcccttccatggctgcttcttcttcttcctctcacccagagacacgaattgaagaaatttgaattctaccaccaattttctacactcacatttatgattttcccgttcttgttggatcctacgagattttgactcgatcttcagaggcagatctgatcgcgaaaatttcttatttccagctaattttcccgtaacgttgttttttttgtttaatcggagatg

SEQ ID NO: 5790 - DNA, 3000 bp, Unknown
  misc_feature (1)..( 3000): cDNA_ID_1829251_gDNA_ID_1620818_Annot_ID_169357 3000 nt of promoter + ATG
ttctatcttgctctatgctgtctttttttgtgtgtgcaaacatatgcatatgcatatgctgtctaatgtctaataataattagttcatttaattaatatacatgtttgccaataaataccattaagtttattctatagatctctataaataagtaattccattctgaatttgcttgaggttcacatagacctatttcatagctacaaattttcaaaatatttattgactatatcagaaaaatgggtgggtatgccggcgggtatgtgattggtgcatttttatatattattgtttaaaattttcattatcaattttttttttttttttaattttctttttaacagaaagatttcttcttcagtcgattttctctcttctctctcatgaatatttcagagagcgatcgactgaactttttgttaacgtccggatcttttccggttatccaatcccgtttagcgggctatcttccaacatgcatcagctcgtattgtgatggatggttggtttgtgttcggtatcgatttgactttcacagtctcgatgatcggttttcgtcggcgttttcctgccgttttgctctcggttgttcatgaccgaataaaggttatgtcatgatggccaattttgggtcaaaatcacaaacttttgaaatcaatttcaatccctaattatcctaccttcagttttagcttctcttcccaaggccttcaaccgattgatcccaatctctcatctatgagatggccagatgggtgttgttgcggttaggcagttcttgtagcttctaccaacaagaattcacaatcagatttggatcaagatctgaaaggtctatttctgcttatccggtcttctgtcgagtaagtctagagatacatgtgtcaacatatcattgatgattccaaagcttcatcatcaaaggttcatcaagttgggtttgcaagtagatgttttagggggtgttattggtttgtgattttgaaagagttttaatgacttttaaaagatatagaatccaaaatcttgtaaagtctttctagaatcttgtaaaatcttcctgaatataattataaactttgatttgtgatttctccaaaattataacatatctccaaaatattgtatactattctctcctcttctataaaatctatctccaccaaagtgaaaatcacacgcataaacacaataactatggtattcgtaagtaagctacatgaacatggaactatccatgaagaacttgaagttttattttcaaatattttgttggatatttacttttcatgtgttggattaaaatgctttgttctaaaaattgtttgtgtgttaatttttcacaaagattatagaggagcacgtgtgggacctgagccataatatatatacagtaaaacctctataaattaataatgttgggaccttgaaattctattaatttatagaggtattaatttatttataaaataataattattaatttatagagaatttaggttaattttgtaatttttttaaaaattatgtttgaaataattttattttatttataatcattatctttctagaagtaactgcaaataaggataaattattgtgtccaaaaaacaacaaaaaaacagtttttgatgtagtaaaaatattaaaattgaactttactaaaaattagtataaattaataaaagtaaaataatagcagattcatatttcactaattttcttacatataacatatatatattttaagaagttcttacaattattaatttatgatactaatgggaccatatatttatataagattttttaaaaaattattatcttattaatttatcaatttgtgtcattttttacactggtcccaactcgggaccagaagaatttattaatttatagaggttattaatttatcgaatattaatttgtagaggttatattgtattgttcattactgttaatgagatttctgcatctgttcgtatcattggtttttgtttatatccaaagtcatgattcacaatctctctctttttatgatacttttcatgattttaatttgtgaagaaaagagtataaaatcataatccaataacacaaaattttaaatcattaacaatcatgaaaactgttgtttaagttaaataacacaaaatttgtaatgactttattagagtatgaatccaataagttcagatttataaaaaatttagattatttttttacaaatcaaaatttaataacaccaaaagtcttataaaatcttaattaaataacaaaagatttttcataacattttgtcactaaaaatccatataaatcacaaaccaataatacccccttaatttcttaagtcgctttattaactagggaggacgagtagatcagagttttccggtggtatggcgagttccgtcatcaacagcaaaattccgttctcggaaaagaagtaattaggtgttcagatgcttttcaaaggataattaggggttaattactagattttgcttgtttaattattgttttgtgcctgtaattggtatatgttttggtactttcggtttgtgttttagtttcgaggaattttcgttttcgccggcgaaatatccggagatttacatgtgttctccgatcaatatcgttgtatttgtgtttctcttttttcgtttgaaggattgaataaaagttacttcctttgttccttttagtttgattgtttagaaatttttttttttttaaaaagattgactttttaagtttttcatgcaatatttattagttaatattggtgaattgtaattttaaaaaagaatagttaattatcattagtttaaagttataaaaaactgtaaaacaataaaaaataatatatttataatcaatatttaatatgttttttttttaaacagttaaaaaaaaaaaagagaggaaatatattgtaaaaagaatgaaataatatttttaaccgcgtagtgcgatcatcttctccggccctaata

SEQ ID NO: 5791 - DNA, 3000 bp, Unknown
  misc_feature (1)..( 3000): cDNA_ID_1829259_gDNA_ID_1620818_Annot_ID_169352 3000 nt of promoter + ATG
cggaaattggtttttgaaccggtttaaatgtgaaacccgtttggatttttgttttgtttttttatctcatcttcttcttcagaaaaacacaagataacagaattgccaccaaagctccatttttatccccacacagaagaagcttggggaatgagaagataagagctctcaaaattccccgaatttcgaatatgattgtaacactaaaccctaagattctccatttctccaaaatccatcctttttctcgaccttcttcgtatctctgtagaactcgaaatgtgtctctgataaccaattgcaagcttcagaagcctcaagatggtaatcagagaagtagtagtaacagaaatctcacgaagaccatttcactttccgattcagcaccgccggttacggaggagaccggcgatggaattgttaagggaggtggtaatggtggaggaggaggaggagacggaagaggaggattagggtttttgaagattttaccaagaaaggttttgtcagttttgtcgaatttgccacttgctattacagaaatgttcaccattgctgctctcatggctcttggtaagtgttagggtttttgtagatttgaattggtttgttgcattagagttgagaaaatgattaaagtttcatctttttagggactgtgattgaacaaggtgaaacccctgatttctatttccaaaagtatccagaggataatcctgtactagggttcttcacttggagatggatttccacacttggattggatcatatgtactctgctcctatttttcttgggatgttggttcttttagcagcttcacttatggcctgtacttatactactcagatacctttggttaaggttgcaagaaggtttgttttagttcctttgttcgttttgtaactccttctttctactgaagagcactaagggaactttggcaaattgcagatggagttttatgaagtcagatgaggcaattaaaaagcaggagtttgcagatactcttcctagagcttccattcaagacttgggaatgattttgatgggtgatggatttgaggttaggattagttttctacttttcaagttcttttatatgtgtctgtgaggtttgtcttggtctagtgatagtaatttttcagtttgtttgttctgcaggtgtttatgaagggtccttcattgtatgcttttaaaggtttggctggtcgatttgcacctattggagtacatatagcaatgcttctgattatggtgggtggaactcttagtgctaccgggagctttagaggctcggtcacagttcctcaaggactaaattttgtcatgggagatgtcttagcaccaattgggtttttctcaattccaacagatgcttttaataccgaagttcatgttaatcgattcaccatggattattatgacagtggagaagtgagtcttttgttttgcttccctgttctctcattttgtcttcatgattgcaatgtcttgtgattaaatagagttctgtttgatttatcttgttttgatttggtgtaggtctcacagtttcactctgatctttcactacgtgaccttaatgggaaagaggttttgagaaaaacaattagcgttaatgatcccttgagatatggtggggtcaccgtataccagacagattggagtttctcagccttgcaggtgacaaaggatggtgaaggaccattcaacttggctatggcaccaattaagatcaatggagacaagaaattatatgggaccttcttacctgttggtgatactaatgctcccaatgtcaaaggaatgtaagaaccctcttacctttgacgaacctttctttttgattaagccaaaggagcgtataacagatgaaacagtttcttagattcttggcatagagatacattttggtgtcttgtattggccttaacgttgctccagttgagtttttttcagatctatgctagctcgggatctacaatccattgttgtgtacgatttggacggaaaattcgctggaataaggagaccaagctcgaagcttcccattgagatcaatggtatgaagattgttattgaagatgcaattggaagcactggccttgagttaaaggtaaaaagactttataaaatgtcacagggcacaaaaaaaggaagagttatcctagtttgtaatattatatgacatctttgttcttggccttgtttctcagactgacccaggagtaccagtggtctatgctggttttggtgctctaatgctcacaacctgtatcagttacttatctcattcacaggtaaaagtaactctcaaaatcgatatccgatcaaaaagtcttgttttataccaatgtgtcccattggcattttgctctactagatttttgtctttcatcatctaactcttttcttttttttgatattcaatctcttatgttctgtatgaagatatgggcactacaaaacggaacagcattggtcgtagggggaaaaacaaacagagccaagaaccaattccctgatgacatgaatcgtttgctcgatcaagttccggagttaatcaagaagaatacttcagttgtctctgagcaatcttgattagctcttcgactctgatacatttcaaaccaatatagttgtacagaattatggaacaggtatagttttggagaacacatacacactctacatgttgctaatcatatgggaagagagagtcagagaggagctataaaaactgaaacttcaaattgatttgtatggaagttttgtttgaagagtcttagcttccttgtttgtcaagttatttgatctgtatctgtaacttcagtttcctatgtttttagtcgtagttcaaaatttagaagaaaaaataataataatttgccgacaaaattaataaaataatgccaaaccgacgacaaaatcaagattcttgtctgttgtcccaaattgctcatcaaattcaagatcctgtaaaatcagtagcaaccatg

SEQ ID NO: 5792 - DNA, 3000 bp, Unknown
  misc_feature (1)..( 3000): cDNA_ID_1829266_gDNA_ID_1620818_Annot_ID_169346 3000 nt of promoter + ATG
tggtttcgatgagcttaatagctccacgtcctttggaacagagtttgtccatcactttctcaggactgcagcaaaccactttgattgtgaccgtgttggtttcttcttcgaacttttggtctcttacttcttttgttttcccaaaaaaatcacataaaacaaattattattatgagtttttaatttcaaaccaaaagagacgtaaaaggagagaaagatataacaataacatacgaggtatgctcgaaagagccttcttgactttcgagaaattcttttcgttactaagaggctccgtcttcaatttcatccatgttacctagtttaatttcatcatataatgttctcatagcttttaatacaacttttgtaacaattagtagtaacggtttcaaagagaagcacaaaaaagaaaaagaagagagcgtttatttaccttctccttacccttctcggccatggctttgaaaagaaaaatattttcagtgtaattgcttgtatatactaacactactatgcagctatgctatatatttggagtttcacgagagggtttccaaggaaaaagaagttgaatattgtacaatttacttttctcttagaatgtataatttccatagctattattccatattacattgtcctaaaacaatgtaaattttcttttctttttttgtttaaagtttttcctatcttgtttttttagttgaaatttcaaatttccttttgttaacaaaaagaaaatattaccaaaaaacaaatgatggggcttagtgggggttctaaagagagaaacaaagcatagttctattcttttggaagaggactaaaccctgctgtttttttcggagcgaggatttacgagttttggccaagaactttcggttttttttttttttttgaatagtcctagaactttcggttttttaaaaaataatactaatgtaatagaaaaaaaatggtgtttcttcggagaaaaatgacaacgggtggcaaaccaccttcgaagctatcccttgagcatgtgcacgccagtgtacttaagtgagacattaagttccaaatcaatgcgaacgagctgagaggaggagatcccattacgactgtgtcgactcaaatttctcttcttccataagtaatagatcactgattggaaccaccttgtgatacaaaacattataatcccatttgatgtattttacagagattagatgagaaaccgtgtctgaccaatgatagtcggctagaatgtgaatgtgtaagaacacacaaaacaaaataaaccttggtggaaaaattattattcaagcgttaatcgtgagaagaaaataatattctttcttaaagtattgtgaaaacataaacttttcaaaatctaaaatatgttaaatatttatttgaatttactttgtagtttaaccgtgtaaaaactttttacctataaaaaagaaaaaaaaataatagggataagttttttttatatatacccataataattaaaacatcgttcaaatttggatattttccttataaaaagttaaagaaaaagcatgtttttgtaaatttaattcatagaaaatgtctgaaattttccattatttataaagattatagattcgccgaaaattaaattgttaaggctggggaagaattattgttcacgccaacaatcacgttatgacataagattcgaaagttagcgttaaatttgatgtttccactgttaccaagcaaaaaaataaacatgtcaaacaaaagaaaatggactacaaatttgatagaaaaaaatgtgaataaaataactgtagtcgtttatttacttagagttgtatacatattgactaaacacaataagaaaacaattttatagaatactataggtcttaaaagatagtatattttattttcatttgatgaaattacatatttgactatgtttctaattgaaaaaaaaaaaatttattaaaatatccataaaaatgaaatgataaaatttattaaaattaaatgggctgaccttgtaataatatagggagcaggtcggagactcagagagtgagcttttcttgctcgtccatttattaataatttcattaaagagaaaatctgtagagttgacactttttaaagtctaattattagggatatatacgtaatttggtttgaaaataaatatcaaaatctagctaacttgatatcagtatgggtaaaagataggagtaccttttgttgttgatttaattgacgatctagtgttaacccagagaattctaattagattagcctctttctctcatccgaaagttgaagtttaataagttaatctgatatttgtaaataacttgaacagtaaatcataaacaaagaaaaactgatttggttgcacaatttaattagtgaggtgaggtctatcacaatcactggttactatagtgataaagatcctgattatgacagtgactgtgagctggtgaggtctaagagtacaaaaacaaatgatctaagttatcaaactataaactatataattcgaaatatattaattttgttaaatccaaaaccaaattgcatgcaaatggtcagtttgtaaatagtctacgtttggtccaattactctttactcttaaggttctttactatattcaaacccactaaatctacttgcatataacacatagagacacaaaaattagtatttaaaacatttagataacaaacaaaagaaagagaggctcctaataaaggcgcaattaaaaaccggtcagaaatacaccaattgtgagactcaagaagttattgctcaactacttcctctaactcataaccacaatctccaaacttcaccaccgattcacagagacttttattaaccttcaaaacattatttattattccaatcttcaaagagagacactcacactccttatcttcttcattcctccatcctatttttcttcttcgccaaagtgttattcctcaactttatatattacacaaatg

SEQ ID NO: 5793 - DNA, 3000 bp, Unknown
  misc_feature (1)..( 3000): cDNA_ID_2992566_gDNA_ID_1620818_Annot_ID_169341 3000 nt of promoter + ATG
ttggttcgcctttcgaatctaatttttttttctttattcaaattatttcaaaatacaattatatataatttattttttgtttgaacaaaattttacatttattccgaaaaaaaaaactatgcaaaagaaaattttaatccaacttctcatcatcctcaaaataatgataacaatatatccgcttcattagtaactgtaaccttcttcgatcaaacaactcatctgcaaagactagactatttcatttatctaacattaccgttaacaaacaaaaaacaaaaatttacttgggagtcgaagaagtcaaatatctagaagaatacttcttcttacaaaattataaggaaaatttcccctactgcttcgagaaatacctttttccccattcacgttatgttatgcaacgtgtgaggataacgagcggacaacacagcccttatccttattttattggtcaaccaaccccaaaacagattttaagacggagtgtatttcttttgtcaactgtttacatgggttaaataaaacagtttcactaaaacttattaaattatcatgtcatattgtcatgtatataagctatagcatatatacggatggaatatcgattaaaccattttctttttcaccattggaccataatcagataatatacatagattgggaaccccaaatattttcacattttgacatatttagtagcgacattaaactacttcgtgaaaatacataggatattatgtcaaattgtcaacgaaactttttatatttaataagaaaacgaaattaaataataattaacagaaaatactcacaagtgactttcaatgattttgtctctaacgttttcaatgtttattttttggtctctgactcttcaaggaaactggtaaaaccggtgtcccggtagtcatcactcacatctcgtccaccacgtgtcactcttacacgttcataagttttcccacctttctacgtccgattctgtatttatataccctaaacccatcgtcttctatacatgctcttatttcacaatcccaccaaaacaaatctcaagaacatttcaagattcagaaaaaagaaactcgcaaacttttttcttttgtttctgtcaacgttcaaataatcaagcgattgttttttttaacctagaaaaattatggctatagaagaaaaccgaagtcacaacgattatcttaggaggatgacttttgcagcgttcttgaaatctggttctctcgccgccgaggaagaaacttaccacagcgacggtgatcatcataaccaaagcacctttagcagcaacagcgattctcagcggccaagcaacgcttcaagtgctagtagcgattcgtcatcaccaatctacccattatctccatggaaccaaacttactacccaagcaacgacaacacgacgtcgttttcatctgttactcaatcaccatggaaccaaacttactctccgtaccacaaatctccatggatttaccaaaccaggaacagtgatttcgaggatgatcctgataacggtttgatcggtacggtcgtgagacaagaaggacacgtgtactctctcgctgcttcaggtgatcttcttttcaccggttctgattccaagaacattcgggtttggaaagatcttaaagatttctccgggtttaaatccacaagcggttttgttaaagccattgtagtaaccagagataaccgggttttcaccggtcatcaggatggtaaaatccgggtatggagaggatcaaagaagaaccccgagaaatattcacgagtcggaagtttaccaactcttaaagaatttctcaccaaatcggtaaatcctagaaactacgtcgaagtccgtcgccggaaaaacgttttgaagatccgacatttcgacgctgtgtcttgtctgagcttaaacgaagatctcggtttgctctactccggttcttgggacaagactcttaaggtctggagattgtccgattcaaaatgtttagaatcaatcgaagctcacgacgatgccgttaacacggtggtttccggtttcgacgatttggtatttaccggttcagccgacggaacgttgaaagtatggaaacgtgaggtacaaggcaaagagatgaagcatgttttggtacaagtgttaatgaaacaagagaacgcagtaacggcgttagctgttaatttaacggacgctgttgtttactgtggttcgtctgacggaaccgttaacttctgggaacggcaaaagtatttgactcacaaagggacgattcacggccaccgtatggcggttttgtgtctcgccaccgccgggagtttgcttttgagcggtggagctgataagaatatttgcgtttggaaaagaaacggggacggatcgcatacgtgtctctctgttttgatggatcatgaaggaccggttaagtgtttagcggcggtggaagaggcggaggaagatcataacgacggagacgacggtggagagaaaggggatcaacggtggatagtgtatagtgggagtttagacaactccgttaaagtgtggcgcgtgacggattacgcttcgtaagcgcgtgaagaagtatacgtgtggacgacgtaggagcgtgaaggaatgtttcccggccatgtggttgtatagcgttttatcgtcaaaggaggaattgattgggaggcaactagtaggtagatttggtacttgtgatgaccaatagtgtattgtcacgtatcatgtgactttgtcatcttctttggaagtgtgaaaaagtcttttgttgttgcgttagatcttttattgtctcttgtaatggcatgcacttattttaaatcatgtgaaactaaaagaggaaagaaggtggagaaaaaaaggaaagtaaagattccgctacaatgagaaacaaaaaaagatataagaaatgtaataaatgtgactatgtaaaagttgtttgttatcgagtctttattctctatggttgttgtcaatgttgaatg

SEQ ID NO: 5794 - DNA, 3000 bp, Unknown; identical to SEQ ID NO: 5786
  misc_feature (1)..( 3000): cDNA_ID_1808768_gDNA_ID_1620818_Annot_ID_169339 3000 nt of promoter + ATG

SEQ ID NO: 5795 - DNA, 3000 bp, Unknown; identical to SEQ ID NO: 5785
  misc_feature (1)..( 3000): cDNA_ID_3078447_gDNA_ID_1620818_Annot_ID_169335 3000 nt of promoter + ATG

SEQ ID NO: 5796 - DNA, 3000 bp, Unknown; identical to SEQ ID NO: 5784
  misc_feature (1)..( 3000): cDNA_ID_3078455_gDNA_ID_1620818_Annot_ID_169332 3000 nt of promoter + ATG

SEQ ID NO: 5797 - DNA, 3000 bp, Unknown; identical to SEQ ID NO: 5792
  misc_feature (1)..( 3000): cDNA_ID_1829266_gDNA_ID_1620818_Annot_ID_50662 3000 nt of promoter + ATG

SEQ ID NO: 5798 - DNA, 3000 bp, Unknown; identical to SEQ ID NO: 5791
  misc_feature (1)..( 3000): cDNA_ID_1829259_gDNA_ID_1620818_Annot_ID_50666 3000 nt of promoter + ATG

SEQ ID NO: 5799 - DNA, 3000 bp, Unknown; identical to SEQ ID NO: 5790
  misc_feature (1)..( 3000): cDNA_ID_1829251_gDNA_ID_1620818_Annot_ID_50669 3000 nt of promoter + ATG

SEQ ID NO: 5800 - DNA, 3000 bp, Unknown; identical to SEQ ID NO: 5789
  misc_feature (1)..( 3000): cDNA_ID_1829243_gDNA_ID_1620818_Annot_ID_50671 3000 nt of promoter + ATG

SEQ ID NO: 5801 - DNA, 3000 bp, Unknown; identical to SEQ ID NO: 5788
  misc_feature (1)..( 3000): cDNA_ID_1829236_gDNA_ID_1620818_Annot_ID_50673 3000 nt of promoter + ATG

SEQ ID NO: 5802 - DNA, 3000 bp, Unknown
  misc_feature (1)..( 3000): cDNA_ID_1379064_gDNA_ID_1620818_Annot_ID_50674 3000 nt of promoter + ATG
ttcatcgaagaaggaaaagaaaaaccttgttcttgtagtatattaatcggtttaaaactgcatttattctaaaacaacacttcatttaaaacggatggagtatatcccacgtaataacaaaaattctaaaaacgacaacgatacagttatctatgaactaatcatattttcatttttattttgactaataattaaattgctacgtcgattttaaaaagtatacaacataaaaatatacatttttaaaactcaaatataattacgatgtagattttgtaattaaatcattcaacacaaattctaagtaacatgaccttagataaaacatttcggagcgatgatgctaatggaggatgttggcacaacatcttcttgattatttgacagactatactaaatcaaatatcctataacaaaagaccaaacaaataaaaaaaactatcaattaattaataataattaaatatatagaaactgataattagccaatcatatattatttttttattttatcttatgaatttaattatacatagatatacatttgttcttggaagttttccggcgttatatttctcaaacattgtatgattcaaaatatataaaaataacaccaactagtaaaaaagtaattgtactcgccaatttaaacatatattaatgtgtagcacaataataagattgacgacacaattttattagataaacaacaacaacgacaacatcaacaagcacaacatgtaaataagaagttcagaaacactcaaaaatgagtagaggatgaagctggataaggattcttgcgaacgtacttacgagcccaaacatgtttgccatcgatggtgaacttgtttctaaacctcgcactcacaatctcatccatcatcgacgcacactgcagtttcatcaccatcttcgcaaacaatggctgctcgtttgcttcaacttcttgcatctctaccgcttctatcacttccccgaatctcctagtgaagtaaacccttacttccgcttccgagatcggatacccttttgaaaacgtcaggaaaaccgtccgatcatctgccgccagcacaccttccttctcttttacctccattgtctctttctctctaagggccttttctgtttcgtcttcaactggaggatgaggacgaggaggaggaggagaagcaatttttacttgttgtacacttaacctattagatttttcttgttggagactcaacctgagtttcttcatatcctctatgaatttctctctctctaaagccaattgtttctccctgttgatcctatgagctgtctcgcataaatctgagaatgctcgagtgcaaacatcggtccaactctttgtcactccagcgcaaaagtttttgcgttgttggttgatcaatctgagagtaaactttcctccagtaatacgtaagagcaatggtatcatggagttatcatcgttgtcagcagcgaagaacgttgatgcaaactctacgttgtataacaaatttatacacacaccgatttcgttagccaccgcgtcgacaaaagcgtttggtaacgagacaaggtacgcgattatgtcgcgggcataactggattgctcgaggaacaagagaaaacacatggctagaaacgactggtcaacgtctcggtttagattgaagacaagacgactgaacaaggttctgtcgattgtgtgaaaagcattgaactcgtctcgtgtcaccacaattgaagataaaggattgtttaagacagacggatacaaaggagaagccatgactgattttttatcgatatgtggtggtgatgggtgatgttatctatgtgattagagagggtttataaagagaatccattgaaatgttgaaaaggtgtaatcatatttttccttaataatttgtatttcattcctaaagagtttttgtcctcgttcatgtatctaattaattacatacaacagtcataaccttaaagaggcttggtatcgttttggtgtgagacattgtgacccttggatcatcatcattcttcacccataacccttcgatcattatcgtcatctatcacccttccctaacatttttgtttctttatgaagggagcctaaattattaagtattactattttctgacgctttactgtttttttttaaattaagataaaatatacagggtcaaacatttgataaggatattttaatcttgtcattaaggaaaataaaatatttgactacagtataatctcgatttaattaaatatattaattgtacatcatttgatttctccaaaataaattatatttcataaaggttttgtagtcaaaaatacttattttttgctaatagttaactgtatttttatttatttttataatttaagaattaaattttttatactttttcgtatatttccgtacatttcctatcttttaagttatttacattgcgttaatataaattaaaagaagaaatttagtagttagttaactataattataaaatggtaaaaaccgatatttgataaaataatatgtcattgaacgaattagcaaatacgtatcgtaaataaaatgtgtacggctccgtactgttttgataaataaaataatatcaaacaaaataatattatttatttaaaagtaatcacaaattttttattaaatctgaagataaaattctggataaaccataagattctttacctaaaataaaggtcaaagttttagtatgaaaataaatagaaatgttctgtataaggttaattagttggatatactgatatacatacattttgttaaaatccataaatcatcaccactaaatatctttgaaaataatattataaaaaaaaatgacaggtcagcaacagtataatcaagggggcagagaagaaagaaaataatcggaaacagcgtcttctccataaacccagaaaatcgcagagagctttctcttgtctttgtacagatctctcccatcatcgttcgtgattcgatg

SEQ ID NO: 5803 - DNA, 3000 bp, Unknown; identical to SEQ ID NO: 5787
  misc_feature (1)..( 3000): cDNA_ID_1829228_gDNA_ID_1620818_Annot_ID_50676 3000 nt of promoter + ATG

SEQ ID NO: 5804 - DNA, 3000 bp, Unknown
  misc_feature (1)..( 3000): cDNA_ID_2041423_gDNA_ID_1620819_Annot_ID_169380 3000 nt of promoter + ATG
ttaagttctcactccttctgtatccatttcatctcatctttctttgctggtttaatattaccaaagctgctttcagaaaacgaagaagcagagtacaacaactggactcaggacctgcaataacatattggcaatgacaaaggtgaaaaacagagccatattttcttacctctttatgtcccttgctttctaggtaacttgtatatatctgtttaataaatcaagggtgttagccaatatgactgtttggtatgttacagggattgcatgcaaaagcgccttcatttatcggaaacaccagtgttactctttcttggaaagaacccacgaaagtgacgaaaccgttagcctctacaacgactgggtacaagccaaatcaactttgttagttttgcaggtttcttttcttgttttgcaaatgtggaaaaactaatgtttgtacgtttcatgtggctctaccacagaggaaaacggcctgcaaatggagccggtaataacgtgggtgcaaaaaaggctcgtgtgcagaatcaacaacaggttgtgaacaaaagatctgagggaatctcacacggtggtggtagaggcagtcacagaggccgaggccggggccaaggtcagggaagacacagtggtggtggtggcggccgtggccgtggaagaagaggcttctggtaatttcaaaggattctccatgacactcttttttgtctgttcttgtataacagagtatgtttatccttcttgttttggctcttttaggctcctaacattcgacaaacaaattaatctcttttgcgatttctttggcttctcctttatatgacaaattctttgttttcttttctctttaactaccctttctgggaagtcaactgtcctaaactcataatgcaatagtcagaaatgattaatgccaaagtaacagtaaaaaatattaatttataaataaccccttcaaccttctctgtatttatcaacttaatgtcactccatgttatatattcgacaatgtaactctgtgtttcaacgcccatgcatccttccaatggcacaacttgttctgtccctgacttctctctttctagcctctaatctttaaatgatctcatgaaactggtgtgtaacttcctacagaatccaacgaagccaagcccagagctattaaagagacttggtgagtacgtaacatgatggtgattctgttttgtggtttctgcagatatatgaccttcttcggattatttttcaatctgcagaagcaagtgtggaaacagatcatgcttctcacattaattcctttcctcattgtgaaactttcagagctattcgattcacgatcttggagacactattgttctaatgacgctgatggctgatagtttccacttctgcaactcttttgcttttggctctttcggtatacatatgtacataactttatagctttactgaattaagttcaagattttgtgtctaatctttgacatattatgaatctctgaagcttttggatacgagtggactaaagaatagcttggataagcgaggatttagctcatgtccgaagtgaaaaagaaactgcagagagatattcgcttgaacgcattctgcaagatggacaactcactagggaaagcttgaaaaagtaaaccactgatcgattgttttgctctggttcttgctttggtttttaatagaaaactaactgactttttacaggctaagggaatcacttgcgctgtaagtttttaaaagaagaacattctttctgttccattgctcttactggttctcggtttttaactttcaagagactaaaaactgctgtgtaggcggcagctgttgctccgagtctgaaggtgggaaagcagaacaaaagtgttggttagaaacataaataacgctttgtctagaaacctaaagaacgctttgtctcttcacttctgtgccaaaaaaagaaaagcaagaaacagcatctctcacattttcacaggtacacataatcattgattcaatcttggttctttagattttttctttctttctttcttgttgctgaatcttgaagttttcgggttcagatctacagggatgttacattcaacaatttgatggggatgtcgagaatcttagtgatagtgtacgccaaaagattgacatggaattgttcaacagagaaaatcttgattttgtttccctgcttcttcctttgtatcatatcccttcaatcattgtctttactacatttcaatgtctcacattgtaaaaggaaaaatgtacagagaagataaaatcttttgacatcgatacatagttatctttctatgcaagtaactctggtacagtccttgttctactaaacaagtatacaagttgtattttctagttccataactctgataaaacaaaattggccttggtgtctacattgacgtttaaagttgtataatgaacattattgatacacatattaaactagaaaattagaagtttgttcaaacgattttaaaagtcaatataatagtcaccaaccaatcatagatgcataattaaagaggtgtcaattcacgttcttctaaaatccagcctcagcttcatcaattttataattttaccaacctcaacaagtatttatttattctaatatatgataataaacctcgagggatattatgataaaactatataataatcaccggcttataataattagaaaggtggaccatttccgttttttaaaatcagactcaataaatgtgaaagtccagtgtttcaatattttaacctcagtttcatcaattttatataccttattgtctttcattattcttttacgtaaaacccttccaaaaatcatgttacattgcttaatttatgtgtgtgtgtgtcagtgtattgcttaatttatgtgtgtgtcagtgtatataaatatatgcagcgtaagaagagaaggatcagaccaaaactattgacttaaaacactgtttcaagtttacttcc

SEQ ID NO: 5805 - DNA, 3000 bp, Unknown
  misc_feature (1)..( 3000): cDNA_ID_2041419_gDNA_ID_1620819_Annot_ID_169381 3000 nt of promoter + ATG
atgacaatatggttttggtcacactcatattctctggttctgcaactgttctctactttgtttatttggtaatgattcacaccttcaaaaaaatgatgtaaagcttcaagattcatatctttttgtgcctaatcttttttttttcaaaacccgcagtattttgataaagcggaccaagtgaagagcctagaatacgcgaagtttgagctcatgtcagaagttcataagcacttgcagaatttttcgcctcaaagccttataagaaatggacaactatgtcaagagagcttgaaaaggtttgtttctacattttttcctttgttattctaattttaagaaacgctctttttatttgattctgtttctgtattcttactggttatttttattcagtttgttcaaaaagtttgatgtcaacaaagacggaaagatccaagtatcagagttaaaagatctgacagtggactttggggtattagggagagtgaagtgtgatataaatgagcttgccactactttgcttgctgatttcgacagtaatagagatggtgagatagatgagactgaattcgccattggtatcgaaaaatggctgaaacagtacaaatttagcttcaatggcaccgagtcacaaggagaggacatagccgtaagtgcagcacaatcttctcataacattttttacatgtttgatcagattaagaaattgggaagtgttaactgcaggaggatgatggagttttgaaggtggaacaattactaaagggatgtctttttactaagttgcttacaaagagaaccttgaaagctgtcattgaagtcattatagggattactattgtcagctttcttgcaatgcctttcatgatgaatatcgaacttttgtcggtatcagctggagtgccttccttctatgttgtctttgcagtgatccctttggcaagaaacctaaagaacgctttgtctgctcacttctgtcgcaagaaagagaaagcaaaaattacatctgacacattttctgaggttagttttcttgaaactcacgtttattaactcggtatcaatattacccttatgatctttatcagagctcaaaggtgaatgagttttgtggttcttttcttttgtagatttatagagatgttacattgaacaatctgctggggataacaattatattggcgattgtgtacatcagaggattgacttgggattattcaacagaagttctcattattgtgatcgttggtctcataataggtgtaccggcctatgtgagatcgacttatccattttggatatgtgtcttggcctttgctctctacttcttctctcttatcctaatctatctccattccaagtctacctttaatgaataatcagtgaatatttccaaattgtttttttttttgctttcaagatttcatagttactattccgatttcgatacgctatgtattttgaaagttccgtcgacgttttatgtatatgagctctttgatgattgttaagcatccggagctagataagaattttaaatctttgatgttatgaatatctatgaaagtttgcagaaattgtgaaaatggacgttcaatgttgacactaagtaaggaaactactatacaagtttgcattctcacttggagacatttcaacgttttcagataatacttttctcaaaatcactattcagaaatgaatgttgaattcatatctgttagctataccaaaagaatatgaatccaaaaaaaatcaagttctaccatataattgacacacatgtgttgaactagttgattctgtatttctttattttttccaacaaatgcatttttgtttttatcagcgaaagaatgtgaagtacagtaaaacctctataatcttatgatcgtgaaattttattaatttatcgataaattagtatttattaatttatagagatatttgactaattttgtaatatttcaagatttttctttgagaaacaaagttttttcattataatcaaatatcattttataaccaattacaagtaaaaaaaatcattattctgtttagaaaacatcataaaaagttttcgatgtagtaaaatattatagacgaattccaccaaaattaaatgtaatttttttaaaaaataaataatactagagaatagagtcctattaatttatgatattgatgataccatatatttacatagaattttcggaaaaactattatcttattattttattaaattacattaaattttacagtgatatgattcaagagtgaagaaatttaattaatttataaatgattattaaattatcaaagttttgtatttagatttttactgtagatcatcaatcgtcaaacattccatgcctaaaaattaattttccaaatattttcacgaaatgttaatggtagacatcacatcgggtgcttatgtaaacaaagtcctccccattggctctatgagcctttctaataatataagttgttgacaaaaaaagaatgacatcggctgcttttcacgcaagtaagggcattgaatacgcgttgtggtctattgtgcaactgtattttgacgtcagttcctatctaatatttggggttaaggtgatgtactggagattccacacctttaaactaagcacactagttcttatttaaaccaaaattcaaaagtcaatagtccttaacaaatctatctatattctaccccactgacccggccaatcataattagagaggtgtaactcacgttctaacatttaacaataattcagaaaacaaagtctttctttatttactaagagctagtcgtaataacttgttcaactctagaaagtctttcttaattctattacgtaaaaactaaacagtaagaaattgctatagtaagattatgtttctgttggtttctgtgtatatatatatatgttggagtcagaagagacaaatacaacaaaagtgctcattataaacactgtttcgagtttacttcc

SEQ ID NO: 5806 - DNA, 3000 bp, Unknown
  misc_feature (1)..( 3000): cDNA_ID_3078515_gDNA_ID_1620819_Annot_ID_169385 3000 nt of promoter + ATG
cactggtacagagaatcagttgtatggaatgttattgtcttgttgtctggtacaagttatcaaatagtggaagaagactagtctaggaaagcatcattcgaaaaattatgttcattaaggcatacaagtatgtttttctaccattttagggtacttaaacttcgggcactgctcgataaaagcaggtggtctttcataagtcacagatgcagctctgatcaaaatcccagcagttaaaccccatatcatataatccttatctcctgttctgtagtcaaagtaatggatcaaatacttttcacccatccactctctctcttcagatcttcgattctcatcctgaaacaaaaaaaaaaaggttcaagtaatgatgcttgagaagggaaaaaacacaactacagctaaagtaacttggtaagaaaacaagagcaaccttaaggaacatttccaagggtgcatcaaacacagcttccacttccccaggatttggtatcggattgaatttatttttgtccctcaagatgcctatcacaggaattactctaagaagatgctgtaagacaatgacgcacatgtaagaaaaatatctatcagaaatgttgacataatccagataacattattcttccgaattaacacctagtcctacttaagaacatccagaatcaaaactagatagcgatcaagaacgtcactttagctaccagatctctgctactatgatataatacagctgacatggaagttcaataaccaaagttctatagaaccactagtaactcatactataacctcgatgttcaagcacagatcaacaagatagtctatataacctcaactttaatgccaatcccaaattctgatctcactaagagcatgcatcaccaccaataagacatggagaattaacaccatttattaataccttagacagaaatggttcaagagaagtaacaacatcaacaagagaagggtccaatccaatctcttcctcagcctctctggtagcagtcatcccatcatctttatcatcctcctccgctttaccacctggcaatgaaacttctcctgcaaccacaaaaaaaaacaaccacctcaaattcaacactaaaccatactcattgaccaaaatcaaagaagccaatgatttcaaagtaaaaagacgaaaactttaaatcgcaaaccatacgaaccagagtgagtagacaatttggaagatctcttagtaagaataacacgcaaatcaccatcatctccttcaaagagacagatcaacacagcggctctcttgggtttaaacctatcagggtctttcgaaagaggagcaatagattcctgaaacccaacctgagaaacgactttcccagcggtctcctgatctgtctgcatctcctcggagtcatcgaacgatgaagaaggtgggggcttgtattggcgaagttgctgggctaaagcggcgagacgagaagagccaccaccgaaagaagaagaagaagtcgctgttatcgcaggctccatagatttgcagagaagggttgttgttgttgttcgtgcaaatgaaggaagcctacgataaagcaaaaacatgaatccgatttgcggaaatggattctgtgtagatcaatcatatgatttcaaagaagaaaaaaaaaactcaaatttaattagacaaaatcagacacctcctcgtgtgagtgtccacgtgtttctccttttttgtgacttttttttttttggcttttctttcgctcatgtgaaaagctttattattggctttattttttattttttttttattttttttattttttttagtaaacacgtattattgcagctgtgggtattggtatatactattttttatcgtttttgtaattgaatcacaaaatccgtattttttagatgttgatactgttttttgtatcttatattttatttttattttattttaaatttgcgaaaagaattttaccgttttgtgtactcatcgatgtaatttattgtatgcgatttgtaaaaacatgtggacaaaaaaaatcgcttggatttcaatctttaaaagctacaaatccaaatctttgcgattgtaataaatttgatgtaaacgattttgtgttttctttcatttgttaattatcataaatactttcaaaattgaaggtttgcatacgaaacaaataattgaccattttcaaatggtttggaatttggatcatcaatgatcaaacttcaattagttggattttcttttttttctttttggagcttgtggctctagttcagtttaaatatcatatatgagttatgtgtcttaggtaatcattttcacatatataatttgttagctagcttatttaaactaaaatacgaatatatagcattggaactggtaaaccaccttttacaaaattcaaccaagtaattgaagggttggcacgatcaaatggactttttcatatataaaaccatgaccgttgagatttttcttgtattctgttatatattaagcatgacagtgatctaaattctgagaaagtacatatcttagtcctcttgttcgtggctcataaacatatgcatcggtggtttaaaatagcttatagacgtggttatttgtacttcgttaaatatagaacgtgaatccctataccatgccatgcattggaacatatatcttgctgttctaagtttttccgtttgtgcagcacacgccgcacacccatgaatgtttttttttagtaaccaagtaaatgaactgaatctataaactcaaaccaaacctatttaacgtgtcaaacaatttgtcatttttcaaattacattacattagtttatatgatcatatcagattgtttcttgtcgtgattatattgaagtcctaatttcctttctccttggcgttttctacgtgcagttgtacagaccaaagaaaaactatacaacataataataatcgtatcagtcaaaactaaaatttagagttgtagaacaaaaaaaatg

SEQ ID NO: 5807 - DNA, 3000 bp, Unknown
  misc_feature (1)..( 3000): cDNA_ID_2053844_gDNA_ID_1620819_Annot_ID_169397 3000 nt of promoter + ATG
gcctccgggtaccaaaaatgttttgccccctaaatcaatcaaatcctgtagttttgtgttaattttttaaaatataaaacacaaaatataatgtgattattattgtgactggagggcaatgttaagatttgttaccacaatagcagaagaaatagctttgacgattagaggaacaagctctttgatttcattgatactttttccttcaaaaaatgggtaattatagtcgtttcctccaatctctcccatgagtatcagcgagtctccaagcatctctttgcaatctagacaagaaacgaaataaaccctgttagaaccaagctagctagactcatcatcatagtccatagacatagaaaagaacaagggcacgtttctgttaaaaaacaaaacaagacaaggctaagtttctaaccacgagtagacgaggcgcataagttaggcaaaatctgcttgaaggtgtcaagctgaacacttaaactaacattggtgaaatcagattcaattccttttcccaaaagaaacgctcggtccaatgcggttgctccatacaccgcaaaattgatcccttgttcgaagctaacgttttgggatccaaagtaaggcggtacgtatggtagtcccaagaattcggctgttcaaatagtaagacaacataagaaaaaaagatcaggaagaagtataacttgctgttcacgtaagaaagacttagagcaaatgataacaggtggttttgcctatagagatgaaaaaatagctaccaatgaagtcgatgatgagacggccattagaggcacgaccggagggaggatggaagaagctttcgccataaggaagaaaggcggattgaggaaggtgattgacatcagagagatggagataatttccggtgtctgcgatggaatcaccaaagctgatgatcgatttaaaacgcctacatcgagattctgatgaagcaacaatgatggtggtggagtataagacaagtagaaagcttgagataagcttcttcagtgaagaagccatgggaagagctaatcgtggtcttcgttcgtctttgtcactcaatttttaaagtctttttggatcactgaataatgcaagagatgaggccattattggatttcatttattatgccagtaagaaagagagaaattataaaatttggttatttgttattttccaaaaagaaattttgcttattggttgaaaacgaagtaacttcagaaatgtcagacaagttggagactccatcaaaaaattggattcttcgatgatagaaatcgtgaaaataataagggattacgaaatattccttcaatgcttttttcttttgggttttcgcaaattccttaccattttataatcatataaatggattctttacctatattctaatccattacaagacgagcgaaaaagaaagaattgattatggagatgtgtgagtagtgtgacgcacgcgatagtctgcgactctgcgtgatctatatctttatggagtcagtttttatgtggaatcttattatagaaatcaaatatagctatcattcattttggaataatatgaatatctttcttagagtatttacctatttggaagaagaaaaaaatgattcgttatagtctacataattttatatttgattagtaaatactctaataatgatattcgtattattccacagatggacgaatcgaaatcaataataatgacgttgcgattaacaatatcttgtccgcggtgccttgaaagcctacatgttccactttttaggcttttggttggtgtgtcaaagtcatctattttggctcactttaaaaaacgattatattagtactactttctaaattcttttataaatgatgttttaagctttatatttttattctttaataaatgatgttttaaacttttaatgcagaattagttatatttttattgattttgatgatttttattttttagattgtagttgattaaataataaatgatattttaatttagaaataaacaaattttttttttttttaatttgtatgtattctgctaaacatcaagtaaaaaaagacggagggagtatgaaattctagctgaccattccaactgctcctttatttttatttttttttgtcggcaccaattgctcctttatagtatctctttaataatcctattcgaccttgaagaaattccactacaattttcaagaaatctcacatttgattagtatgaattccacttaaatctcataaattaaactaagctaggagtataatatacagtggtttaacaaatacatgacaatactgacctaaccgaatttatattccaattttctttcaaaaataatcatcaatcataataactttgcaaacagcaccagtcaagtaactattaaaaaagtgtagtggcaccacgtgtgttttactaatgaaccaatcaaccatttagttccaccgacttccaatagctctcgacttctaatttataattttgaaaaaaaaaaattatagtttcttaccaagaaatttttgttcactagtcaacatttttccctaatcagattcaaaattggtctttccaccaattgtattattgacgctagattctttttcttacaattttcgaccacaactctatcttacgcacaaaaaaagaaaaaaaaatactaatcttgtggaggagaaaaacagtgaagactgaagacaagaagcatgattgaattttgaaaagactcatacaaaactcgatcataaaaacagtgaagacaagtatgaagtatggtatgaataacaaaaagactaaaatgattttgtttgaaactgttgtaggtgagaaatttggacatgggacttgaccgtttggtagttggtgaagcctactctcgtgagctgtgtcccctcaaggcattgattttgcttctcttataaatatggaccccaaaacttattttggaagtaacaaagacccataccattcttattattaaggtatg

SEQ ID NO: 5808 - DNA, 3000 bp, Unknown
  misc_feature (1)..( 3000): cDNA_ID_2041489_gDNA_ID_1620819_Annot_ID_169399 3000 nt of promoter + ATG
ttcttactggcataataaatgaaatccaataatggcctcatctcttgcattattcagtgatccaaaaagactttaaaaattgagtgacaaagacgaacgaagaccacgattagctcttcccatggcttcttcactgaagaagcttatctcaagctttctacttgtcttatactccaccaccatcattgttgcttcatcagaatctcgatgtaggcgttttaaatcgatcatcagctttggtgattccatcgcagacaccggaaattatctccatctctctgatgtcaatcaccttcctcaatccgcctttcttccttatggcgaaagcttcttccatcctccctccggtcgtgcctctaatggccgtctcatcatcgacttcattggtagctattttttcatctctataggcaaaaccacctgttatcatttgctctaagtctttcttacgtgaacagcaagttatacttcttcctgatctttttttcttatgttgtcttactatttgaacagccgaattcttgggactaccatacgtaccgccttactttggatcccaaaacgttagcttcgaacaagggatcaattttgcggtgtatggagcaaccgcattggaccgagcgtttcttttgggaaaaggaattgaatctgatttcaccaatgttagtttaagtgttcagcttgacaccttcaagcagattttgcctaacttatgcgcctcgtctactcgtggttagaaacttagccttgtcttgttttgttttttaacagaaacgtgcccttgttcttttctatgtctatggactatgatgatgagtctagctagcttggttctaacagggtttatttcgtttcttgtctagattgcaaagagatgcttggagactcgctgatactcatgggagagattggaggaaacgactataattacccattttttgaaggaaaaagtatcaatgaaatcaaagagcttgttcctctaatcgtcaaagctatttcttctgctattgtggtaacaaatcttaacattgccctccagtcacaataataatcacattatattttgtgttttatattttaaaaaattaacacaaaactacaggatttgattgatttagggggcaaaacatttttggtacccggaggcttcccaacaggatgttctgcggcgtatcttactctatttcagaccgtggcagaaaaagaccaggaccctttaacaggttgttacccattgctcaacgaatttggcgagcaccacaacgaacagctaaagacagaactcaagcgactccaaaaattctatcctcatgtcaacatcatttacgctgactaccacaactccttataccggttttatcaagaaccagctaaatacggtccgtgaaatttcaaactctgtcgttgaccctcacggattaattcattaacagatattttgtttgtctttttcaatagggtttaagaacaaacctttagctgcttgctgtggagtcggaggtaaatacaacttcactattggtaaggagtgtggatacgaaggagttaactattgtcaaaatccttctgagtatgtgaactgggatggttatcatttaaccgaagccgcctaccagaagatgactgagggtatactcaacggtccctatgcaactcctgctttcgactggtcctgccttggctctggtacagtggatacataaagggtattctttcagcagtaagaattcattcgttgtaaaaaatcaaagaggaagaaaattatgtgatgatgatgatgatgatgatgattaacaaaaacattgcttgtacggcaagacttgactaatgacaaaacttccgaggatatatggctatatgcatatatcttatcactgaaaaataccacacgcaaatagaaaatcctatatatacggttcgtagcactagttgcactctagttacaatgttgagaaaatctggaagtacgtataattttaagaccattctaagtttataaacagttccctggaagatgttggagaagttttggatgagttgagtgggacaaacgacagctaaggatttaaataatttcataacatccattgaactgaaagattaagaacataatatactatttgggacaacttacaatggatggatataacagatgagaacaagtgaggttcattgattacacattttggtcatttaattttgaaaaggttcaaaattctaaagtcttgctatttagagccagggttcctccggggtcacaaccagagacctattatataaaaaagaaaattatttaaaatttcttatttggattacactaaattaaaagtgattaagacgagagactagcccatttgtatccatgcataaacttaggtgtctttttatacgtggcactaaagtacgacttagccatctaatctaaagtggaagtttctgaagttacttcattgaacactcaatagtcattaataaacctgaccattttcctcaatttactaataggcgttgggataatacataaaatccaataactaatgcctcaaactctgcattagttaaagattctaaaaattgagtaatagagacgacaattctcctatggcttccctcatactatcgcgtgcgtcacatatctccataaccgtttcataattgttctctttctttttcactcattttataatggattagttaaagaatccatttatatgattataataagtaaggaaggccaaatagaaaaaagaaaaagcaacgaaggaatatttcgttattactagtttcacgaattctatcatcgaagaatccaatttcgtgatggagcctccaacttgtctgacgtttctgccgttaacttctttttctcatttctctctttcttactggcataataaatgaaatccaataattgccacatctcttgcattattcaatgatccaaaaagactttaaaaattgagtgacaaagacgaacgaagaccacgactagctcttccc

SEQ ID NO: 5809 - DNA, 3000 bp, Unknown
  misc_feature (1)..( 3000): cDNA_ID_2041481_gDNA_ID_1620819_Annot_ID_169401 3000 nt of promoter + ATG
tttcattagggtttaagaacaaacctttagctgcttgctgtggagtcggaggtaaatacaacttcactattggtaaggagtgtggatacgaaggagttagctattgtcaaaatccttccgagtatgtgaattgggatggttatcatttaaccgaagccgcctaccagaagatggctgagggtatactcaacggtccctatgcaactcctgctttcgactggtcctgccttggctctggtacagtggatacataaaaggagcagttagaattcatttgttgtaaaaaaaaaaaaagaggaagaaaattgtgtgatgatgattaacaaaaagattgcttgtacggcaggatttgactagtgacaaaaatttcgaggatatatgcatcaatcttatcaatgaaaaataccacacgcaaatagaaaatcctatttatacggttcgtagcacgagttgcatgttgagaaaatcctatttataacagttccgtggaagatgttggagaagttttggatgaattaagagggacaaacgacagctaaggattaaataatttcataacatcctttgaactgaaagattaagaacataatacactatttgggaaaacttaaaatactatattacaatggatggatataacagatgagaacatgcatgtgaggttcattgattacacattcatttaaattttgaaaaagttcaagattctatatataaaaaagaaaattatttaaaatttcttatttggattacactaaattaaaagtgattaagacgagagactagcccatttgtatccatgcataaacttaggtgtctttttatacgtggcactaaagtacgacttagccatctaatctaaagtggaagtttctgaagttacttcattgaacactcaacagtcattcataaacctgaccattttcctcaatttactcattggcgttgggataagacataaaatccaataactaatgcctcaaactctgcattagttaaagattctaaaaattgagtaatagagacgatgacgacgactctcctcatggcttcgctcatcgtaagctttctacttatcttatactacaccacaatagtcgttgcctcatcagaatctcggtgtcggcgttacaaatcaatcatcagcttcggtgattccattgcggacaccggaaattatgttcatctctccaacgtcaataatcttcctcaagccgcatttcttccttacggcgaaagcttcttccatcctccctccggccgttactcggacggccgtctcgttatagatttcatcggtacctgatttttcttctctatttttagacaactcggtcactcctctgcttcaggtctctcttgcttgaaccacaagttatcaaccttactagcttctgtgtttttgtaatgttgtcttactatttgcacagccgaattcttgggactaccgtacgttccgccttacttcggatcccaaaacgtgagcttcaatcaagggataaattttgctgtgtatggagcaaccgccttggatcgtgcctttcttgtaaaacaaggaattaaatctgacttcaccaatattagtctaagtgttcagcttaacaccttcaagcagattttacctaacctttgtgcctcatctactcgtggttacaaacttagccttgttctcttccatatctacgatgcattgagctccttctaactttttttctttgggggttcagattgcagagagatgcttggagactcgctgatactcatgggagagattggtggaaacgactataattacccattttttgaaggaaaaagtatcaatgaaatcaaagagcttgttcctctaatcatcaaagctatttcttctgctattgtggtaacaaatcttaacattgccctcccctcaaaaatgtgtgtttcaaattttaacaaattaattaagtaataaaactacaggatttgattgatttgggaggaaaaacattcctggtacccggaaacttcccaataggatgttccacggcatatcttactctatttcagaccgcgacagtagaacacgacccttttacaggttgtatcccatggcttaacaaattcggagagcaccataacgaacaacttaagatagaactcaaacaactccaaaaactctaccctcatgtcaacatcatttacgccgactactacaactctttgtacggactttttcaagaaccagccaaatatggtatgcgccttctaaagcttctaactttgaccctcacgtacggtttaattcgttaacccatgttttatgaattatggtccctttttaggttttaagaacagacctttggctgcttgttgtggagtcggaggtcaatacaacttcactattggtaaagagtgtggagaaaacggagttagctattgtcaaaatccttctgagtatgtgaattgggatggttatcatttaaccgaagccacgtaccagaagatggctcagggtttactcaatggtcgctatacaactcctgctttcgactggtcctgccttggctcttatgatttcagtggataaagatgatttagtagtggctctggcctttgcaagaaaaaaagaagagttgcagagaattgcaaggaatcttggattacaaattaatagtttattaaaagcacttgaagaattaaaataaaaattgtatccaaaaaaattaatggcctgatattcgaaaggaatcttagattatagactggagattcgtctatgtgtatcccatgcataaccttacgtgtcttaaatacgtggcatgaacgtttctgaaactagtgcattttcaaacaattattgatcacacaccaaaaaaacataaacaaaaaaaatttatattttccccagtttactatagtcttggttgcatagtaaatgaaatccaccactgaccatatttagtggtccaaattaaaaagggtgataaaaattgagttacagaaacgacgaagacgattcttccc

SEQ ID NO: 5810 - DNA, 3000 bp, Unknown
  misc_feature (1)..( 3000): cDNA_ID_2041470_gDNA_ID_1620819_Annot_ID_169404 3000 nt of promoter + ATG
attttggtttataccatactttatagttttactaaaaaatagtattatagatacttggatccattcctatatcttattttagttattgagttttacatgaaataaatagaaaataaggaattcaaatttatatatgtaatgaaagttaagatttgcttcttcttttttttgaattgtttgaaagaatttttaggagttttttaaagaatatttcaagaactttgtaagaattttaaatttcttttggatttagagaattttttggttcttgtgttttttaacctcggatttggttgaattttattgggggttcagtttcttcttcaaattaagcttaaaatgatgtttaaaaggtgtacgttaaatcttttaacgggctgttaatgggttaataagcacgatggttagttcatgtattaaatgggctgtataaataggttatatatatttttgtgaaacggtaatttttttgtttatacatgctggattctatttttgtcaaagaatctacaaattaagaaaactttttcttttacgacaggtgtatcactgtatcccgtagaacaatgaaatcattaagattgacacctaattactacattttattttttcatgtacagccaaacaaaattatttcacataaaaaaggggaaaataacttcatgagagagaagttaaataatagaaggaaaaaaatctgattatctttgtctattacctaataacaatattttatagttaaattacacttgattcaaaaaaaataaaaatataggtgaattacactttccatgtttgactaaatatggtaacatgacaaaatctcttaaaagtgtaacggttacaaaatctctcttttaggcaaaaaaaagacagttaaaactgacagaagactcttgtccagccgatgagaagcatcttaagaaatgaactttggacagaatccagtgtaatagcacgtgtaccaatcattgtttctcagttgtcattttcctcatataactgtccatgctttctatcttttaaaatattttactctttttgaattaaaaatatattaccttaaataaaattagtttttgggcagtaaaaaaacaaaacatttttttctgtttatgtaaaagccactgattatagcattgtgtcaattgacagctgtttacagcttgggattgtatttctgtctaaaaatgatatattttagtagatgtttccttgaaaatcaactaaatatctagtatttgcaaaataatgctcagtaattttatataaaaaaaattcttcatgttaataggttagaacatgttgtagaaaaatttggtattaaaacattaacaaaaaaataattaaaattttaatattttccgtgaaaattcattaaaacttttatagttaacaatgtcgtataacgacaacatgaatagtcagtttattcgatgtcgttattcaaaaacaaatactcttcattaatttgataattgtcggcgccgcaatgataattcacacatatttttaaacagtaaatataatgtattttacttatagtgaacttgtttttatgtttataattttgataatttattacaactagtatgatatattaaacatattactaatatcaagtatattacaaaaattgagagtaaattagaggagtagaaaacaaatattttgatttattcacctaaaacattttaaaaaggaaagatacaaaagttgtcaaaaccaaaaagatacaaaacttttaaacacgtggcataaaaaggatagggtatctaagaccttcttcatctgacattgggtatatatatgcctatatggtagacttctcaatatctccttacctctcccagtttccatatctctcactttcttactcatactccagtaagtgtctcttcttttctgttcgtttatatctggttttagcaaattagatcctttcgttttctttgcagttaagctctactgcaattcgatcctacattatatagtgtattataagaaaagagacatatatctatggattctttatgtgattttcaacatataaccatttgtatatttgatttctatgtaatatgtatataaatcctttatatttcttcaagtttttgaatatatttcttcactgccttcaatttactcacacaattcttttttgtctttgattgattatgattttgatcatgtttgttctctttgtataaaaatccttagttttctttttttctcaataatctttgttgtatatagatataaatatatttgatttgatattttgttattcatacatctaaggtgaaaaagtttatcagtattgttattgtgacggatgcactaaaaagttagaggctattttcttgtatactcatactttagaggcttcaagcagttttttaagaaaatatttctgtccaaaaaatatttacttcaaagaaattagaataaaattttctgttttttaaaaggaaaaaaaaggattttttcaaggagaaatttttttttttagaggaaaaagatagcttttaaaaagaaaatttgccctttcctaaggaaaagaaaagtgagccacaagctagtatttaaccagcttcctatcaaggatggttcgcttgttatatgtgaaatttattttatatatacttatactaatatttcaggacacaaacaaaatatttatttttatatctaatattttaatccaaaaatattaattagatgcggacaagttaaattgtcatgatttcatttagaagatagagttttttttttgttggttaaacaaaagatagagtaatttttatctgtttgatttattcccctcaattcatactccatatgatatttgaaagatatataagtagcatgatgttagtatacaaaatttatcgaaagaataatttctgattgtcaaaagtccgtacatatttttatttatcaatttctgattatctcacatatattcttattgtcaatctttcaggtaaacaagtcaag

SEQ ID NO: 5811 - DNA, 3000 bp, Unknown
  misc_feature (1)..( 3000): cDNA_ID_2041453_gDNA_ID_1620819_Annot_ID_169410 3000 nt of promoter + ATG
aaagagcttcaaaaagagtttaccaaatttatgcggctcaccatcaggtagtgaacaacaatttttccttttgtcggtggaatgattattatgtattttagtgaactaatactcacttgtatatgttttttagactgtagagatatgattggaaatgctttgattctcatgggagagattggagggaatgattataatttcccattcttcaaccgcaaacccgttaaggaagttgaagagctggttccatttgtaatcgcttctatttcttctacaataacggtatacatttttttcttgaattcttgttttgttagtcttaagaacgagtgaaaacagatttctagctatctgctgatttgtttgtcagagtttataatgagtttgttccattgggacttaatgttgaatccaggagttgattggtatggggggtaaaacctttctagtgcccggagagttccctatcggatgctcagtagtctatttgacattatacaaaacatcaaacaaggacgaatacgatccttcaacaggatgtttgaaatggttgaacaagtttggcgaataccatagcgagaaacttaaggtggaactcaacagacttaggaagctctaccctcatgtcaacatcatatacgctgactactacaactctctcttgcgcatttttaaagaaccagccaaattcggttagccttcttgattcctccactgaatctacacaccctaagtcgtcactgatttagtattgacaatttttcctatcaattatactgtcagggttcatggaaagacccttccctgcttgttgcggtataggaggaccgtacaacttcaacttcactaggaaatgtgggagtgtaggagtgaaatcttgtaaggatccttcaaagtatgtgggctgggatggcgttcatatgactgaggctgcatacaaatggatagctgatggaatactcaatggaccatatgcgaatcctccttttgatcggtcctgcctcagatctgagattaagaaggagtcattgtacaatcaaagtactctgacacaagcttgtgtgaaactttgacagacaaaagtgatgataagaatattccctctattccttattaatccaaattcaagcaaacaaatttgttgcaaaaaagatatgtttctaggtttctatgtatttttttattacttattgatgatgaattgtagaccttaattttctttttcttttttacttttattggtttaaatttgttaatcataaattgatgtatttataatcaatatttaatatattttctgaatatgtgtgaaaagcttaaattttggattaatcaaaatcagagagagtgattttgaaatgttcttttggcctttccccggagaaatcaataataaataaaaatgtcaaaatagatatttatcaaagtgcccgttttgaacgatacaaatacaaaaatttctaagccatgcaaagtgaaatgcattgccccaccttctttattagacaacaagaaacgctcattgtcattgagtctcagccatttggttctatataacttttccaaaacaaatacactaaacctttataaattagtactcgataaattaataatttctataaattaataaattcttagtttaattttcattgatgttcaaagatttttttttttttcactttttcatgtttataatttccaatgcaaaattaaatatttttttttaatttgttttgaccatttgtattttgctgtttgttttctgattggtggaatagtttttaattagataaaaaaaatgtttaatttaaattagataaaacaaaaattttaatgatttcttaatgtatgtgccaaaatttaaaacatcaagggaatatgtttttaagtgctcttgttggctggacatgtagggattgcttaccagatggcgttggcccccggagatatacaagtcccgaacttcgtaatcaataaataaatatttaaaagttgtgcaaaatagatattttctaatcagcatgattaagtgtcaaagtgctcgttttaaacgatacaaatacaaagtaaattgccttgccccacccttattcattagatagttcaggaaacgatcattgagtgatgactcattgatccataccagccttttgattctatataacttttctaaaacaaaatattttgaaaatcataataaaataaaaaataaaaagagagaaattttaggacttgtcgcatggcgtctctagattcttatgtaaactatttttcagttttcttgtttttccgcaacgttttcgatttaatttgtataaatatatgaaaacatctgaattcttagggtttcatttttttttcctgacacggtttctttctctgtttttctatttcttgatctgcaagtcaacagtatgagacctatagtgatcctccaattttccttcttacagctgaatttttggggcttccttatgtgcctccttactttggatctaaaaatggaaactttgagaaatgagttaataatggcgtaaacggagcaacggcattggaatgttcctttcttgaacagagaagaatttttagttctcacagcaacatgccaacatcagtttagatattcagctaaggagagtttaccaaatctatgtggctctccatcaggtagtgaagattaatttcactttttcattggagtgattataatgtattttccatgaattgagctctattgtatttgtttttagactgtagagattaacaatgctttgaattttatgtgagagattggagggaatgattataatatttccatcaggtataacatttctttcaaagtagcctcaaagttgcaaccactacatcaaatatgaacaaatagacaaacacggcaagtgaagcccttctctagtctgatctctacctaaaaattgattattgttttcttgtctcctagcgaatagaaaagagaaggagtacaaccttccggcctctccc

SEQ ID NO: 5812 - DNA, 3000 bp, Unknown
  misc_feature (1)..( 3000): cDNA_ID_2041459_gDNA_ID_1620819_Annot_ID_169407 3000 nt of promoter + ATG
agttcgcttcttagacgtgccataagtttcaccgcttacggtttcagttgatgtttcgattctcgaatgtctatggttctatgtttattttttatttttaatggcataagaccatgttttatgagttacttgatgtaatacctaaactttcattttttgaaatgatatatacattcttattaaaatataataaaaaaatcttgatgtattattttaaagtaattttatcaatgaataagatccatttaacattaatgagcatgtgaaacttatctaacatacctttgaagcatattataatagttcatcctttatggttgtcttttacattaatctttttcctagtgatatctggacgaagacagatggtttcagtataagattcataaaatagttactttgatcaataaatttttcatttagaaaaaaaaattgctgacatatatattactcatcttttttcattagatatataaatatttatactcgcacccaaaaccaacatcgtactggtgctccttatagagttaaactcatggccattatctgcatgatctaaacaagagtgagtataaatacttagtgcgagcgaatatttccgtccatatgcaacacaaagcgatgaaccactaatttatatgtattttcaaccaatcaattatcatagcctagactacacatgcatattccttcaactagctacggttcactattctaggctatgataaattactatatcggcctaaagcataagtttgtgcacaaaaataaaattaataataattaacttgtgacctaaaaagcatataagtataactactatatttagctttatgaaccggccgggcctcccatctaatgtcgccttcaaagtttcatttgtggaagctcacatgttttctgatcactgtagccaccgaagtcttaggctcagagtctttccaacgttataaatcgatcatcagcttcggtgattcgatttcggacaccggaaactttcttcatctctccgacccaaatcatcttccccgatggccgcctcattatcgacttcattggtatgaacttctttttacaccatcccatattcgcagtttaaatcaaaacttcagaaatatttttcagtttttagtatgaataatcaagattcaacaagtgttcaaaaaaaaaaaaaaaaaaaaaaaaatcaagatccaattagtcaacttaatttgacagctgaattcttggggataccatatatttccccttactttggacataataatcaaagctttgagaatggaatcaacttcgcggtggctggagcaaccgcggtggagcctgaattgcttcaagagaaaggaattactgctaattacatgactaatgtaagcttgattgttcagctaagcatcttcaagaaaattttaccaaacctctgtggctttccttcaggtgattcctcacaaatctcaactcatcttggaacacaagggacaagcataagccaatctttacttgttttcaagattgcagagagattctcgaaaactcgctgtttattgttggtgagattggaggtaatgactataactacggattcttgattggaaaaagcatcccggagattaaaaaaaatagtcccccttgttatcaatgctatttgctcaacaattgtggtaataaaaatctttcttaaatcctgttcaatgatccttccctttttcttgttttgtttgggagactaagaattgaaccttgcaagcatgaacaacatggtacaggaattgttcaatttgggagccagaacgtttctagtgccaggaaagtttccaactggatgttctgctgcatatttaacgagatttaggacaacagatatgtaggactacgatgctttaaccggatgtttgaagtggcctaatgagttttctcagtaccacaatgagcagcttcagacagaactcaatagactccaaaaactctatcccattgctactatcagatacactgactactacgacattgtgttacatttttaccttgaaccgacgaaatatgttgccctttcttattccgtccccttaactaacatatatacagtattgtcacaattatttatattaccaaatttactcttttgaaggatttatggagagaccttcactgttgataagccatgtgggtctagaggagtgaaacattgtcgagttccttctgagtatgtgacgtgggacggttttcatttgaccgaagccgcctaccgatggattgctaagagcttgcttaatggaccacttgcgtctattgctttggccgctcctgcattttcctttttaagctgatctacggacatagatcactttcccttgagcacttgggacctgttgctgcgagtaaactaaaatcacgttcttcgtttaatcacattgattgtttttttttttttttgttggtttctctttactttgttttcaaattaatacacaatctcttgcttgtacaacaagtttatgggagtaaatctttaaactaatttttatttgtttataaaaattttctgaataattttctctctaagaatgtaattttttttattttttttgataaaaataaatgttgatatattaaaatagccatactagattatgatttgcagtggaacccaagcaagtataaatcatggtagataatccgtaactagctcgtaaataacctgcaaataacttatcactcatgaataacatgaaaataatctgtagatattttctagaggttggttagaacttagaagtccacctacccatcttaaaacgatacaaatacaaaattttctagtccataaaaagttttgtagtcttggcccaccattatttataaggcaacaacaaaatcattgagacatatactcaccagtcctttcttttgttgtttacgaaaaaacgaaacaagatgttttgtaaaataatataacattctaaaagccgaaagataaaaatttcaccgcggacttctcgt

SEQ ID NO: 5813 - DNA, 3000 bp, Unknown
  misc_feature (1)..( 3000): cDNA_ID_2041439_gDNA_ID_1620819_Annot_ID_169414 3000 nt of promoter + ATG
agaccactacttcagtggtaccaagaggtggccccatttatctgccaaacatggttggaaatatttctaccacccctgaattcaagtcttcatttctcaatgtactacaggatttggaaactcatttatctctggactctacttcttcttcttctcagcagtttgatgtctcgtatgtattcttgcatcaattggctctctttttcatcagttaaaatctggttttttcaatacattaagttatttaattgggatgatttttgtttgatgcagaattgattctctcaagatttatacggatgaggaactcacagagatggctatgaaggaagcctttccggtacgttgcctaatcgtttgttgatttacttctcttcttctgctgtctttcaagtgtgagaacttgtgtcttgatgagtttggtttcttatttcattacaggaagattacctttcccaagaggagctcgaaccatctttaaacgtttctcatcagtaagtatcattaccagcctttcgttatttcttgatataatgtttccccttgtgtgaatccttagtaaaaacgaattggcatgtagcttctttctattagtgtgcttcgatggttgttaagttttttgtttacagtctcaattggttctggttcagccgtgcagccgtgctagctcccaatatatttcgaaagtcttgtagacaatatatatgttaatagcttagtcatgattagaaatcttccagagacaaagtatggttgacgtagacaattgtagaacgataacaaacagttaccttctcggtatgctgcagtgaaaatccattagctgggagggcaaaaaggaagaggacagtaaagaataccgaggtaaagaagaggacactaaagaatactgaggtaatgaagatgacagaaaagaagactgaggtgagtttatgtaacatggtcttggcatggctgggaattactatcttttcttttccagaggctatttgtgtttaggatctcttgataccaaatttacatggtcttgccatgatggctttattgcattttgttatgattgatatggtcatttttttgtttttaggaagcttatcttgtgaaagtcgagcagcttgctaaactcaaacaaaagcaggaggaggataaagcagctgtgacactgcactgcttcaggtctgtaattactattgcatagtctggtttgctgtgtaccttgtctgttttatgctgatgtttcttcgatttgaacttgttttcagcaagaccagtgagactggtaaagatgtagttgcacctccagaaggttttgagcagatgcaatctcttaggttcatagataataattacacggcaagtgatttccccttgcaatgtctttttagtgttgattatgctagtccaagttctaaagtgctcatgcatcctgctaagtattatcttcttcctatttaaacagaagttgaagccatctgacatccagggacaagtggatccgctatttcctgaagtcattttgtgtgttgagatttataacagtcgcaaggttaaggtactgtattgttctgtaaatctttgatgcgggatatagaatattgactgaattctcgtacatactaacaatacttgtgtaaatttttgttcagacccaagaatttttggttctaggacgtcaaatgttgactgagttgaaggacaatattcactgtgctacagaccaggtgatgcaaaaggctggaaagtatgatccctctggatacttcctcatagaagtaagaattcatctcgtttctgtatcttttgatgtttaagtaagtttaacttctgcgtcgctggtttaatcagatgctttttgctcgtctaggatgtctttcacaatgatttaaggaatccctcggctaaagattacagctatcctattttagattggctttggaactcgaaagatgaagctcttaaaaaatgggaatgtgttttaaccggcgaattacagaaaaagcagaaactggttctaggtgaagcgaaatctgtggatttacctcgttacagaactgcagacatgcagagtacacacttctgtgatataagattcagagtcggagctagttatgtctattgtcatcaggtaaaatcttctctctttctcttttggttctttaatttctcatcttgtgaaaacatttggcacagactcgagatattcactgattaaaaaccgtggaacagggagattgcaagcacacgattgtgattcgagacatgaggatgagtcatccagaggacgttcagaacagagcagcttacccgatcatgttctggccgaaacgtaggattcagaaatgcggtgtttgtaagataaagagagcttcaaaggttgcagtggatgacaagtgggcaagcgagaacagtagctatttctgtgatgtttgttttgagcttctacactcagaggaaggcccacttaactgtgacttcccagtgtttgattatgtgcatgagtaaagatgatcttctttgttgcataatatatagataggaagaatacgaagaaatagttggcattgcaagaagaagacatgatgagtcttgtcttggtaaatttgttgcataattggatatatataaaagattttcttgaaatgatgacatgacaactatttctgaatttagccattgtcaaaagctctcttcgttttgaagcggtagaaaattagaaatgtttatgtttagccaaattcaaaagtagaggagattccttgaatttctgttttctctcgctgtcttctcaatattcaaaactcaaattggtgtcttctccaatttagaaaacgttaaaaacaagagaaaataaaactaaactttttagaaccaaaaaaaataaaaataaaacgcatttgggatttctcattgtcatcccaagttcttggaacagccaaatactttttcattattagtttataatcgtctcataaaggcaaaaaggtttatttcggaaataag

SEQ ID NO: 5814 - DNA, 3000 bp, Unknown
  misc_feature (1)..( 3000): cDNA_ID_2027368_gDNA_ID_1620819_Annot_ID_169412 3000 nt of promoter + ATG
gagagtctttaggtctaaacacatgttacatgtataaaaggaatttaacaaggttgtatacgtagttacgtacattaggtgtttctctgttcgtgtgtacaaccgcatatttttaatctttggatcatatagtgttgatgaatgtgtacatcaactattggagatataatgtattatgctgtatacgtacaacagaatgttccaaaaatctttcttcttttttttattttattttaaatcggccccaatggtgctataataaacgagaaagccaaaaatactacaaataaaagcctcagtgatgggtttatcgtttaagcgaaagtgacgaaagagaggaaactagacagatacgacagtaagttttggtcatcgaagatacgtattgggatccgctcacaagaatttgttgtgtgtctttttgctaaaaggccaatacgaaaatcgttgataattcgtttcatctaccgcaatcactttatccttgaccaaaaaaagaaagaaataactcaaatatcaattttataatcaaataaaaacttaaataatcaaccaatatacccgtgtgtgtcaaaccatactgcatcccaataattgatcttttaatcattctttattatcttatccttggtattgtggctagtggggtattttcaaaagacttttttgacaaatcaacatcacactattaaaaaagggatctcgacggagaccaaccttcagctctctggcaatggcgtatcccggttcgcctatcttgatgaagctcctcgtcttcatctttttatcaacttttgtagtcactaacgtgagctcggaaactaagtgccgggagttcaaatcgatcatcagtttcggagattccattgccgacactggaaacttgcttggcctctcagatcctaaagatcttcctcacatggcgtttccaccgtatggagagaacttcttccaccacccaactggtcgtttctccaacggccgcctcatcattgatttcatcggtacttttgactttacagttttacttaaggtgtgagtaagtaagtgtgtaaaaaggtgaaactaaaagagttattaaatttcttcagccctttctttgttttcatcttctttatggttttacttgattaccaagtttgattgtgtaaaacctgaaatcatctaaatacagaaccattaagtgtggttaagtctttatgaccaacttacaggctgtaagttacagctcttagttcatgttcttttctttggttctgttcacagctgaattcttgggtttaccgcttgtgcctccattctatggatctcataatgcaaactttgaaaagggagttaatttcgcggtagggggagcaaccgctttggaacgttcctttcttgaagacagaggaattcattttccttacactaatgtgagtttaggcgttcagcttaatagcttcaaggagagtttacctagcatatgtggctctccttcaggttgggatgattaactatttcttttttgttttatagtgtttactgttatctatggttaggatatcaattctgatttctagtgcggttgctcttcaaaaaaaaaaaacattcgttctgtttttggttatgcttagtgatatcacttattgtatataatggcttactttatattcttgttttagactgtagagatatgatagaaaatgctttgattctcatgggggaaattggagggaatgactataactacgcgttcttcgtggacaaaggcattgaagagatcaaggagctgatgcccctggtgatcactactatttcttctgcaatcacggtaaacatttatctttcttaatatctcatcaagttcttgatcttctctgtgaacaacgaatattcgatagcacaggagttgatcggtatggggggaagaacatttttggtgcccggagagttcccagtcggatgctcagtattgtatttgacatcacatcaaacatcaaacatggaagaatacgatcctttaacaggatgtttgaaatggctgaacaagtttggtgaaaaccatggtgagcagcttagagcagaactcaacagactccagaagttgtaccctcatgttaacatcatatacgctgactactacaacgcgctgtttcacctttatcaagaaccagccaaattcggttagacttcttgatcgttttactgaacctaaacaaacaagtacattgatcagtttgctaaatattgagttaattatgcaatcaggattcatgaacagacctttgtccgcttgttgcggcgcaggaggaccgtacaactataccgtaggtaggaaatgtgggactgatatagttgaaagttgtgatgatccttcaaagtatgtggcttgggacggtgttcatatgactgaggctgcgtacagattgatggctgagggtatactaaatggaccgtatgcgattcctccttttgattggtcttgccgtagctctggagttaagaacagtgggtcatctgacacatagaattctttgatgagaaactgatacaagttggtcaaaaaattgagaaaaggatactgataaaaacatgtatgttccttagtattgtcttggatcatgttcatgtattgtatcatgttgttatgtgaaataatttaaaagggtatcatgttcatgtatactccactccatatagagagtaagtaaccggcaacggcattgaaaacttggagataaattggaatatttgttgattcaatttggaaaatggcaaaaacaaattatttagccaagtgaacatttgttgattcagtttggaaaatggcaaaaatgagaaagagacaatcatgctctcatttgtgcccatccctaaaccacataaagataccctgtctagtctctattgcatctaataattgatctttgttttttttggactttattgtctccgagcgaatagtggctctttccaaaaagtcattttgaaaagtttctaacctctaggccaccactc

SEQ ID NO: 5815 - DNA, 3000 bp, Unknown
  misc_feature (1)..( 3000): cDNA_ID_2041449_gDNA_ID_1620819_Annot_ID_169411 3000 nt of promoter + ATG
tctacctaaaaattgattattgttttcttgtctcctagcgaatagaaaagagaaggagtacaaccttccggcctctcccatggcatctttagattctcttccggcgatgaagctcgtgagattcatattatctacccttttggtcacttctgtgaactcgcaaacgcaatgccggaatttcaaatcaatcattagtttcggagattcaattgctgacactggaaacttgcttggtctctcggatcctaacgatcttcctgcttccgcgtttccgccatacggagaaaccttcttccaccacccaaccggtcgttactccgacggccgcctcatcattgatttcattggtacgtttatttacataaggtgtgagtgtagaaaaaaagagctattaattattattaattacccttactctcttttttcattctatattagctttcttgaatagcaagtttgattgtataaaacctaaaaccatctacatacaaccatattaagtgttgttgagcctccttattggttcctcaacttacagctctctcttgtttttttttttcggttatgttcacagctgaattcttggggtttccgcttgtgcctcctttttatggatgtcaaaatgcaaactttaaaaagggagttaatttcgcggtcgcgggagcaactgcattagaaccttcctttctagaggagagaggaattcattctactatcaccaacgtcagtctaagcgttcagcttaggagcttcacggaaagtttacctaacttatgtggctcaccttcaggttgggaagctcaactttttcttctctgtttttggtgtttcatgttttatatgatcaaactatcaaaatttgattttcttatatgcttatattgctataagttgtaatactttattttgctgttttgtatttagattgtagagatatgattgaaaatgctttgatactcatgggagagatcggaggaaatgattataattttgcactcttccaacgcaaacccgttaaggaagttgaagagctggtaccgtttgtgatcgctactatttcttctgcaatcacggtaaacattcttgatcagccagttccgggaatgactaaaacatatttgtatctacgctgataattagtttggtaagaaaaaacacatgtacatgttacgttgttttgaaactgaatgttgaattcaggaattggtttgcatgggaggaagaacattcctagttcctggaaatttcccgatcggatactcagcatcctatttgacattatacaaaacatcaaacaaggaagagtatgatcctctaacaggatgtttgaaatggcttaacgatttctcagaatactacaataagcagcttcaggaagaactcaacggactcaggaagttgtaccctcatgtcaacatcatatatgctgattactacaacgctttgttgcgccttttccaagaaccagccaaattcggttaggcttcttgaatcctccaagagatttcttcacaaccaagtcactcatttgattcactaattaattaaccgattttattatccaatcagggtttatgaacagacccttgcccgcttgttgcggtgtaggaggatcttacaacttcaactttagtagaagatgtgggagtgtaggagttgaatactgcgatgatccttcacagtatgtgaattatgatggcattcatatgacggaggcggcatacagattgatatctgagggcttactcaagggaccgtatgctattcctcctttcaagtggtcttgcctcagctccgagattatgaataagatgtcattagatactcagattcttgatgaacagctactacaaggttgtctgaaagtttgagagacaagagaaagagtggaaaaaacatataggttcttaagtgtttgtgtcttcttcttttttgttccgggtaacggtgttaattagccttaggtgcatcatgcatgtgttggatcatgtattatctttgtattgtattgttttcgttagtttgggtaagagttagtatccttaattgttggaccatgtacactgtcatatataatttaactatatacaaaacaattaaatgcataatttacgcatcgcgtggccaaatttctagaatcaaatatggttttatggtaagaaatcagaacactatgtaaatttgattaacgatgggactaattcagaaaaataaataaatactaagtctaaagaaatagttgggaactggcggaaaaaaaaaagttggagagtctttaggtctaaacacatgttacatgtataaaaggaatttaacaaggttgtatacgtagttacgtacattaggtgtttctctgttcgtgtgtacaaccgcatatttttaatctttggatcatatagtgttgatgaatgtgtacatcaactattggagatataatgtattatgctgtatacgtacaacagaatgttccaaaaatctttcttcttttttttattttattttaaatcggccccaatggtgctataataaacgagaaagccaaaaatactacaaataaaagcctcagtgatgggtttatcgtttaagcgaaagtgacgaaagagaggaaactagacagatacgacagtaagttttggtcatcgaagatacgtattgggatccgctcacaagaatttgttgtgtgtctttttgctaaaaggccaatacgaaaatcgttgataattcgtttcatctaccgcaatcactttatccttgaccaaaaaaagaaagaaataactcaaatatcaattttataatcaaataaaaacttaaataatcaaccaatatacccgtgtgtgtcaaaccatactgcatcccaataattgatcttttaatcattctttattatcttatccttggtattgtggctagtggggtattttcaaaagacttttttgacaaatcaacatcacactattaaaaaagggatctcgacggagaccaaccttcagctctctggca

SEQ ID NO: 5816 - DNA, 3000 bp, Unknown
  misc_feature (1)..( 3000): cDNA_ID_2041477_gDNA_ID_1620819_Annot_ID_169402 3000 nt of promoter + ATG
attatggtccctttttaggttttaagaacagacctttggctgcttgttgtggagtcggaggtcaatacaacttcactattggtaaagagtgtggagaaaacggagttagctattgtcaaaatccttctgagtatgtgaattgggatggttatcatttaaccgaagccacgtaccagaagatggctcagggtttactcaatggtcgctatacaactcctgctttcgactggtcctgccttggctcttatgatttcagtggataaagatgatttagtagtggctctggcctttgcaagaaaaaaagaagagttgcagagaattgcaaggaatcttggattacaaattaatagtttattaaaagcacttgaagaattaaaataaaaattgtatccaaaaaaattaatggcctgatattcgaaaggaatcttagattatagactggagattcgtctatgtgtatcccatgcataaccttacgtgtcttaaatacgtggcatgaacgtttctgaaactagtgcattttcaaacaattattgatcacacaccaaaaaaacataaacaaaaaaaatttatattttccccagtttactatagtcttggttgcatagtaaatgaaatccaccactgaccatatttagtggtccaaattaaaaagggtgataaaaattgagttacagaaacgacgaagacgattcttcccatggcttcttcactggagaagcttatttcaagctttctacttgtcttgtactccaccaccatcattgttgcttcatcagaatctcgatgtaggcgttttaaatcgatcatcagctttggtgattccatcgccgacaccggaaattatctccatctctctgatgttaaccaccttcctcaatccgcctttcttccttatggcgaaagcttcttccatcctccctccggccgttactcggacggccgtctcatcatcgactttataggtacctaatttttcctctctttttaatgttaggcagaaacgtttgttctcctctgctttaggtctttcttgcttgagcagaaagttagaaaccctatatgctttctgagtttcttacttggacagctgaattcttgggactaccgtacgtaccatcttattttggatcccaaaacgtgagctttgatcaaggtatcaatttcgcggtgtatggtgcaactgcattggatcgtgtgtttcttgtgggaaaaggaattgaatctgatttcaccaatgttagtttaagtgttcagcttaacatcttcaaacagattttacctaatctttgcacctcgtcttctcgtggttagaaacttagccttgtttcttttccatatctatatgatgttgaatcaaggtcacttcgaatgttttttcttttcttttctattggggtttagattgcagagagatgcttggagactcgctgatacttatgggtgagattggagtaaatgactataattaccctttctttgaaggcaaaagtatcaatgaaatcaaacagcttgttcctctagtcatcaaagctatttcttctgctattgtggtaacatatcttcacatatttccctccccctccccttaaaaacgactaattttcactaataaggcaacaaaactacaggatttgattgatttagggggcaaaacgtttctggtccctggaaacttcccattaggatgctatcccgcgtatctcactctatttcagaccgcggcagaagaagaccacgaccctttcacaggttgtatcccacggctcaatgaattcggagagtaccacaacgaacagctcaagacagaactcaaaagactccaagaactatacgatcatgtcaatatcatttacgccgactactacaactctttgttccggttatatcaagaaccagtcaaatatggtccgtttgtttctaaatttgttggcattgaccatcggttgatctcttgaccaacgttttgtggttccttttttagggtttaagaacagacctttggctgcttgttgcggagtcggaggtcaatacaacttcactattggtaaagagtgtggacacagaggagttagctgttgtcaaaatccttctgaatatgtgaattgggacggttatcatttaaccgaggccacacaccagaagatggctcaagttatactcaacggtacctatgcatcacctgctttcgactggtcctgctctggctctgaatcagtggataaagagtattctttcagcagttaaaattcagtttttgtgtaaaaaaggaagaatattatggtgataattggtgaggattaataagaacgagttccttatacggcaagtttttgacataatataatatttgacttttgaagaaaaccataaatgattctatttgatgatgataatgcaaacaagatttaatctctctaaggtgtaaagaaattccaaatacttatgtgacactgaaatgtggtgtaagatacaagctcaagatattgattggtttagttagcaccaaagctccaaatttgcatctacaaaacaattgacatgcaccatcatttgaacaaggtttgcttggaaatgtttgaagatacctaattgattgcctccaagaagataattgttgtgctaatataatcttcttttaaacatagctatcattatcaaagtatttattcttcttccattttcattgtctttgacttaatatattcgtcgttaggggaaaaaacagctacagtgtgtttatacttttccaatatatatacttttttgtcgactttccaatataaattttatgttagatatgaattgagtatatacatactatatacatgtgagaacttaaatttggtgaaaaacaaataacttttttaagtagatgattaggtaagagacatgatatctccttctcctttcggttgcattttatccggtttcactcttttggttttagaaactcgatcataaaccttatatttgtttgcctattctactcttccccta

SEQ ID NO: 5817 - DNA, 3000 bp, Unknown
  misc_feature (1)..( 3000): cDNA_ID_3078500_gDNA_ID_1620819_Annot_ID_169400 3000 nt of promoter + ATG
ttggattacactaaattaaaagtgattaagacgagagactagcccatttgtatccatgcataaacttaggtgtctttttatacgtggcactaaagtacgacttagccatctaatctaaagtggaagtttctgaagttacttcattgaacactcaatagtcattaataaacctgaccattttcctcaatttactaataggcgttgggataatacataaaatccaataactaatgcctcaaactctgcattagttaaagattctaaaaattgagtaatagagacgacaattctcctatggcttccctcatactatcgcgtgcgtcacatatctccataaccgtttcataattgttctctttctttttcactcattttataatggattagttaaagaatccatttatatgattataataagtaaggaaggccaaatagaaaaaagaaaaagcaacgaaggaatatttcgttattactagtttcacgaattctatcatcgaagaatccaatttcgtgatggagcctccaacttgtctgacgtttctgccgttaacttctttttctcatttctctctttcttactggcataataaatgaaatccaataattgccacatctcttgcattattcaatgatccaaaaagactttaaaaattgagtgacaaagacgaacgaagaccacgactagctcttcccatggcttcttcactgaagaagcttatctcaagctttctacttgtcttatactctaccaccatcattgttgcttcatcagaatctcgatgtcggcgctttacatctatcatcagctttggtgattccatcgcagacaccggaaatattctccatctctccgacgtcaatcatcttcctcaaaccgccttttttccttatggtgaaagcttcttccatcctccctctggtcgtgcctctgatggccgtctcatcatcgacttcatcggtacctaatatttcctctgtttaggcaaaaccacttgtaatcatctatctgctttaggtctatcttgcgtggaaagcaagatagaaaccctacttcacctgagtttttctaatattgtcttactatttgaacagctgaattcttgggactaccgtatgttccaccttactttggatcccaaaacgttagctttgaacaagggatcaatttcgcggtgtatggagcaaccgcattggaccgagcgtattttgtggcaaaaggaattgaatctgatttcaccaacgttagtttaggtgttcagcttgacatcttcaagcagattttgcctaacctttgtgcctcatcttctcgtggttagaaactcagccttttattttgataaacagaaacttagccttgttcttacagggtttctttatttttgtgtttagattgcagagagatgcttggagactcgctgatactcatgggagagattggaggtaacgactttttttacccatcctccgaaggcaaaagtatcaatgaaaccaaactacaggatttgatcatcaaagctatttcttctgcaattgtggtaacaaatctttacacaaatataatcacatatctgttttatactttaacaaattaagcaaccaaactacaggatttgatcgctttagggggcaaaacatttttggtacccggaggcttcccagcaggatgttccgcagcgtgtcttactcaatatcagaacgcgacagaagaagactacgaccccttgacaggttgtatcccacggctcaatgaacttggagagcacgacaacgaacaacttaagacagaactcaaacgactccaaaaactctatcctgatgtcaacatcatttacgctgactaccataactccttataccggttttatcaagaaccagctaaatatggtccgtgccacttaaaactctttcgttgaccctcatggtttaattcattaaccgagatattgttttgtttttttcattagggtttaagaacaaacctttagctgcttgctgtggagtcggaggtaaatacaacttcactattggtaaggagtgtggatacgaaggagttagctattgtcaaaatccttccgagtatgtgaattgggatggttatcatttaaccgaagccgcctaccagaagatggctgagggtatactcaacggtccctatgcaactcctgctttcgactggtcctgccttggctctggtacagtggatacataaaaggagcagttagaattcatttgttgtaaaaaaaaaaaaagaggaagaaaattgtgtgatgatgattaacaaaaagattgcttgtacggcaggatttgactagtgacaaaaatttcgaggatatatgcatcaatcttatcaatgaaaaataccacacgcaaatagaaaatcctatttatacggttcgtagcacgagttgcatgttgagaaaatcctatttataacagttccgtggaagatgttggagaagttttggatgaattaagagggacaaacgacagctaaggattaaataatttcataacatcctttgaactgaaagattaagaacataatacactatttgggaaaacttaaaatactatattacaatggatggatataacagatgagaacatgcatgtgaggttcattgattacacattcatttaaattttgaaaaagttcaagattctatatataaaaaagaaaattatttaaaatttcttatttggattacactaaattaaaagtgattaagacgagagactagcccatttgtatccatgcataaacttaggtgtctttttatacgtggcactaaagtacgacttagccatctaatctaaagtggaagtttctgaagttacttcattgaacactcaacagtcattcataaacctgaccattttcctcaatttactcattggcgttgggataagacataaaatccaataactaatgcctcaaactctgcattagttaaagattctaaaaattgagtaatagagacgatgacgacgactctcctc

SEQ ID NO: 5818 - DNA, 3000 bp, Unknown
  misc_feature (1)..( 3000): cDNA_ID_2041497_gDNA_ID_1620819_Annot_ID_169396 3000 nt of promoter + ATG
tatataaattaactaaaacaacaatttcattttattttgttacaggaaaaagaattgaaaagcagtgattttctcatatattaggatttgatctgcagtagccgcatgataataattttgtgcatatacataaagtctttgacatttattttaaaattgtgcatattttacatattgaagtttgtatttaaaaatacttagttttataatcaagaaatcagtaatatcgctgataaatatgactaattggattaaatttgatatagtctatatatttgaagtgtgtaatttgtgaatatgaattttaagtaacatcataataactactgctctatataacattgtggaggttaaaatgtaagaaaggaaaatacagatagtataataactaaacaaaaagactaaacatcagaacaattggagatattttatagttctttttcaaagtattataatatttacataattatatagattattagaattattaattagttggactattatagatatcgttttttttttaattattgtgtgaaatttgatcattttaaactaccaacgatcccaaagatgatgcaagagaagagtctttgaccaaatgtaagagaaaaacgtgttttcgatgattgatggatatggagatcagaattaagaaaccctgatgaagcactcaaactcttcactataggatgaaggattccgtatagaacccaattacatatgtaacctttcttggagctctctcggcttacaactacatatgattagtgggtacctaaagcatggattgataaagtaaatatttataagattctctaatctctatagcaaatataataatatgttggcgtgatgataatcgtgagactaaagtaggaaacaaaaaccctagaacaaaagatgattcatgtgtgacgtattcgagaaggaaccttaaaaacgtttgtgatattcacattaaactggtgttatacatccaaatccggtaatataaatatagtgttgaattgttgtgtgaatcaaaagagagaaaatagggcacatgaaatagttgtgagtatatcctaataatccgaacaaaaaccaaaaacatatgacttcctacaataactcctccggcagtctcgccctggccgttgctcttctatttgccggcgccttatatatctacttctcatcacgttcagcttctgatcccatctccggtctcctacaaaatgtcaacactgtaagttgattcatataatatatatggaattctagagtacaaataaaggaagatttgaaatatattttgaaatggtacgtgacagagattgatacagtatccggtggacgagctagagacggtgctggacaaggcgtcgacagggaacaacaagacggtgataatagcaatggtgaacaaagcttacgtggaggaggatggaggagggaggacgatgctggatctgtttttggagagtttttgggaaggagaggggacacgcccgcttcttaaccatctgatggtggttgcagcggatcagacggcctacgatcgctgcctcttcaggaggctccattgctacaagatggatacggaaggggttgacttggagggagagaaagtatacatgtcaaaagatttcatagagatgatgtggaggaggactcgcttgctcctagacgtcctcagccgcggctaccatattattttcacggttaggtccgtcccttgattttgtaacatatataacaaaacacttaatttgttgctcaaacaagtagtgtatatacaatgttaggatacggacgtgatgtggctaaggagtcccttgtcccggctaaacgtgagcttggatatgcatataagcgtggacagaaataacgtgagaggacaattgatcaacacgggattctaccatgcccggtccaacaacaagaccatctccctcttccagaaatggtacgacatgaggctcaagtctttgggcatgaaggaacaagacgtcctcaagaatctcctagactctggcttctttaaccagcttggtctcaacgttggcttcctcagtacggccgaattcagcggtttctgccaagacagccctgacatgggggctgtcacaaccgtccacgccaactgttgcgtccacatccctgctaagatctctgatctcagtcttgctcttcgtgactggaaacgctacaaagcctcccgtgtcaacagcaggtggagcccccatgttgagtgcaggcgttcatggaaggacgttcattatgtccccaagctctgactttcttcgttcatataagcaaattaatgagattgctatatagtatacacaattacatcatttataagtgcatatcttcttttgattaatcctctagctagctagatgagcaattctcttttaacaagtaattacaaaacatcttatatgtgtgttacaagctatattctcgttttttattttttcttttaataatatagagattaatttactatgttagacaaatatgtttttgttacaatgattgtagaaaaaactacttggctaatctaattccgaaagagaggagggcaaaatggaaagaaattgagaatgatctcaattaaggtagaagagacatttatatcatttcttacctaatggcatatcatgtaagtaactaaaagttttgttaattttgatatgtagtaaatatatatgtacgtttattggattcatattaattcccttaggtaaacagaatgttacgtgaacgattgaaaatctcacagagtaaaaacacaaaaaccctaattacatgacgattcttatgtgatatattcgtgaaggaaggaaccttaaaaacgttagtggattttctatatacattattcacatatatccatcgtttatataaataaataaataggttaattgtttagtacaaaatcacgagagagagaaataaaaaaggcgtgagtctcctaactagctcctaataatgcgataaaccaaaaac

SEQ ID NO: 5819 - DNA, 3000 bp, Unknown
  misc_feature (1)..( 3000): cDNA_ID_2041515_gDNA_ID_1620819_Annot_ID_169391 3000 nt of promoter + ATG
gtggtatgattctcgctttgggtgcgagaggtcccgagttcgattctcggaatgcccccttgaccttttctatagtgtatgatttagatgcaagctgaaaatggcttatgatattattatttttttagtatttagattttccacagacctcgttcaaggatcgaggaccatatatttccatttcattttcagtaagagaaaatcaaaaacaaaaccctccccacagtttcattattaagtgtttaatgcaatagaagagaagagcataccgctgtttcacatccagatccaatcaataaactttttaactagtacacttcatgtagggaagaccgtcatgttttgtaagctgttggattcacaaagaatagctgcagaaacagcaaacgaattgtgattaagtatgtaatggaaatgcagagggaagcaacaaatctctaagagaaaggagagaatgctaatagaatgcattaactgaacaattataataagcagggcatttggtctagtggtatgattctcgctttgggtgcgagaggtcccgagttcgattctcggaatgcccctttgactttttggaaaccaaagttctaaacgccagctaacatttcatcaattctaaatttccagactatccacctttactaataagccctgatggctgaaagtcaactgatatagcccagatctaaaaagtaatttctgtcttagatgatctaaacaagaaaacattctaatatcatattcaaaaataaattaaagaaaaatttgaacttactgcatcttgcctgcttcatcacgaatagaactctcaaaaggtaaaaaaaaagcatcaagagtgaatttcctgtaataacaaagtcaagcatgaattctcttttccacaggattacaacaatgcaatgcttcaatgggaattaaatcaacaacagggcatttggtctagtggtatgattctcgctttgggtgcgagaggtcccgagttcgattctcggaatgccccactatctttttaagtagttgatctaaattcaagtagataattgcttagaaaaatctgatctttgtttagtcatagttatgtcacagatcttgataaaccatatattactcttttatttcagcaagagaataagtgcataatgcaaaggaaaagaagaacataccgctctttcacatccgatcaataaatatcttaaccagtgctcttcacatctggaggaccaacgaaggagctgcagcaacagaaatgaattttgattaagtacctaccagaaaagcaaacgaaacaacaaaatctctgaatgaaaagaaagaatgcaactaggaggcattaactgaagaacaaaataaaaccagggcatttggtctagtggtatgattctcgctttgggtgcgagaggtcccgagttcgattctcggaatgccccgttaaattttttggatgtctgtttcatatgccatttgataactatcatagaacaaacctgattttagtgtataagttgtcaagtgcattttcccttcaatttttaacagtttcccattactacatttgttatacacagttaaaatacaaaaaaaaagagctagaattgcaatgcaccttggctttcacgtccactggctcacaaatgcagcaagaaaacagaatatggatagcggatttaacagagaacttcttcactagctgaatgctgccaaaaaatttcaagagataactgcaggaagtgaaaactgaaaaagaacacatctttaaagggtatttaagtttcaagagcagttatggatggattttatcaacaacagggcatttggtcttatgattcacagagtattaagcgtaggctctagtatccagctgaaagtgataacctttaggccctaataataaccattgaacaaagaggaactataaagcagaatgtgtcagcaacaatgatatggaaagagcaagtacttacccacttgccgctgaatctcattagctattaggttctccaaacagctcacataacaattggattctattacataaatgtgcgccaagaaagctggtttaggaatttcgtcgaacatgtggtgggcgtatctcatgaaggaccatatcaatcgaataacgactgaatccgatgaaaaaaacgctcacatccgttccgacgagacgaacgtgaatccggatccccgtcgtagaattgtgctgtaacgcataacgatgacgaacgagaggtagagtgacatgcaaaggatttttcaaatctttttttttttgtgcaacgaaacaagaaggcaaaagcacgaatttatctcctaatttttatgaaacgaagcaaatccggtttaaccgattcaaatcgaatcgaaaccgtataaaaaaaaaatctgatccgaaaacaaaaccaaagtgcaactaaactgattcagttttaatgttcccttatccaaacaaccctaactcaaccgaaccaaatgaaaaccgataaaacctttaattaataaaaaccgacaacatttctgttcctatgattcataaaccgaataattaaaatttggttatctctagtctcaacgctgacgaaatgaataatccaagctacaaaatgaatgtcattatttatttaatcatatccttaattcgtcatgtctgtttcaaagcaaacatagatacattttgatttgaataatttaggtcaaccattaacaaaatctataatggggtaaggtgtcaaatgaatacaagagggttggtatggtgggttagaagaatgttcataactacctcaactacacacaaatctggtatttgtggtttaagccgagctaaaccatagagagaagccacatacataccataaactgcaaccaccaccaccactccacatgacaagagaggttcaccaaacttgacccgacccttattaccccctttgaatgtttggggtaagtaacatataaatatacagatgcattggagggagttttgtattagtcttcaacatg

SEQ ID NO: 5820 - DNA, 3000 bp, Unknown
  misc_feature (1)..( 3000): cDNA_ID_2041539_gDNA_ID_1620819_Annot_ID_169383 3000 nt of promoter + ATG
taaaaaatgcaaaataatcatactaagacaataagtaatatagctcttttccgttattgtcaagttttaaaatttgataaataatatatcaaattgaacctttcgagatgatgaattcaactatatctttaaaatttttaaaataaaatgtatgtgatcgtgaaaacgtttaaaatatatgtaaagttataaaaatggatatactgcgtattattcttgacttcatataattattttgcatttttttttatgtagagggtaaagtagcaaaattgggcgactttgagggttttttttgctcaaaaccctaatgtttatataggtagaagaggaatattatccaaattatgtatgtacatattttgacatcatcgtgaataagaaatattctatattcctatattctaagtgtaacattaatttctataatttatttttttatgccgggtatcatcagacagtaattttgtcggtagaatgaacgctatatcaaatatctttttagaataaaatgttgaatgattattcttaaataagactaattttacagttgtaccgatatttttttccatatttgcctaaattgtattaaccaataactttggattttttttttgttttaacaatttcgagtttcggattttcttaagttcaggaaacataaaccactttatataaatcgaatcaatatatatatatatatatatactaaaatgtgaagttttagtatctattacaagcattgatgtgaagtttttactttttagtatcttctgcactgcacctaactacgctttcataacatggcttgcaatggatgacagattgactacatgtgaacgaatggagaagtgtaatactttaatgactacacttgtacatttttccaggaaccggttgagacaagacaataagcaccacctcttctttcaatgctcgttcacaagacaagtatgtgagaagctagctagtaaaagggctacgtcaagaaaagtaacacctcagtttgggatcaaatcactctactcctaacggatgcaacaatcgaaatgaaagctctactaattactattgcagtatatgttccaaaatacagtccacaccatattgagaaagagaaataatataagacatggtgaagaacctcaaacaacttcaagccttggggaaaacatcgataattgttcatattttggctttctactaggagataatttctaaactctatctagtagcgtatgttaaaaacaactcaaaaatcagttgcatttgatgtaataccggttttttgtgaatagattgaacattcattaaaaagaaggttttttacgtgatatagaggataaatagttaatgtgttaatcgtaattttgtatttagccttttctaatctctcttgtacattactcatctaataaagcaattcattctaaaatttaattattattttaaatttttgttgtagagtgaattgatttattagatgagcaatgtatacacaagatagatgagggcaaaggtaattacaataacatccttaacacattaatttatatactctataactggtataaaaaaattagtttgaatcattaaaattataattgaaacgaagattttatgcgagctcaaatagatttacagaaaataaggtatagaaagaaagatatatttcgagtttacaaaagctggaaacagtccattaacttaaagatgtgatttttgtctgattatcccatatctaagagtaaatgcgctatattttcttatatattttctccaatttaaaaagatctttgtcttatattcttcatcttacttagtagatacgcccaagactaaatactgactaaattgatgtgtaatcttttagcttccccgtagatatatattctttcgtaattttgatgaaataattaattgcttaagacaaacaaaaagttggtcaatattgtatgacatatataagtactaattaacaagttggaagatttgtttctatcttttattcctcgtttgtaatccacatgaaaacttttctagtttgtctacttcccatatttagtttttcttttctatttgtacaaattcaacatctatctgttcgctgcatttttccttcaaccttttaaacatagaaattacataattacttttcttaagttcttacgtttgaccaaatttttgtgtttcttttttttgttttttaaattagatattattccaaataaagggaaccaaaataattttaccccatccagccaattcacaaatcacaaccgtggacaacaagtggattagtaaaactaagaagaccgaaagatagtaatcttttattattaacaataaataaataaatatgaaatctattttcctttggtaagaatatttttcttaattatactattacaagtgatgagtacaacaatgacaaatcatatatgccttaccaataatgtaataaatatattgttacagcaaaacaaaaaaattggggttatcaagtaatttctaagttctttcttgaaataaaagcaaaattaaaatatctaaattatatttttatttcctccaatagaattgaagaaaagcacacaacatttttgttttaagcacaacttttcaaagaaaaaatcacggaaataaatgtggattcatgatatctctctccaggtggtttaaaatttaaatcattaaaaaaaaatgatagagatctttagaaagctaaaaacatggagtttgaaaattcctaaaatctcagaactttttttagcactacgccagaagagccgattttgtctcagatttactttcctttaatctctcctatttttaatgacttttatttctttctccttttgcaacatatttttctccaccacctttttttccttcaccattataaattgctctcaatcatttctcttttgtatattcataaactagacaccaagagacaaaaaaaacacacttaagtaatagagagaacacatcacaatg

SEQ ID NO: 5821 - DNA, 3000 bp, Unknown
  misc_feature (1)..( 3000): cDNA_ID_2041493_gDNA_ID_1620819_Annot_ID_169398 3000 nt of promoter + ATG
tctgagcatacattggcacacatccatttccccagtagcctttaggcaaaggtggattcatcaatctccttatatttatcgaatacacaaatttcacattctccttttcctcagtctttgcagctcttaccctgaatttcgatattttattgtttcagatcaaacacatttcaaaaaatttgattgaatcaaacatagtgaagaagaggttacttactttgcacgccaaatgtaagcaccaagagcttcgaatgtggtgaaattcagacccgatttctcgagtaattgagccttcaattgatccaaagaatcgtcggtcacaaagaagcagtctcttttgacgtctccaatggcttgtccatatggatcaaagtccttatccaggctcaagaagtcacgaactggagctccaacccaaggcttctcccttggaccaagtaaacgttctctgtcccaaaccggttcgatcgaaatctttgtcgctccgcgagctaattccgccatagcgttgaagaacagactcgcacctaacccatcgcagatcgcatgatgaatcgatgcacctagaacccaaccaccacactgaaacatagtgacctggaggatacaaggattgaccattccttcctcccgggtcggatccggtaccaatctctcgacgaaacctggatcgggtccatccaaatacccgactgactcaagcgtacagttcactgtagcgttgactaaaggcacgctttgaccagcggagcagagtagttcaaatcggttatcggaggcagagcgacggagagagccagcaagagggtagtagtgaacgagagcggtggcaagagaggcggatacgacggcagaggggctttctccggcgacggtggaagaggaggaggagtagacgcggaggtaacggaagctgacgtggaggttgttatcattgtcgagatgggaaagagagagagtttggtcgttggagagtggttggtgagaaggttgaaccagggctatatcggtaatttcaagtgtcgccataccttaataataagaatggtatgggtctttgttacttccaaaataagttttggggtccatatttataagagaagcaaaatcaatgccttgaggggacacagctcacgagagtaggcttcaccaactaccaaacggtcaagtcccatgtccaaatttctcacctacaacagtttcaaacaaaatcattttagtctttttgttattcataccatacttcatacttgtcttcactgtttttatgatcgagttttgtatgagtcttttcaaaattcaatcatgcttcttgtcttcagtcttcactgtttttctcctccacaagattagtatttttttttctttttttgtgcgtaagatagagttgtggtcgaaaattgtaagaaaaagaatctagcgtcaataatacaattggtggaaagaccaattttgaatctgattagggaaaaatgttgactagtgaacaaaaatttcttggtaagaaactataatttttttttttcaaaattataaattagaagtcgagagctattggaagtcggtggaactaaatggttgattggttcattagtaaaacacacgtggtgccactacacttttttaatagttacttgactggtgctgtttgcaaagttattatgattgatgattatttttgaaagaaaattggaatataaattcggttaggtcagtattgtcatgtatttgttaaaccactgtatattatactcctagcttagtttaatttatgagatttaagtggaattcatactaatcaaatgtgagatttcttgaaaattgtagtggaatttcttcaaggtcgaataggattattaaagagatactataaaggagcaattggtgccgacaaaaaaaaataaaaataaaggagcagttggaatggtcagctagaatttcatactccctccgtctttttttacttgatgtttagcagaatacatacaaattaaaaaaaaaaaaaatttgtttatttctaaattaaaatatcatttattatttaatcaactacaatctaaaaaataaaaatcatcaaaatcaataaaaatataactaattctgcattaaaagtttaaaacatcatttattaaagaataaaaatataaagcttaaaacatcatttataaaagaatttagaaagtagtactaatataatcgttttttaaagtgagccaaaatagatgactttgacacaccaaccaaaagcctaaaaagtggaacatgtaggctttcaaggcaccgcggacaagatattgttaatcgcaacgtcattattattgatttcgattcgtccatctgtggaataatacgaatatcattattagagtatttactaatcaaatataaaattatgtagactataacgaatcatttttttcttcttccaaataggtaaatactctaagaaagatattcatattattccaaaatgaatgatagctatatttgatttctataataagattccacataaaaactgactccataaagatatagatcacgcagagtcgcagactatcgcgtgcgtcacactactcacacatctccataatcaattctttctttttcgctcgtcttgtaatggattagaatataggtaaagaatccatttatatgattataaaatggtaaggaatttgcgaaaacccaaaagaaaaaagcattgaaggaatatttcgtaatcccttattattttcacgatttctatcatcgaagaatccaattttttgatggagtctccaacttgtctgacatttctgaagttacttcgttttcaaccaataagcaaaatttctttttggaaaataacaaataaccaaattttataatttctctctttcttactggcataataaatgaaatccaataatggcctcatctcttgcattattcagtgatccaaaaagactttaaaaattgagtgacaaagacgaacgaagaccacgattagctcttccc

SEQ ID NO: 5822 - DNA, 3000 bp, Unknown
  misc_feature (1)..( 3000): cDNA_ID_3078565_gDNA_ID_1620820_Annot_ID_169427 3000 nt of promoter + ATG
aattgaaattaaccgtatctcttttacacgcgtcatgaagagatatgaaaggaaacaaattaaaagaacttcatagattataaaatatgtttgaacttagcaaacgatccttttttctcttgcatgcttagaattaacatgtcgaccaactatcacaaaacaccaagaaaataagtgaaatactctttgagtgtttcatacagatcgagtcaaacttgactcactcgtcatttacctggtattctagtttgagtcaggttaattttactttaggaggctatacgaatcttgacaaaaaaaaattgtagttaatattaatatatatatatatatatataagtatgtgtttagctacactataatatataatctactcattagttgtacgtgaaggttaaaaccgtttgagacgttgtccataacatgcttaaattgcttgatttacttttttgtttgagttcaagtggataatcctaattattaatgacataaacatattactacatttaagcttataatatttataaaacgtgggaggttaaatgttttaattatctatatagtactaatcatgatgagacatgaggacacctagctgtctagcggagcatgcaacatgcaccagagagattaagaagttgtcattctttcgaaaatacccaaaaaaaatgatgggggtaattcaaccgtggaggagttaaaatgccaaatgatagagttgaagaaccacgttttaaggacatcaaaccgagttcggcgaccaaaccgaagatatgtgcaataagtcattttggtctggtttattttttactcatcctgtaatttgcttcagttgtaatatggagagatttggtcaacctactatgtaggaaccatctcttctactttcccattatttccttgcttataggagttacgtctctattttgttttgttataactatcaccaatgttaatatgcatgttgtccttctttactttgagtcccgagaaccttgttttcagaactccgatcttctcactattcgcgcaagagtgtacataacagcatgatcatcgcttacatgtacactaaacatttttttttttaacagatatgacacacatgaaaaggtatttaatcaagttggtcactcatcaattcgatccgaccatctattatgcgactatgcatttagttttggatttcacatggttccaagttaattaatgccagataaaaaagatttacggtatagtttttcttacgatggtcatgcattacgataagaacttcaaaatttcttgcacatttaaaatccggtctaagaatcagtgtcaaaacctcatataaaccatcttatttcacagaatgtaagacaatgactaacacaaacatatagggttcaaatgattacagcggtacgagcggataaaatcatttacggcataaccactttttatttacttttcataaactataatctctaatagtaaaaccaaaaagaaagaaaaaaactatcgcagaccaacaacagattgcttttacatacaattacgattagtccgcaacgctttgttgtccgccctaaaaataaagctgactatattgctgacggatttatctatcccgaccgccgtcacctttgaaacacataacctatattgtcacttctaccacttcttttttagatttcagttagaatgttaataaaaatataataaaatgtttgccatagtggtgtaattctgttaaaatttatctccaataattacattaaattataaatatatttgaacaaaattaactaaaaatatattaaaaagaattctttatttttttggtgattaatttaaaataattcctaattattacagattgttttctaaaaattattatatttagtttaaaagttaacagatgtagaaattttcaaaacttaaaaactaaactaaaaactccagttattcaatacctatactaaactaaaaatctactattccaagagataaaaaaaaaaaaaaaaaatctgtttccggaggaaccgcgtaatcctcttctcccaagattacagaaacaccctcttcttcatcccacgacagaaaaaacaaaaataaaacaaaccgaaagagagggtaaaatagtaaattcacattgactttcacatccctaggaccagaaaaatggcagagctttgaagcacacactgtctatatataaaaacacgctcacatttctataaaactataaaacctcttcacacctttgactctgtctctctctctctctctgttattttcctctccacgccagtttcgttctgatgaaattctgttgagaatttcgataatactttggcatcgatttgtctgtgaaaggagaacaaatcaaatcggcgacgaagaaattatgaggaggattatttcttcatcgcttcttctcctggaaagtccttcttctccctttttatttcaatttctttcaatcaattttgcttctccaatcttctggcaattttttttgtacttttctgaatttttttttgttggcttgaagatttttgaaatccattttttctattatgtgaaaaccattatacaaaatagtgatttatcaaaaaacaaaaaattcgaattctgtaacaaaaaaaaaagaaattgtggaattttatcttgttaaatccagctttttctattagtttgtattatttagattgtattgatgattaacattgatatacaactttttttttttgaaatgtatatatagattatttttttatatatatttttttgtcctccgaaattaattagagttcaaatgaatcatttctaaggaatattgtttacgtaagtgatatgatgcggttgaacacaattttctcgtgccaagctatacgatttgattttttgaaatttgtttttttttgctattttgtgaaattaattatacaatttccttttttgtttttttgaaagtctctgaatttgaggttgttgttgttgtgttttgtaccaatg

SEQ ID NO: 5823 - DNA, 3000 bp, Unknown
  misc_feature (1)..( 3000): cDNA_ID_2106384_gDNA_ID_1620820_Annot_ID_169435 3000 nt of promoter + ATG
tacagggatttgcccggccggactctgaccagcctgaaatacccttgaaaatatttttttgttttgttaatatttttgtttaattgatagatttttgtttatgattttctaaaaaaagagatgaaaaccttaaccctagttttctaattgtgttttactataaatgtgaaaagaaaatctttgttccactatttagtttgaagtattatcactttatatttatttggttatgagtttaaacaattaactagatagtttacccgcacagtgcggggaaaaacaattattaaatatatatattgtaaaaaattataaaatttactggattattatttaaaatctgaaattttcttgtgtattatgtaatgtaatatacttttctatttatttgaaccaacgatttttcgcatagaaattatgattacctatacattgattgatattaatatcttcgttaacatataatctttttgtttatatagaaaaaataaaaagggttatatattaagttccgaaagattacttgtttaattattaggttgttttaattaaaattttgtttttaattatttattactttaattggaatttgtttttaatttattatgttcttgagatatttatatataatactaatgacaaattttgtaaataatctaataaatgatggacaataaatcaagttggttgcgacacgtcagcatgacatctctctaaataacacggtagctaaaagttattctcttaagtgtgtttctctattaatatatagggtatttagattatttatttggttttaaaattttctttttaaactaaactggttttaataattactagtggttatttagtttcaattaactcgtttatatatattttttccaagagatattataaatcaaaaaaaattctcttcggaagaaagcccaaacaccccggaaaaagccttatagcattgtaagggccaggttgggctttaaaatataagctcaaaatttttacgggtcagactccaatatatactgattttgcaggcttcgtgttgttcctggcccagctagtccgatggacatacctagctgtagataaagtgattttagggtttttgtgtcgttgaagaagataaagaaaatcacgattttgccctttattaaagggaaatataaaataaaaaataaatgtaattacctaaaatctgtaacactataaccaacatgactttggctactttctcgcagtatttactatatatatttatattttggatagtttttcctgctaatattgtatatcggataaatccaaaccaaactgaacacgatccaaatccgacccaaatattagaaataatcgaacgtgtattattaacctaaacctgaaaactcgaatcgaatccaaatgtagttggtatagcaaagcaaacagttatgattcaattttcaaaatttgtgaaattataaattatcgagttgtaatatgggtagtttgtgcaaaaagttcaaacttcgtgtagttggaagcttaattgcaatttttcatagagttgaaccgtaatctattctaaaataataataacaacctttatagactctaaactctatcgttagaactctgaaaaaattatttacatcacctcaaaatgttgtgaacaagaaagttaacacctcgacactacagtattcacgcctgacccggacccgccggttcgatcggttaaaccacgacccaaacatttctccggtttgagtttaatattaatagcagacaatttaaaaataaaaaaaaaccacaaaaatccaccattaactcgcgacccagtgaaccggttgaaccggccggcacggccgggtatgggttttaaagaaatcatttgattttgaaacaaaatttaggattttagactttgtttagtaatttttagaactttttgagttatttttggaacttttaaaacttaaaagtcttgaattgttgattaaactttttgaattgagttttagttatattaatagattgactcaactaagtgttcttgatgttttagattttgatgaatatttaacaatatggtgaaagagataaccgagattcgttgtttgaattcatgatgttttataaaatttttccgtaattgccaatgagtcattaataatctcttacttcttagtatttgtttgggaaaaatgtcaaaaaaattcaccaactttcgaatttggaacgatttaatcttgaacttcacggaagacaaataaatcgtaaagtttttgttgactttctaaataaatgacaaagtttttgttgacttgccatttaaatcatgtcgttaaacagattaataaaaaaaattacgatattaatattccgtttatttgctctgttagaacaaattatcgtcttttattacgacgttaatgtctcgtccgtatttgttttgcgattttatacttttagttggattttaaaaaaattaatcattttattattatttttagagttgcttatattattaaaatgttataattatgttcttatttataaaaccgtatgatctctataaatattaaatacatataataaattttaatggattgatccgtgatcgaacctggttgatccagtaactcagtgtaccaaaacatagtccgattcaccgtccgggtattgttcaaaattcactgctacaggataatcatacaattgtcacaaatgattacaacaaaaaaaaataaacaaaggaagattagaataactacactcgcttaacatacgttagtaaattaataatacgcccaatttaattaaaactcgttttttcagaatataaaacctcctctcgggctttttcttctctacttggactgaaactgaaactgaaactgaaacacttctctctctctctctttctcgcttccacgaatcgagagttctacaaattcgcttcctagggtttctcaattcttctaatttcttcatttctatggcgagtcaatgagcgaaatg

SEQ ID NO: 5824 - DNA, 3000 bp, Unknown
  misc_feature (1)..( 3000): cDNA_ID_2176186_gDNA_ID_1620820_Annot_ID_169440 3000 nt of promoter + ATG
gttgtattgtacaaaccaatagcatatgggaattttgctgccgaatgctatagagctaccttatgggcggagctttacggagagtatggaggatagaaatcaatgtgttcataatgtgatgtccatcgttatctaatcatgtacatttctatacgtgataaatcttatatctttagaatgtgtgattctcctgttgtgccattgttctgttttaagaattcatctcacctctatttaatcctaggtaaattcaaacccccaactaactttgttggttgtcataaaagtgttgagcacgtttgtataagctaattccccagaaatgattctcaattgctaaccctgtttcgtggacatgttatcttggacagaacattgtaatggaaaaagtttatgaacacacatattaattgatgatatccgcaacctgcttcaagacgaatttccgaggtcaagacgaatttctgcttagtacaagacccattaaatccccatatcgtatttcaaactctatttacttttaatgaacattcaaagaaacaacgcttctttattacaagttacatcgtttaattcattcaatgaatcaacgcgtcgatattacaggttacatcgtttcactgtttatgcttccatcaaataaaccctttcattttgtataaatacctctgctactagtgacttcatcaagacaaccacatcacaaacgcaaaacaagagcttaacatatttctcagttttcgttactctttacttctccttttcacgatggttcaacatcactgtcggtacgagttgtctccgatggttactggttggacgatctatgtcatggtattgagaatttacaaaaagtttcttaacccgaacgctttcgaactacgtcttgtcttggccgatgaatgggtaaacaattttatccaatttcttttgcaatttgcagattttttctttacccgtgtatccctcaacccctaaaatattgttttaacagggcacccaaatagaagcaacaatcggatctcgtttctgtgccttctactttgacaggatcgaagagaatcaatggaaaacgataactacgtttatcgttcgacctaactgcgaagcaataagaacaactcctcatgagtttcgcattctattcatggatcaaaccatgccttggttggtaagtaatagcttcttcataaactccattcacttttttcaaaacatttattttttaaaaacagatatctccgacatatctcttatagatgttcttgggggcgctcgttgatgttggaattctgactattaccgcaagtaacgggaatgatgtggccggattcaagctgccgttcaaaatcctggataaaaagtacaattcttcaccatcaatttcagtttatttcaaacatctcatgtttatacatatttgtagtaaagtgagtttataatctcatatttttactgattttcagcaaggatatattgctatgcaaggcttatagagaaattgcagtggacttggagaaaagatttctagcatttcgcaataacaatgttgttattgcacttgcttggtggaagattgttagatattatgcatgtgctcaccgtttgaagattgttaaccatgcacctatatcaaccatgtatcccgaacctgatgttgaggaagtaaagaaattaaaatggttgtcgactaatggaagatgattagaactattacaatgcttgttgcttaaaattgttatctcatattcttctttttttgacctcttatgttttcctccaacataatttcactcttttagttgtaatatttttataatttgtcaaaaaaaaaagttgtagtatttttataagtgatattatatattaataataaagtttttctttattcataatttctcttttgtaattaatgcaacaaatacttgattaagtagtacagttgtaatccggtgtctgaattaagttcacctacgaaacatttatgaactgttttatagctgaagaattacccacgtacagtatcataactgtttgtacaacgtcaaactataattacttactcaaattgtttgaacttcttaatctgttgttctgactttgttatgtgaattctcgtttgcattccatctacatttctatataagttaagtcttatccttttaactatattgtttgtctttaatgacttcggtctatgaatgtataacctaatttcttctcatgtttacgaaaaaaaagaaaaaaaagtagaacctaaatccccataaatgagttccgtttgaattgcctgtaacaatacattgtaccatgtctatatattatattatagaccatgcgtatatatctgcttggacgttgtagtatggacatatctaatttactacaattattgccatgaaaaattatttggaatttttgtaggagccactaattatattcagtaacccatcgcgccacaacactccaccctcttaagtgatccatagtattagggttcccatttcatcacaatctcaaatccgttcccatcagcctggttcgctcctctttaattattggggtttcttcattactggcgatcacgaagcgcccttgcccctgttaggggaaatcaatttgccgtctagcctcttcgtcaacctttggttcaatttaacttacaggtaatgtttactcaataaatttctcaatccaattgagacactcattttctatagactgaaattgaaccaaaaattgcaaaatttaattttgaattggtatatagcctccaaaattcagtgttaacgttcgtactcattttctctcagcctcctccgttccctgatttccacatgcctgatcacgtagctgctaaaatagttagcttagtttccgaggacggtgtagatatgttaaatgcttggattcaatcaggaccagatggcaaagccgctgttttttcaagtgaaactctttcttctattcgactagataagtccccttttctttattcat

SEQ ID NO: 5825 - DNA, 3000 bp, Unknown
  misc_feature (1)..( 3000): cDNA_ID_2176154_gDNA_ID_1620820_Annot_ID_169431 3000 nt of promoter + ATG
tacatataatgtatatatataattgatatatttatacaattattaatttatgatattgatgagaccatatatttacatagaagtttcaaaaaagttattatcttattaatttattgatttatgtcattttttacattggttccaagttgagaccgtaagaatttattaatttataaaagttattaatttatcgaatattaaattatagaagttttactatagtttacttgacatgtaagaccatatattctactatattttaggtagctgacaatcttttttcctaaacacgagaacatatatttatatatttacgtacatattatgtattttttaatgttatatttttgttttatatgttaaatgatgaaaaaatgctaggttttttcttaactggaaatgtttttgatttgataaagattgtagtgtaattgtaaatggaatgagctacgtagcaaatagaattggaccctacgttatcacactctcatcattagcagcacttccaacaaccccttaaaggcttacacacccctccagtgtcaatgtcaccatctttatttatgttctttttaacatgagaaaaattatacaccagattaagggtctaaatagtaatagttgaattcggggtgaatatggttgaatttaacggaatttagttataattttttgttcagtttggctgatttgattatgttatgttgctgaatagacttaagatccataaattttcatgaatttactgtatgaaattcatacatttagctttcaaaaggtttttagctatatgggattaattagttaagtatgtcttgtttgtgatacatcaagtgagattcattttcttaaaagacgtttgttataaatagaatgagagtgtcagagcttgtaacagttatatgaaacacacaaaaaaaagaattagaaaaacagtttattattgaaagtaattgtacctaatctaaatatctaatgacgctcatataacttttttaatgttgcttgctcgaataagcaaagatgttttactttatgaagttggaatagttttgaagagttgaaactttgatttgtctttatcaatattttttttttcaaatgatttttgaataaatgttagaattcttttgtgtgtaagctagcaattttaccgttgagttaaatggatcattagaactcataaaaaaaattaaaatagtttgttttcctcttaactctctcagatcttttagatagagagtcttttccatcgtttaattccgactaagatcggaaatttgtttcggttttgtttctggcctttccatgatttatgtatattttgctttgtgcgacctaaacaaattatggttttatgatggactttttctaccggcttgtctggtttttcgtttttttttttcttttgctttaggtaagctatgatctccatctgtcggtgtttatcgttgtcaatgtttccgtctttttcacaatcctctctgtttcagtcaagttgtttcgaggaataatatcttcattaaatcatgttgctcatatgaaataggagcaacgattagtctatatcaatttggatgtagttcatggtggagcttctccggtgattagtggaaattttgatgcggtatatctaaatcgaaatcggtagtcggaaggaggattttttttcacagttctttggtcgactagtggtagctagtcggatttgcaccgctcgactcgtcgcataaggaaaacaagtccttcccacatgtcaatgactaaatcctagtattcgatttcatgtttatcttcattatactttgatttagtcttgggttttggtctattcgcacgtaatcctactatacattctatatttttgccctttgcacttattaacggaaaagtccaacaaaaaacaacaaaaataaatcaaaaaaacattcattttgaaaaaaaataataattttgatctaactaaagttagtaagatacatgtgactcatgttcaattcaaagaaggctcacaagtctggaagttttttaaattgagttcgcgtcctcaactttccctaactaaattttacacatcaactatatctaactaaatttagcacatgaacggttttcaaataaaaattaaatagttttggataaatggcctaaaccgcataagttgaaaacaatttatgaaatgtttggcaacccaaaaatgaagaacttgtttctggtaagtttgataactgacttgtatagtgttccgctagaaaagattgaggatgcataatctatatcagtatttttgaagtatatttttaaagttaacatttattatagtaaattatcacaaagaatgtcattatttatacctatgtatgtaaaaaatctcacaattaattatctactatctatataatcaaacacaattaaaagattttaacattaaatatataattggaaattagataagtagcaatataaataaataaagggtcaatgaaatatatgttcatggagagctacataattaaggaagtatacatgtatggttgatatttagctggaataaaacatgcaaatgaatatgcctattttagccctattcccctaacatacattaagccaactgaacaaagatatcgaatatctcgcattaaatgcgggaacaaactctggaaacatatatcccgtcggcgttacttgtaaaaacagagaatcataatgatgatcaaagatttaatcggggttgcgtgttggcctatttattactcctctatcaacgttgcttcctcaacaaaagtagaaacacataacactgtaaagaaaacagcattaacttctgcgaagaaaacaagagcgaagtacttggagacagaggtaagcagttaatgctcatggatctttgttctgcctaggtatagtgtaataaatggtacaccccgacatagggctttgtcttctatcaaacttgtccgctaacgttacagttatggttgattatcaacagtattcatg

SEQ ID NO: 5826 - DNA, 3000 bp, Unknown
  misc_feature (1)..( 3000): cDNA_ID_3078558_gDNA_ID_1620820_Annot_ID_169434 3000 nt of promoter + ATG
taatctatgtgaattgtttttaaaactgttgtattttaaaattagcatgttttgaaagttgcacaaatattttttttctaaaacaatatacgttaaaaaaaaaccaatatatcacaaatctcatccataatttttttttctgtttgtttattatattcacaaacgtagatatattgttttggaatcaagattgtgttctatattttaaattgctaaaaatctgttttctcttttcttattctctaaattctcattttaattgttttttcgattatgtataaaaaactgttttgttaaaaatcgaaaattcattttcactaccccaaccaacccacgatctctccgtatctactcaaataaaacttgtagtattcccaaaattattgtatataaaatcagaagttccataaaactcttccttaaaaattctccagaaacatcaattttcacataattcttaaaaggatgccaaccatacaactccgatgaatatgagttatacgtgtacttctccaacacaaaatcatattgatccttatatgttcatcttctaaacctttccaagacgacgaagaattgtttttctgttcttatttttattattttgtatttctcattttctcacccatgactctgattttctatttattggttttcatactcagaaaatctccacagtgaagaaacaatgtcaccaaaacaatggaaaagaaaaagcttggacaagaaacaagatgtgtgttcttgaagaaatcatacctagatcttgaactaattaagttcatatcactttcttttttttttttgtatgtgtaaaatctctaatgaatttattaactgcgttaaatttatgtttttgtcttttgtaattgacgttctggtataattatttgtaaaaaaaaaatagaaaagatttagtagatattgaaaacgattttcctatataaaattatttaaaaacgaaacaaaaatatttaagataataattctgttataaattttgtagtttcttttaaccatcgtttattgaaaaatatttaacacaaatattaacatcaattactattaagtgatgtaaataattgaaatcaattctcttaattgacactaatactaacatcacttaaataaatagatgtaaaatttaacattatttttttcaattgacacatattcatatcagttagaataattgatgtaaatattttatatcttaacatcggtcattaattaactgatgtcaattatttgcatcaacaatatataagtcatttatttaagtgatgtaaaattcttttacatcaattataagtaatacaaatattcaaaataaatgatataaaatgacccttttttgtagtgattgcacaatgttttatagaaagatgaatatacatatatcagtttattgtttttggatctagaacttttttttcttcagtctcaaatattatatgtgactccttttagaatggcacacattataaattaagaaaaaggtattggctttaaaaacttgtactaacatatgctaaaacaacagtataaacctctttttgtaaaacaaataacacacaaatatctatatatattaataaatcatcaagcttttcacgacccactcaaagtaatcatgatcactcatactcatctgatctttatcattccaacaccacgccaccgttttaccaaaactaaacaactaaaagagcatctggttccgatttctcataattaagaaggagaaaaaatgctacatgtcaattcccatctttacaataataaattcgtgaaagttaatgtgatggacagacagtttagtgtacgggtacatgtcaattgttgggaatttaacttacaaaatataaaaagagaaaagctagctctaatatatgcgatggggggactcattaaaagagattcgttttagagttagccctaaaacttaattctgcgcttttgacatcacattcaatcccgttgttgttgtttttgtatgtgacacatatcaattgattgataacacgtgtcacgattgtgagccaaatttgatataataatatgaatttataaatttttttccttttttacctttccaacctaattttagtcctaatttttgtaatttttcaaaattttcattcattcaaatcatttattttctattaaaattttgtttttattttttggtatagaaaatgacttttaaagttaaaacaaaaacctcaaaaaaacaaaaaacaaaaaaaaactttgtaaactttcaaatttttcattcatcatatcatttgtttttccactaaaatttctgtttttctttgtctttgtatacgaaaatgacttttaaggttaaattaaaaaaccttaaaaaaaccaaaaaaaaacaaaaaaaaacaaaaaaaaactctttaaaattaggtaaaagttgaaaaaagacaaaacgttatattgccgaaaaaaggaatattaataattaaggccctaagaacatccttattggtaagttcttaaattagttcttatgataagaacatctcattttaactcttatataagagacaaaatgacatttatataaaagacaaaaaaaaatcccaagaactaatctaagaacttaccaataatgatgctttaagcatgcaaatgatatcattttaagcacaaatagtaatttatattgggctgataggcccataaactgcattttattggtaaagttttaggccccaagcatgtgtagcaaaatatcattttaagtcacaaatactcattcatattgggctaatgggcccataaacttcatttttatttgtgaagttaggcccacatattttgtaattcttcgtcttcttccacttttgtctttgagccgtcgaacaaaaacaagtagtctgaagacaaactacacaaaacccttgaggaaataaaactgcaaaattgaaattagggtttatactttaaagcagtcaccaaatccagccaccatctcttgctgaagcc

SEQ ID NO: 5827 - DNA, 3000 bp, Unknown
  misc_feature (1)..( 3000): cDNA_ID_1829389_gDNA_ID_1620821_Annot_ID_50680 3000 nt of promoter + ATG
ctataaaagcataatataactattgatacatgcatgtatataataatacagaccgttcaatttattataaaaatatacgaacatttctatgaagttattttctttattgattggtataattcagattcattttcgtacaatttttttaataaacgttttaaaataggtaaaaactctgttggaaaagagttgtactgacattatatcacgatatcagataatgaatgtagatttacgacatatatagtatagttggatttatttttcttgcattttactattgcttttggaaatgaacagtaagaaatgagacatggtcagaaaatttccgatggtacctaaaaaaaatataccaatacggaattaaccatgtgggtttgtgacataagagacaaaacataatgatgctatgccacacaacagccgaagaccgtatgttagtttttttttttaccgaataccaaaccttttttctatatgtctaataccgaaattatttaaacttttttttcgtgcatatatatttacaggtcagttttgcaaagacttttggtcacgtcgatggaaaaaaggtggtaattatacacttttaagggccaaatttctcattaatatttatataatatatgtgtgttggacccttggattaaattacattcatctttcataaatattaaacgtctaaagtagaaaaaaatcacaaggtttttgggcatttagtgtggtacaaattaccagaagtagaatgactagatctttttaaaatttttttataggatcttataattttataacttcatagttgttattcctcatggatccgatcaatatccgagctatcaactttaatcaccaatccaatatttaatagaaatctaaacttctaattcctcagtatcaaaacgcaaaaatattccacattaacagtagccaacgagatagagctatagaaaaagaaaagattttttggcgggacccacgttttgtttgctgtcaatagtttatttagttacaactttatttaaatttatatatttgaactaaatgagacctaattataaaaaaaaaaatgaggcctaagcctaaccgaaaaaatgtgttaaacaaaaggatgcgtaattaatggggcaaggatttaccatatttatccttgacgagtgacgacatgttcgttttggattttcagttttttcgtattttattgttattattatatgtgatatagtgatgttaccatgtacagagtattactcgttgtaaacaacatttgactcatatcattaattgctttttatataaaaatggtatttgtatacttttcaaaatctgaaaaccctcaagaacactccatctagaataaacttttttaataaatactcttttaaagactttgtaatttcctttttaaaatatctaatttatttacaaaaactaacacgtttcgatatttaattggtagcatcaccattcaccaacattacgataagtcgataaccactaaaatgtaattatttaaatgatcttggtttaaattgcttcattatttttcatttaaagatgacacatcatcatagttttttttttttttatcccttctagatttgccaaaaatatagtaattatataatctcttaaaagcattaaaaagcaagaaagaaagatgaagagaacctagaagatacccatttccacatttcaccaattatttacttctactgctcaatgtagtagattattttatttcaaatggaatgaaaactaaaaactaaaaaggtaacataaaatatttaaataaatataacaaattaagcataaaataaaatttatcttgaaaaatcatttaatccctaaaaaatagaaccaagaattttatgagtcaaactaattgataaatcctgttttttatcctataataatatgtacttaataataaaaatggaagaatattagtattagttattacaagatggtaaaaaaaaaagaagaagaagagagaactaaaaaaggtgaagaaaaagcagagaataaaagggaagagaagaccggatgttgacaaattatttcatgtcactgtacaaaagccaaagccctcgttttttgtttttattttctctcttcttctgattttcggatcttctcttctcttctcctataatataaaccttctttatcatcatcgtccccctcacatacaagaagaagaagaagaagctaaatataaagcagatttctttttcctctcctcaatttttctttttgttagtttggtgagagagaagagtggcccagctagatcgaagatgacgatctaattatttccattaatggtgtttacgctataactcttataccctccccccaacactttattttattttttttgtttctcaatcttccctttagtagagagattcgaaaaaaattcttacttttttccttttgattcatagattttttttataaattgcttcttcttctgagaaagttttgagacaaggttggcgataagaagatgtgggtttgaggtaacaaaaataaaaatctcatttttataaactctgttttaatttcaatttcatctgcttaattttccctagattaaagcttggtttttttttgttaatttctatttggtacaatcttgtcctaagatttttgcagattctttgttatctaactttagatttccaactttgattactcaagatcctattttgactcgtcggcgttagaactcatctgttttgagtcaaaacccttagctttatatatagatagtgttatcacttttacaattgctttgtgtttgactttttgatgaatttgaagctactctcaaaatgggttttaactagatagagctcatggagctaaagttcttgtttttatggaggaaatgtgattaatgcttgttttttgttgccaatttcaatgtcattgaatcagatttgtgttagttagtctttggtactaaagtttggatatttgtgcgcaggaatg

SEQ ID NO: 5828 - DNA, 3000 bp, Unknown
  misc_feature (1)..( 3000): cDNA_ID_1829387_gDNA_ID_1620821_Annot_ID_50681 3000 nt of promoter + ATG
tttcacaaaatagctgcaaaaatgtatatatagattaagtgtctttcgtatattcaaaaattaggagtttcagtttagaaactctcggtttacactcagaaaatcattcaaacctattcaaatgtagattgaattattgaataggtatgtaattgattatttaattattgactgtttctccataaaaaaatactataaatacaactatgtattataactccctttttcccctggaataagactgatgataagcccattgacaaatacagattttgggcctaaatcaccccaaaaaaaaagaaaagaaacaacctctccattgcctttgtagcaatcaaatttcctaataagggcataattataatgatacacaattagtctacacaaacgagtgagacattgatggtgtaactcgtgttctacgaagtgtgactatttacatttgttcagcttgaagcttatttaatcccttttatttttcttgtcgtgaaaatctaatcacagtatcacactacgtttttttgtttgtcccagcagttaataaacacacacaaaaaaagcttcgatatttgggaatttttgtagttactagacatttttacaaattattacttaatatgttcatattattaatttcgttatggtttctttatttaattaaatcgttcaccggcttgtgtacgaatgatacttgatgctataacttggaatctgaaagagccaatcaccgaattttgtcgacagggacgagagaaaaagggagaaaaagatgctctttttctcgaagggtaatttggtaaattaataaatggcagatgatgtaattaacgtggaagttaggtggttttatttgtctgaaaaaatgtaagttcgaaacggaatcctagattcgtggacacagatcgttatggggattagagagagaaacaaatgttttctttttgtctccagaaaataagagagccatgagttactctcatatcttataccctttttacccttctatctagttgtagattttttttaatcatttctttaattattaattgcgttaaattaattattgttggaatagaaatattattttgcaatttgcaccaaaaaaatattattgtgcaatttacaccaaattagcaaaataaaataaaattatagaccaaactaaataaattttggtgctaaggaataccaacttatgtaggttgtcctttgaatagcctgacctatggttgctggttgcctggatcctatatatgcctagtatgtatgcatgaaagcgtgtacattgtaacaaaaagatacatgtattttatttattagaatttgagaaaataaattgcaagtttagataaataaaattaactaaaacgaattataaaagcctaattaacgagcaaattattcagtgtttatgatatatgatccaaaaatcaacatgcataaaatgttttttatttactagaaattgttgtatgatgtgattggaaaatggacgtattaattgttttgtagtatctacggttctttatgaaacattttgttccaatacttttttttttttggaaaattttgttccaatggtaagtggacaccatatccagagttcaaagttccttttcaacaatctctcctcttttttttaatgttctttcaaaaaattgttttaagaattttacatgttgtaaaaaaaagataattaaagatacaatccataatttactagaatacaattacaacacgtagttatttcaattatcatcggatatctatctacacagctctatttcatagattttccataaatatcatttaatacacgtagttacattttttgtttgtcttatacacgcactttctagaatcaaacaaatgctttcagaaaactttagtgattaattgatcgtagccaaattcatctagcaaattagtaattacagttataataccattattttgaatagtcattatttgttgaaaatatctttaataaattttgttaacttggagtttataaattataatcataaacgttgtttcgatttttgttacagttttctaacaatgttaaattttccagtatgtgtgtgaccctacaaaaatgggaatcaacaagaatcaaaagggcccatcaaagtctccaccaccaatcacctgtgaccgctctcacacttaacgatgatctttgttggattaacggcgcgtgtaatcttgatcccatcacgtgaactttcacgctcatagaccccactgttccaacctcagcaccatcagtcctattcgtcaagaagatttaaggccatacgtaacaaaagcaagctgagagaaacacatcctgtcaataatccttgagctggactctaaaattaggcccatgaaacttaatgacagccaaaaatattgtttgcattatgaattaattatggatttgccactttttttatggcatttgtagactttgaatttttttgaatagtttgtggattttgttttttttcctgattacaaaagtatgatttaacatgcattttatttgttatgtttgggtttagtcggttgtggttgtggttgttcttacaatttagttttttgaataaagtacatatttttaccaaaaacaaaatcttaaatacgtacattttgaaatgttaaaaatgacatattcataaaattttagtaaaaatgatgattttaaaagatctcgatgaaaaatgacaaaaccaacattaatcgcttacattattcgtaaaatttatcatgttttcaaagacatgaaaacattgatctctatatgaccggagaaaacattgatctctcatatcagatcacgtgatcgaacggtggagaaacgctctctacaataaggctttaaagcccataaaacccttaaatatatcaaagcccaaaagaaacgccttttgcgctttcccgatcgtggtcaacttcctctgttaccaaaaaatctgtaccgcaaaatcctcgtcgaagctcgctgctgcaacc

SEQ ID NO: 5829 - DNA, 3000 bp, Unknown
  misc_feature (1)..( 3000): cDNA_ID_1829383_gDNA_ID_1620821_Annot_ID_50682 3000 nt of promoter + ATG
gctgcaaccatgtccgacgaggagcatcactttgagtccagtgacgccggagcgtccaaaacctaccctcaacaagctggaaccatccgtaagaatggttacatcgtcatcaaaaatcgtccctgcaaggtttcgttctcaaacatttctccactctcttcctctgatcttattagatctgttcattacttagattcctcagattcttttttttgtcacctccacgatgttcgactgatatttgttcttgtcatcattgttaaattcacattttattgcacttttgttttagcgaaattattaaattggtcatcttcagttttgttcgattagataagttttaggattttttcttacacaagttactggatcagctgctaaatgtcattttgtgtcgcaggttgttgaggtttcaacctcgaagactggcaagcatggtcatgctaaatgtcattttgtagctattgatatcttcaccagcaagaaactcgaagatattgttccttcttcccacaattgtgatgtatgtgaaaaaagctcctttgatcactttcatttcttgtttgtttctttcaagtcccatttgagattttgtttttgttgaattgggtttcaggttcctcatgtcaaccgtactgattatcagctgattgacatttctgaagatggatatgtatgtgttcttaaatagcacttgttcctttatatggtttagttacttgttctgttttgtaatcattttgcaggtcagtttgttgactgataacggtagtaccaaggatgaccttaagctccctaatgatgacactctgctccaacaggttaagttttgcatgttcatcacattaaatgttgctagttaattaaaatcaactctatgtcgatttctgaaaatggaagaaaaagtgcagagtaatgagtgacctgattgtgttaatgaaacagatcaagagtgggtttgatgatggaaaagatctagtggtgagtgtgatgtcagctatgggagaggaacagatcaatgctcttaaggacatcggtcccaagtgagactaacaaagcctcccctttgttatgagattcttcttcttcttctgtaggcttccattactcatcggagattatcttgtttttgggtgactcctattttggatatttaaacttttgttaataatgccatcttcttcaaccttttccttctagatggtttttatacttcttctaattgattgattctttatggttgtccaagtgtcaaagtgttccacccatatgattctaaccttttgatgagcgaagtctttactcgtgcgttatgtagagacgtagaagcaataccacaaaagagtataattatagatatatgctaacaaaactcaaaagttaagatcagtttagtattcaaaattgaacagtaaaaggttaaaaaaaatatgtatacttatgaaaataactaaattcatagataatcttttaaaattcagagtttctttttcttatatcaaattcaaaatgaaaacacaaactaaaataaacaacgacacatatcataaggtcttttatattttgtattagatcaaaactattattgcaatcacatttcttgtggtaataaatgaaaggaattctactcctaaagccaacgtgtgtcccacacaaagtaagaagaatgtttatattatcttttgctcttgcaaagtcaaatgtatcttcaaaaagtcatgttgctagttttcttttattcccctcacgtcatcacggttcctcctcctattacaaatatacacacccaaaaagtccactaacatgaaatgctaaagttaattttagaaatccattgctttcacgtgaaaaaaaaaactattacagaaataacatgtatttatacagtttactaatagtcatcaactcatcatatatggtataaatatttgtcgaaaaacagctctcatgatatgtgtaggcttatattcgacagcccattaagacacaaaatgggccttttaaaaggaatgtcagttgtcaatatctgattcgtacaacgtggagtagctgtggccttgtccggttgtctctctctgcctcttcgctccaggttcaccgtacaataataacaaagaccgacgcttttgtaaaagtgaaacctaaattgataaccaaataatttgatcaatttggtacaacttttgttttgactgatgttcagattttcttttcttcttaattggtatagttttattttctttttaaaatgtttggatttgtaattcatttagcattccattctaataagatttatctttttctttttaattatctctttacatgatactactatactatttgtttaaacaaaaaatatagatatacatgcatattccatatttaattaatgggatcgaaattcaacattaaattaatgtacctgtaaaaaattaaatgtacaaaacgacagaaaaactcaaaaaagcagattttaaacgttatattttccaattttctactgcctcctgaaaaattggatttggacatgtctgaacattactcaaaataaataaatttagctagtttttgaaataagaaaacatagtaagtaccgttttgaaggagaaaaaacaaataaagtactttttacacacgaaaaaaaagaaagtaaaggaaagagcttgtttcacatatatctgcagcgtggactttctctactgcgaacccaaaaagttttttaatctttttatgtttccagatccgttttaagaccagaagtacaaaaaaaaaaaagaaactcgaaatctccattaaaagagcctatcgataataaaaagaaaaacaaaacggcaaaaaagtgaagcgaaacacgacacggattcacacaatactcagatatatacaaaaaggattttagattttgattcagaaccaaaaataaaaaaaggaacttttttatttctttgtttgattttttgggttgttggttttttttttgtttgttaattttggggatcg

SEQ ID NO: 5830 - DNA, 3000 bp, Unknown
  misc_feature (1)..( 3000): cDNA_ID_1809195_gDNA_ID_1620821_Annot_ID_50683 3000 nt of promoter + ATG
atatactatatttataaaaaggagcaatacactttgtcaaatttaatccgatcttttagtatttcaaaattacgattattaaactagacctggtttgcttggaaaaactagatctactcaaatgttatcttacctaacctaattttgtatcgtttgggtgagaaatggtggcctcgcttctaacaagttttcttcttataatcgggactcgggagaatcaacttcaaaggagattaaatttaaacattcgtaaacgtctggaaatcaaaataataccataaaattgggggaaaaaaaaagaacaagatcatttttcggccttcattattttcttacccaaaaatctttttttcttcatgctttcatgatactaaatattttcattaaaaagtttaaattcttacatgaacaaattgtttaggacatgtgtagtgtgactaatttgttgtgctgactagtttttgtttctcggaaatggttgaataggtcttttcggaatttaacgtttgatacataaaattctttacatattgcattattaaaattagctagcttcttattaattctagaaatatcatcagtatattagttgaataatctctctttttcttggaaatggttgaataaatccagaaaatcatggccataaatcctcatttcttttttgtccgaaagtaaaaatccattctataaaatatgagccgtcaataacacagttgaaaaaaaagaaaaaagaaacagaacccattaattgttgagactttttccatccgataacgtcatttttcactaaaagaatatatactatatgtataattagaaatggatgcaatggaaaatgtgcaaatggaattttaagatataaaagcttgttaccatctaatttaatcagaagtaacatgtaataaatctctaatagcaaataagatgaaaacatagaaatcaaagtgcatggaattagtctaaatttttggcagtcctaaacataatttaaaatgagcaactcacctactttaaatagttttcgttggactatatagtttttaaaaataaattgtgttccacaaacacatagagaatcagctaagtctctttcatacaatagctatagcttcaaccagaagattatataaaaaaaatactgaaaactattgaacaaaactaaagaatcaatgattagaatatatctccgtggactaattaatctcctacgaaaaggactttgaactaactaatagcttttattcactttttagctatattttttttaagtagattattttattcttagacggctttagttgatgcaaaaataaacaatcaatctattatgaatgatgacatattaaaaataaataacaaactgtattgtacaacgacataataacataacttctccatcactataacaagatagtattgaacataaatcaccatttgttatccacgaggtaccaaatgttgtctatgcgaaactaaggatcccactactatgatctaggtccattcacagaaaccctccataatttttacgttgataaaaaaagttattgtgtatagtatactgtatataccatgcattacttggctaattttatttttgttgagatgatggttaaattatattcatgatactaatatagaaatacaatggttaaattatgaatacgataacgaatacatgaagcatgtgatcctcgagaacttcagatacgaatctctttttttttatttctttaatgtcaattcagtgtcaatttctatcatcaatttctttctatatggaactattattttttgttaagagttacgtctagctgattgttaacttatagactctaactaaatttattgaacttgaatattaaaaactctaatttagaaggaaaaaattgttttctttttaccttttttttgttttatgttggaagatagggtaaacatgttttgtaaatgaatggatttaacattgatgaggacgaagaagacacaagacaaggtattaaagaggttaagaaaataagaagattgtttcccataaatggcgacacgtgaagtaaataactcgtctgttctgtaattaaaacgctgtttcttctttaccccgcgaacttgatgggtcaatcacatccccaataacactaatttactgtttctctgtaataataataatcattaaaatggacaaaataaaatattagtaattaaaaacagagaaattaaagagagagaatttaacgggggagaagacttttgggaatgatccgaagaaaacgggttactaaagaaaacagtggtgcggttcttaatatttctcttaagaagatctctctctttctgtttctgttttattattgttattgacacgaaaagacagagaaacaaatagaggcagagagcagaagaaagacgaaacagaggattttcatagagaatcctctttcttcctcctttcttcgccttcttctgttcttcttcttctcctggttagttttcttgatttcatggttaacaaatgattagagttttcgttaaaaacaatacttggttgtgttttcaagattttgtttcttatctttcacgtttcataaaaaattcaaatggctgcatttgttgcgtttgatgttatcgatgtttaatttgtttatttaagtattcaaaatttcagacccaagtaagcaacaaatttaagaaaataaacctcattcgattttttttcttatatgaagggtcttgaagatacatgaaacaacatctcattgttatgaatgttgatgcattcttttatgtaaacttaactttttacaggtgacctctctgaaagattgtaaggtaaaaatagtctatcttttttggcatctgatttttgatttctagacaagatcatgtatatcttggtaatggtcttattcttgttttatgtcttgatacaggttccttacaaaaatttgatttcgtttggtgaatgaaatagttagaaattctccaaaacaaaatatg

SEQ ID NO: 5831 - DNA, 3000 bp, Unknown
  misc_feature (1)..( 3000): cDNA_ID_1829379_gDNA_ID_1620821_Annot_ID_50684 3000 nt of promoter + ATG
atataattcagagtcatatcattaataaaattaatattaataaaataaatgactttttggcaagacgaatttggagggacgggtttttgaatcaacattaataaaaaagtaaaatataattaatccaccgttttaatacgggttaaatctttaattaattattttttaagaccactaatattaaacatatcaaatcatcctaatttagaaaagattatataaaaccaaaaatgttatgtggtatgtataatattactatatataaaattaaacaataaaatataaatgtattagagaatgatacaatgtgcaaaacttttatatataaaaaataattcttaaattttaaaaattactactttaaaaaaaaaatcacgggacgggtaaaaaatttacagaacgggttttattttggaattgggttatatggtggatgtatttgaatcaatatttataaaattttaaaatattattaatatgctgtttaagtagggattaaaacttcagttttttaacaattatctcatgaattcgtggtatagtgttatttaataacaattataaactgtaaaataaaaatattttataaaaataaaatttgcaagttttaatatatattacttttaaaaaataaatcgtcccgcagtatatcacatgttaaaatctagtttatatatcattttgatacttttttaaaacagagaccggtgcagtttagtagttacgtggataccaaatatatcatacaagttaatatagaaattaagaatcagatacgacgttccaaacaaatacttaaacgtgtgtagaccttaggaaacattgccaactggcaactttgtattatactaccaaaatctagatatctataaatctagaggtgtgtatgataatgaatattgaatagtatatgtttgatattcaatgttatactattcagatatcaaatacctggatgtatatatgtcaactgaaaacaaatataattctcttagtatgaagactatttacatctaaatcatatgaataactaattaactttttcttcttttttttgttaattttcaaaaactatgtcatttgttatgtattacataatcacttaagatatatataaaaaaaaatgccctaacgaatttcgtccacaacatatgaatcgagctagctatttagatatttctattatgcatatgatgaatcatagattgataaacatattatatattttttgaaaaatggtagttcaatttcttttgacactaattaaacatgaaagagacatgtccttcgggtgtaagaatacctaaacagacaaagcagagagtcataaatatcttatgattataaatggaagagacatataaaaaatgtttattgtgtactaatcccttatatagtttatgttggacaactccatattaatttaggtttacttatatttcggttatgaaactctaaaaagtattgtctcccactatccattaggacaaactggcaaaggcaaccacctcaacaacatcaaagaacaagaattattcaactgttctacaaaactatactagtactattacagttgtttgtagcatatacttttccaaatagaattttatacgattttcttttccatattttttgaaaatgacaagtgatatgatttgagaaaaaacaaaaaaaaaaaacaaatttatacagtgaggcctgcaagaccataaaacaaactaaagccgttcattaaggttccattaattgggcctatatttttctcgttatattatgagcctgttataggcccattagtaataatttatcgggttatgaagtaaattttcagataattaagggtctcaagtataaatatcttaaataacagacccatctacctggaaatatgagtatttgggcagagaggggtgttttcgtaaattcaagtacatactttatttttatttttttgctttcttcgccttttgctccctcctcgagaatttccgatcgtgctttcctcaaaagcatttctgtttctcgtcgtcggagcccgacgacagatctctgaatcgctggagaaacagtaagtaaatctacagatctcgtttcttcgaacttcttcttcgtatactatttgtttgtatcgttccttcgttgtgcattgatgttcttaatgattactagaatctaagtcagaagttacctctatttgttcttcttctatatttgaactagatttcgttctagcgtcgaacaaactcctcgttttctttgattcgcattgctggtgattttcctgaatttcgagatttagcgagacgtgtctcgagttctcttgtgttgacgggatttttcttatctggagaactgataatagtttcatgacactgtcactggtctgttgaattgtagtttaaacttattccatcggatatagtgactcttaactctataagttgctgattttgtagatgggtttagtgttatcaggtttattgatgtaacaacgagtttacaaactttgctatttagggatctgtaggaattcgtttttttgggggctcaaattgttggaaatagttgcttagctattcacaatctaaatgtgatttgggaaatctgcaacatatgttattactatggaagaggttactctatatagttactaaattatcagcatggtttctgaccattatagaattctttgcttgtggtttatttgtttgaatcaaagtggtttcattcagagacagcgttgtagattttgattatctctgtaatgtatgatgtgaaaagttacgccactttctatcttattagctcttgaaatgcatctattatctgttttaaaataagattttttaaatttaatttgtttttttttgccagtaatgattgagtttggcctctatctgtgaagggtatatgctccggctgtatctactttatattctgccaggaagattgtgagcattgaagtgccttgggctctggctgaagatttgagcagattaa

SEQ ID NO: 5832 - DNA, 3000 bp, Unknown
  misc_feature (1)..( 3000): cDNA_ID_1829376_gDNA_ID_1620821_Annot_ID_50685 3000 nt of promoter + ATG
ctgacaaactcgatccccaaagtgttgcttgcttttttagatatactgctgggcttgataagaaccttgttggggattttcttggaaatcatgacgaattttgtgttcaagttctcaatgagtttgctgggactttcgatttccagtacatgaatctggatactgcactccgactcttcttggaaaccttcaggttgcctggagaatcccagaaaatacagagagtgcttgaggcgttctctgaaagatactatatgcaatctcctgagattctggccaacaaggatgctgctcttgtgttatcatactctattatcatgcttaacactgatcagcacaacgttcaagtaaagaaaaagatgacagaagaggatttcattcgcaataataggcatatcaatggaggaaatgatctacctcgagaattcttgtctgaactctttcactccatctgcaacaatgagatcaggactactccagaacaaggtgcaggctttcctgaaatgactcccagccgttggattgatttgatgcataaatcaaagaaaactgctccatatattctggctgattcaagggcttatcttgaccatgatatgtttgctatcatgtctggtccaaccattgctgccatatcagtcgtttttgaccatgcagaacatgaagacgtttaccagacatgcatcgatggattcttggctatagctaaaatttctgcctgtcatcatcttgaagatgtgcttgatgatctggttgtctctctctgcaaattcacaactctgttgaatccatcatctgttgatgaacccgttcttgcatttggtgatgacgcaaaagcaaggatggctactatcacaatttttaccattgcaaacaaatatggagattatatacgtacgggttggaggaacatattggactgtatcttacggctacataaacttggacttctgccagctcgtgtagccagtgatgcagctgatgaatcagaacattcatctgagcaagggcaaggaaagcccctcgcgaattccctatcttcagctcatctacagtcaatgggaactccgaggagatcttccggattgatgggaagatttagtcagcttctttcacttgatacagaagagccaagatcacagcctactgagcaacagcttgcagctcatcaacgaacacttcaaacaattcagaaatgtcacattgacagcatatttaccgaaagcaagtttctacaagctgaatctttgttgcagcttgcgcgtgctctcatttgggctgcaggtaggccacagaaaggaaccagttctccagaggatgaggatactgcggttttctgtctggaattgcttattgcaatcactctaaacaacagagacaggatcgttctcctatggcaaggcgtctatgaacatatagctacaattgctcagtcaacggtgatgccctgcaacttagtggataaagctatttttggtctacttcggatctgccagagactacttccttataaagaaagcctagctgatgagcttttgagatctcttcagcttgtgctgaaactggatgcacgtgttgcagatgcctattgtgagcaaattgcaattgaagtcagccgtcttgtgaaagccaatgctaatcacatcaggtctcaggcgggttggagaacaatcacatccttactctccatcacagcgcggcacccagaagcttctgaatcaggatttgatgccgtatcctttgttatgtctgaaggaactcacctgtatccagccaattatgtactctgtgttgatgctgcaagacagtttgctgaatcccgcgtgggacagtccgaacgctctatccgtgcccttgatctaatgggagattcattagaatttttggctaaatgggctctctcagctaaggaaaacatgggagaagaagatttcgggaagatgtcacaagatattggggaaatgtggttaaggcttgttcaaggactaagaaaagtgtgtttagaccagagggaggatgtccgaaaccacgctttacagtcattacagaagtgtttaggcggagtagacggaatcaacctagctcatagcatgtggtctcaatgctttgacaaagtaatcttcacggttttggatgacttacttgagatagctgctgggtcacagaaagactaccgaaacatggaaggcacattgcttctcgcaatcaaacttctctccaaagtgtttcttcagcaactccaagagctatctcagttatcaaccttctgcaagctatggctcggtgttctaactcgaatggagaaatacatgaaagtgaaagtaagaggcaaaaaaagcgacaagctacaagaatcagtaccagagcttctcaaaaacatattgctggtgatgaagacgaaaggcgtgctattgcaaagaagtgctcttggtggagatagcttatgggagctaacatggcttcatgtgaataacattgcaccgtctatgcgactggagctattccctgatcaagaatcctcacaacttggtgatgatgaaaccgtatcgaatggcttatcttctcctgaaaacacaactggttcgtgaccttacaagtgagatcattaggtgagtttctttcgaatatccatataagtactgtgaaagtgaaagcttcttatgtaacacctctctacgtttttttttgtaatatataagtctttctaattcagagactcgtattaattaagcaagtttcttaattacgactttgttaatcacggacctttggaacgaggtagaaggtcttgaacatgtgtggaacccaccaaaggaaaaatatcagtagattcaggagagttgttaaattttgcctccacgagtttttttcttttcttcttgttgagtcgtttacgtcacgtcgagaattttctcttttcccgagaaaattaagaaaggatcgtttgattttctaagaagggaaagataaacagtgaattagaaagagaaggaagtttca

SEQ ID NO: 5833 - DNA, 3000 bp, Unknown
  misc_feature (1)..( 3000): cDNA_ID_1829372_gDNA_ID_1620821_Annot_ID_50686 3000 nt of promoter + ATG
gtgtggaacccaccaaaggaaaaatatcagtagattcaggagagttgttaaattttgcctccacgagtttttttcttttcttcttgttgagtcgtttacgtcacgtcgagaattttctcttttcccgagaaaattaagaaaggatcgtttgattttctaagaagggaaagataaacagtgaattagaaagagaaggaagtttcaatggaatcgctaacatctatttctccttccataattcttcctccggccaccactactacgatccccgtttcaacttcacgatcagtgttgattcgtcttccttcacgccgttcttcttaccttttcggcttgtccagctccgggagacggatttcgatttctagaagaagacacttcgttagctgtaaatcgaccggcggcggaggaggaggatcagataagcttggtggcgatgaagaagagagcgaggaagttgagaaggcgcttcacttggatggtacgatccctgggacttccgatgagtttgtaaggcaagtttcgtcgcgtgcttacgacatgcgtcggaaacttgagcagacgtttgattccactagctatgacggtataatctctatcgctctcaattcctgcgtttactttgattttggtgatgcaaaattaatactttcgttgatgcaactaacttgatcagagtttcttaaagattgtctaggaagtttgggaactgtagtagtttgaaattcccttagtgccttgtttttgttaacaggagtcaaatcgttttgttgaacaatgtcagaatttagtcactgtgtcacacacaaccggtgaagaagctctccattgatagatgtagtgttagttatgattcaaaagtttgtgttctgcataccatttctttagttccccaggagaagagtgcttcagctgaactatgatgaggaaaattgttcatttctagattccactcttacagtaagattgcaagcacggttttatcatctcatctttcacatagtgctgatgcataggaatatcaaagcaataggaacataagtgttttattcaatttaagcttgtattcatctaaagttaataaattgatgttgttcctttagtgctctgtatctttgactgagtgatttcgttgagaaccatttctctcactgtggcttctcacaatcttagtgttggagtccaacccatggagaggagattcgaagcctgtatatgtattaacacatagagaaaaccagatatgtaccatgaaaacaagaacaaaccacaggttccaactctattccactcaagtttttttttatagttttagttttcttctccctatgacattagcaatccttataaacagtgaagtagaaaaagagcttggactgttgttccctagtaggatcagcaaccagacaaagcaggctagacccaaaactaaattcgatatgctcgtagaagacattcgagatggagtactggtaagtattctcactgaatcactttcaagaccttatgaaacccagacaacgtgatatgcctagtttttatctcaaaggttttcgaagatgtgaatgaggctgttagatactgtgacctattacaagggggagggaaagggtgtgaaggtgtcgctgagattgaggcctcctctgtaagattatgagacaaagatatcatctaattctagaacttgttgcctttaaacatttgaaatgatctgcttttttttttttgaataggtttttgatctttgtcggaaaacaaggtctctggcagtgctcttccgccgtggaagaacaccacctacacctcagacgctggaacgtaatctcggatcccggaagcgttctcttgaggacttgagggataataaatagcttgtgaaacaatgtattaattttacttgcaataattgaaaatactttgtatagactaaacagtaattaaccgtgggtgatactgtgtatatatataaaatgcattttacttgtgctccataacttttttttgttccttataattctcttgaagttgcgctcttttctttgaaggctttaaagctaacactagtaggtaatgtattacttggtcaatcaacatgtgagtatttatagtatctatgattagttgacaaaaaagaccattgtatattgaacttcttaacatgaaaaatagtgacttttttttgtttagataaaaatagatatgctaaaggcatatgctagtgtattattaataaaaatcatgtgatagatgtgattccatgttatccggatcgttgacttgacttagtacccataacgtttattatataattcatatagcattttatgattgtcaaatttatatttatacatatgatagactattatgtcaaaaagacaggtaaagccactttgtttacttattctttcttaactcaaaactccaaagggtaaaatcaaggtgaccattactctttcagtttcaaaagattgtattattgtaacaaggtgaccattactcttaaaatttattcaaaaataaccaaatctaaactaaaacgtaactaaaatttgatattattcatgaaattctaagaacaaatccaacatgatcccttaataatttccctttagtagtctagccttcttagtcggtcactaataataaagagtaaagagaccaaaagagagaagtcttagataacggtgacagagttaaaaaagaactcactaaaatagacggaggaaaaagtcatcaattcaacttgacggctaagttaacggcgattatcttcgttcacacaagcaacacaaaagagaaaacatgaatcatctctctctccctctctccggttccacagtaaagaattgattcctcaatctcacgcggaagcaaaatccaaattctaaaattctaagaaaccactctaatcacatcgctctatcgatcaaaatcgaaacccttattcaaaaatctcttattttttccatttttctctcaatcatctgaatcggttttgag

SEQ ID NO: 5834 - DNA, 3000 bp, Unknown
  misc_feature (1)..( 3000): cDNA_ID_1829369_gDNA_ID_1620821_Annot_ID_50687 3000 nt of promoter + ATG
ttattcttaacaccacctttttagttgtcatgaaattgaatgcattcgacaccacaaataatttacctacgatgaccttccacgacttttgccatgtttccatcatacgtaggaataaaagtgttgctggccacagataccatgaaatctagagcagccatttgagacgaatggttctgaaactgttgcagctctgctgactccaatagcatttccttctttacctataaccacaggtgagtaaaactgataagaaaaagtgcattgtaatgacgatgcagttgagcattctttgtagcaagaaaagggaaaccaggactggtagactcacaattctcgggaatgcttcccttaacacggatagtctatgctcgctcccataaatctcaccagctgcaatgtatatctgtgtatttttctcaaatcccaacgcttttaataccaaggccacctcctctggcgtcaaaggacacagcccttgcgccctcctctcctctgagactatctccttctctctccaccagggatatgtgtacctaaagaacacagaatggacctatgaattaacaactaaaaagacctataaccagagcaccaattcaggagaaatcttttgaagagaaacctcatcttttttagctcttccgcttcttcctcagtgcaaccatgagtgcagccagagaaagctaacatgtccatctcatatctcagatgcaaagccacaaatggccctctttgttgtagaatccgaactaacttagatcccaaagcctcaagctgtggagtgaactttagtccctgaaaattcacccggcacctgagccactggagagagagcggaagaccattgtttgccaggcgggtatcagtcctattgaagtgtacaactttatgcttgctgaagagaggcaatacctgaacaagaaattaaccaatcacatatgcaaatggttaggtaatatcttgtaacaaggatagtcaaaggaaccaaaacagcaaaactagtgataaacaagacaaacctgcttcaagtaatatttttcatcagaccagctcacaggaggcatttcgaacatttgatatccatactttctactaaaccgtttaggaagcctccttaagatccgaacttcatctcttaatgaatcaatgaaatgtctcacatcaaaaatatcctcaaaaccactgcaaacaaaaatgaggatactttagattgctaaaaaatgttaagcatataagacacatgagtgattctataaacaccaaagatagagtacctaggatcagcccagaaagatgttttgtcaagctctggaacaacgagagtgagattcaataaccgagcaacagtcaccatatcacatatctgaaacacaacataaaaatcagaatttggaaaaacatcaaatctgaaagaagaagaaaaagagaattaaagcaaagtcaccaaccgcggatcgcatttgattcaatccaccattacaggatacaagtagaataccattgcttgtataattccctgcacaaaatcaacaatctcgttaaactctctcaagcaccaacgaaccctaatgtcccctaaatagagagaaaactgactcggaggaggtagaggaggtggcaatggaactggctcaacaggggctgagaatctagaaatctgattggttaaaccagtgaagatccgggaatgccaaagctcaccggcggcgaaaagctgaaccaaacacgtccaaaccaaaatgctggagcaaactctaacgaaccatacttgtacacgaggcttcggaactgccggcggaagcggaagcttatcgcttcgcgcctgagtaatattactctccgatctaacttccatctccctcctccgacgatcgtcgtcgccgcttcatgagaataaaattactataacctaaatttctccgatcttgtgagatgtcagaaattgaaattagatgacaaacgcgaaatgaaatgcttcttctctcctttgtgtcaaatggtttgaatctcgaggagtttttttttctttcgaaattcagaagaagaaaaaaaaatcacgagacggaaaaaaaaaaaaaagaggtggtaacggtgagagatgggaaaataagttaattaaccgtcaaagtgtcttcttcttcttctatttattgttttcccaagaaactcattctattgcttacacaatttatttcctaattcagaaagcttcaattttcctaacttgtttcattatatatatcattaaatgtcaaagattattctataaccaaaaaaaaaaaaaaataggtttcaaggataatgattgatcagaaaaacatatgataaataaagatttcaagaatattcaacattgaaaaacatataaagaaagatgacacattttgcctttttgatagtcgttgtcattcgtcaacggattcacctaattgttctcccgtactttttttattactgtcatctatttattgcactaatcacgattcaaaccactgtttatattcatctcctttattcagatattttcaagctgttgtaaaacaaaacaaaaactgaaacgaaatcatgacacgtacctcaatgttgcattattaacatcccttccaaggaaagattactattttattctttactaaaaactcgagtacaattgtcttttcaacaaaatttcccaattaagtttaaaattaacattaccaagtcatatgtagttatgcttgaattataaaatctggatgtgttatttgtttctttatttacttctaacttactttagtgtgatccactacaagtatataggtccaacattattaatgggccttaattttaaagcccaattccagagggtagtactccacgtgttttaacgaatgaaatactaacacgtggcaatgcacgtgttgactttcttttgtttccttccttccgtttaacaagaaaaatagctaaactttgaaatccgtcagatcgatttctctctatatcggagccgtcatg

SEQ ID NO: 5835 - DNA, 3000 bp, Unknown
  misc_feature (1)..( 3000): cDNA_ID_1829365_gDNA_ID_1620821_Annot_ID_50688 3000 nt of promoter + ATG
tgctgggacgcagacatgaaccagagaccgtcgtttctggacattctcaagagacttgaaaagatcaaggaaactctaccatcagatcaccattggggcttattcacttcataatacacaaaatccattatttaagcacaaaaacaaccagaaacaagaaagtatcattctctgtttgccttattaatctctgtttcatttcttttgtaaagattgtttctttttcatcttttcatttgctttaaaagagtgtgagatagaaagcttttattgttgttacatggattggattgagtttgcaggttaatgagaagttcatatcatatcagacaggataaaatgtctgtttccgaaaaattcagtaacaaaatgaaaaatgagttcagtagtgtatataaagctatagtcatagggttttcaatacaatctctgccctcaggagatggtaatggttttcagataagcttctttttctggaagaaagtcttcaagtgccaaaactgaagacctgcgaccgataaacaaactgcaagcgacacgaaactcaaccatgccatcttcgaatttgtcgctatgttcagattgtgcatttcttcttccctgtaatataccaaatgaagaagggttttgagttttgattcactctcatcctctgatcaagtgacttcaagggaagacaggttttgttgtcattacctgtcgcggagatagaacatctcatcgtggattccattcacggtttcaaataacttcttaacctcaaactccatcgtctggccaataaataaaacaagatccaaccataacaaggttaacaaaacattccttcaaaaactctgcaatctctttaagaggctatgttacatttcaagctagtcttgctctgtagtatgttaaagcctagtcctatctaccacatttcaagatagtaattttctgcgtctgttaaagcctagtcctatccaccttcatttagcagggaaagaactcctgaatgagctgaagaaatcgatggggttcaaaggtgaaactaatgaagctattttctcatatgcaagactgcagacacaggtcagtaacacacgagccctgtcagcttaattcatggccttgttctaaccaaaccaatgcaccaacataacctataaaccaagactacatagcatttctcacttcagatataactttccactttccagcactatgtcttggtgtaacttaggcagctatcaaattctcacacatccggcgcaatgctctattgttcatgtcattagaagcatcaaaatctatttcctctaaagagattagtttgactaagttaagacttcaagagtaaagaaaaagcgaaaaacttacttcgacttggctcttctttgccacattcgaccaatccttggtatgaatacccgtcctccaatcaaagtcaatgatcagcgtcgtctctggtttgtgatcgacggcggagaagcaacttatgtaatcccctgtttccacagctacaaacgagaattgtcccgattctactccgtccgattcgtgataagccgtcccttgtggcgatgtgaccttaaaaatcaaacacattgcattatactgaaatcgccggaagaagaaattgaagggaaatgcgatccgatcggatgattattaccctgacggtgactttatgggaagaaggaagaggatgatcctcgtgagggtttataatgctgtattttccgatggtcattgcgtttgcgtgaatctcctctgagatgcatttcgtgtgcccagaaagtagctcgtatcgtatagagagtgtcacgggagataaaattgagaggatcaatagtacgatcgagctccgacgatgattcatgacggctccgatatagagagaaatcgatctgacggatttcaaagtttagctatttttcttgttaaacggaaggaaggaaacaaaagaaagtcaacacgtgcattgccacgtgttagtatttcattcgttaaaacacgtggagtactaccctctggaattgggctttaaaattaaggcccattaataatgttggacctatatacttgtagtggatcacactaaagtaagttagaagtaaataaagaaacaaataacacatccagattttataattcaagcataactacatatgacttggtaatgttaattttaaacttaattgggaaattttgttgaaaagacaattgtactcgagtttttagtaaagaataaaatagtaatctttccttggaagggatgttaataatgcaacattgaggtacgtgtcatgatttcgtttcagtttttgttttgttttacaacagcttgaaaatatctgaataaaggagatgaatataaacagtggtttgaatcgtgattagtgcaataaatagatgacagtaataaaaaaagtacgggagaacaattaggtgaatccgttgacgaatgacaacgactatcaaaaaggcaaaatgtgtcatctttctttatatgtttttcaatgttgaatattcttgaaatctttatttatcatatgtttttctgatcaatcattatccttgaaacctatttttttttttttttggttatagaataatctttgacatttaatgatatatataatgaaacaagttaggaaaattgaagctttctgaattaggaaataaattgtgtaagcaatagaatgagtttcttgggaaaacaataaatagaagaagaagaagacactttgacggttaattaacttattttcccatctctcaccgttaccacctcttttttttttttttccgtctcgtgatttttttttcttcttctgaatttcgaaagaaaaaaaaactcctcgagattcaaaccatttgacacaaaggagagaagaagcatttcatttcgcgtttgtcatctaatttcaatttctgacatctcacaagatcggagaaatttaggttatagtaattttattctcatgaagcggcgacgacgatcgtcggaggagggag

SEQ ID NO: 5836 - DNA, 3000 bp, Unknown
  misc_feature (1)..( 3000): cDNA_ID_1829358_gDNA_ID_1620821_Annot_ID_50690 3000 nt of promoter + ATG
gataacaataatatcacatcagttttttctaagttgttgatgagacaaaaatctagttattctagttaccaatgttaaaggcccattattctaaaaggccaaggcctacattttatttttgttctgatgtaattaaattgttaattgtctgtatttattttcatttttaaaaaattatctttttaacttatggtagcttcaacttctttttcttttttttttttgtcatctcaacctttgtaagaagaaaaatggtcaactatagcttcaacctcaaatctactgacttgacacttgagttttaaataggtaacatctcatggagatcccaatattcattctaaattcctccaagataatgcaacatgttacaacaacaacaacaacaacaacaacaacaacaacaacaacaacaacaacaacaaaagagattggccgagacatatatgtagtatgtacccaccatatcacacataccttcataatcatcatcatcatcataatatcaagtggtctaattcaaatgtttttgatttaattatgtgtttaagtagttcatatttaattgtgtgctaaaatacttattgtaattgaagaatcaaatatacaagtcttattcactattcttaatcaaatagaaattagtcttaaatttgtaatttagggggtacaatgatccactattctccatcaacgtagaagacaagtaatttactttgtaatataggtaatggtacgtacgtagtaatcacatgtaaaagcggaactttcctttctcttgttttgccggcttgaccacgggatatgagaccagtaaggtacatgtgtaatgtgatacctatcagaaaccctattacactcttatcaaaaaacaaaacaaaacctattacactctctcggcttaattaagattatgatcaattccaaatatgtttctgatataactttaattattaacgagaaaaccaaagtttattgctacttttttccgtcgaaatggccgctattttaagttttagacaataacttggtccatgaaattaaggtacaacgtcgatattgattaagatcagtttacttttgctaatataacgtgttaagtttgagatgggagacacgtgaatgacttttcattactttcaaaaattgttcaaaattccaaaattggcaacaagactgttttagttgttaatatgcaattagactgtttcaatagagtgtatttttctttgtcaaaatgtaataagtactaatttgtcatacaaaatatcaaatgtcaagaacataaactcttctaacggaaccgcttgtcgcgccgaaactcgtgtggtaaacctgaaaaacaactcactaatcgcaattttaaatcagagactgagaaaacacttctcacgaaaaccacaaaacgcggtcaatatcgggatgacgacatgatgtggtggtcggattgacacaattcaggttggtcaacaaaattcatccctctaaaatatattttcttagttcgttgccaaacagatatcttacctttactcttttttttttttttttaaaaactcatataaataggatagttattaaatttaactacaaatggtattgtatatgtatattctatggctaggtgaaaaggcttcctttagttcgagaaggtcaaaatggatggctaattaacttttatatacaaacagtatatgcctaacatttaataaggagagactcagattccttgtcaactactcactattgtctccatgactctttaaaaaatatatttttatagaatcttagtattcagaaattaaaccgtagcctttataggataacaaatgtagatgatgttaaatatgaaaattggctccacaactgtccatgaggcataaataactcgaaaacttaattagtttgatcttacagataactaattttttgtcacatttattataccccaaagtatcttaataatgcttgtcggttcaagttcatattttttcctcggttcaaaatccaggctatttatccgttcttttttaattaccttcatgataacttgtcaattttgtatttcttattcatgatttttctcatgcacatacctaatttacgtcgattaagatccatgcaacgttcataaaataatgagatagtatattagtattagtatcacatacataacgatataatattttacaatgtatttgcatgtaaagcattttcaacaactactacttaatccactttggttctgtgcaccatatcgaccttgagccgcccatataccgcgactagggtcgtccactacgaatataaaaatttatcgttataaatataaataattgatatatttcaatgattgatggattaattaatataaataaaacatgtcaatgtaagactaaatgactaatcagcgggactaatcaactcctctttttttttaaataattcaactggtagatcaacgcgggtttttaatctcttgtaagaactagtacgaatgtacgataataattccagtttctcacccgaaaaactgaagcataatgtttgctcacacactgacacacactgtggttaaataaaatatcgaaagttaaatttacaaattgttttatcgtaatacttgaaaaaccaaagattatattatgtaattataacaaaaagagatataataaattactggatttcaaatctctatatttttgtctccactttatcaaaaaaaaaaaacatcagtctccactctccacgcgccttttagtcgccctctctgaatacactacagtacaacgttgaaaagaattcaataaagaagatcaaaaagcaataaagttaatccttactttaattagaaacaattttctaatcataaacctttatcatatcgtcaaaacatatcatgaacgacttgtctctctctgttctctatatatatatgactcctcttcttcaaagttcagacacaaacataaactagcgtttaataaaaaacaagaaaaa

SEQ ID NO: 5837 - DNA, 3000 bp, Unknown
  misc_feature (1)..( 3000): cDNA_ID_1829354_gDNA_ID_1620821_Annot_ID_50692 3000 nt of promoter + ATG
cacatgaagaaatagctaactaaagaaaccacaaacaaacacaaaaatcctcttatagatcaaataacctatcgaatcatatacagaaggaaagagtattaattcagatggaaacactcccaagccccaactgatattccttgtaaacaaagaaaccatcaaaaaaccctagaccctcttaattaatcattctttcgagagaaaggcttgaagctccttctctatgtgttcttgagcagtttttttggccgcaagaaacggacgatagtgatcagtgagcatccataccatacatttggtcatcatcgcaaagactccaacgttggtagcttcatcagtgcaatcttcccagtcagtaaatggttccttgcaaccacctcctctcatgaacgctgaaaacacctctcctttctcttcttcttcccttacttcatttggggatacggattcccctggatctcgccaaacagttgacggcaagaaatccttcatcatcagttttcttcgcatcgagaaagggaagatagtaatcagaatgtctctccatacacttctccaacatcgtataacacaaagatataggttccttattcttcttctcagcttcctccacacaacctttaaaggccgtataatgtttccttggatgcaccttctttcataaacacttgtaatcgattttgccaaagacttcacgaatctcctactttctctggctagacttgttttttttttgagatttggtatcggaattctccggtttcagatccgtggatgacaattaatcagtgattatcatttcattaggtcagagaattacaatatatgtagggatatgataatttacaattaagtatttgataattgcaattttttaaaatattcgataattacagtttctttacgcatgtagggatgtagtcatgtagggatgcatcatgtctatataacataagacatattgggatgcatcagaatcatataacataaatagtttggaaccaaataaacgttgaacgaggcttttctcacaccatatatcttttcaaaacatactaacaagtcaaaaattgatatccatgtaacttgaaaatcatgcacagacaatgctacctttgaatggtcattaaaaaaagaagctaaacacacttcagatccaaccatatatgtgatcaaagccagtgataaaagtcgagtcattcttggcagctaacgactaaggtaagcaaagaatcatatggtcatgtatggaggctgataacagagatgaagttctgtaatgtttcacatctccctacaaattagaaacacgacatacatacataccaggcaaaactgggatctgtaaaaaaaactatcttcgaggagatatcaaccaaacagaacgtcatcgatcatgaatgaaagtgttaaaaacaaatgctagtgtatcttaagcacaaagtgagtcaacatagaagtaaacttgatctttagacaaactagaaaatgctggaaccagaagctatcactacaaaaggtctgaccttttctgtttcagaagcaacaaatcacattccaatgagaaatagcttagcaaaccacaaagaagacaagatttcttcactgaaccattaatgggtctcaacaaaagtcatgacctttaaagagcaaattctctctcgaatcatataaaaaggagtatgaattcagatgacctcaatcaatcaacttattaattagagaagaaacatgatcatcaatgggatcttataagttatgattctaacaacgaactttcctctgttcctagagaacaatttttatccccaaattccaatcttttgatattcccataaacaagaaaccataacaaaattacccttgagcttgcttcttcgcagctacctcctcttccgagatcttctcttcttcttccttcttcttctcagcttcaagctccttcttaacctctgcttcagcagctttctccgcagcgagaatgggctgatagtaatcggaatgttcatccatacacttcttcaacatcgaagtgacttccatacaattagtaacaatatcttccttgttcttctcagctgcttcaacacactcttcccaagcaacaaacgaatctttgcaaccacctcctttcataaacaagcaaaacccacactctccttcctcttcaccatctgcgtctcctcctcctccttcttctggtttttcatccgattcggaatcttctgggtctctccaaacagttgatgaatctccgagttcctcagatggagctggagtcgacggagacgcatctccgagtttctcagatttagctggaggagcttcttcgttgttttgagatttggggtcggaaaaagtctctgtttttggatctgtggatgatgtaattcccatttttctctcaggagagagtgagatcggatcttatggaaattggaggattcaggaggagaaaaagatgtctctttttaagggttttaaggttctctctcggtgccgccgccgattctctttacaagccagagagaaatgatcaatcgaaacgtctttatgttaaaacccctcaaaaacctttctattgaaccggatattctaaaccggaccaaaccgaacttaaacctttgttaaaccgtaagaatttaaccaaagtgaatatgataaaacaacaacaaaagaatgatctgtccacaagacgattcaagaataatgtattgttaagatttcaacatcaatgtttgttgctaattaaacacaagtctcctatttgctacaaatcgaatatagacaccaacatcattcgttttatagtaataaaaggaagataaatatagggagtaatcattagattaatattacagtcgctttcagatttcgtcaaatttcacaggcagacaagtttctttgacttggtcactataagagttgtaaactctttgataaataattgaatacagcaattatttcaaatctccggtgaagtttttctgggctctaagt

SEQ ID NO: 5838 - DNA, 3000 bp, Unknown
  misc_feature (1)..( 3000): cDNA_ID_1829350_gDNA_ID_1620821_Annot_ID_50693 3000 nt of promoter + ATG
agggattcaagtacgggttttcagcagacaaactaaatatttccagcacgtgatggaccaaatcgtagcatgtacacaaagagagaaactgttacctgaatttgctgcacaagaagaagcacaagtaactaatacatcaaatccctccaaacttaaagctgttctggttacatctctgaatccagaatactcaaataacctaaagaagatgtattgggaacacccaactacaacaggagacatagtagaagtttatcagccaagtagagaaaggtttcagcaaacagacaaaaagcttcacgaccaaaaggccctggcagagatgtacctcttaagcctaactgataagcttgtcacaagcgctttgtcaacatttggatatgtagctcaaggtcttggagggttaaagccatggatactctacacaccaaagaagttcaaatcccctaatccaccatgtggccgtgtcatctccatggagccttgtttccttacacctccagtacatggatgtgaagccaaaaagggaattaacactgcaaaaatcgttccttttgtaagacattgtgaagatcttagacactatgggcttaagctagttgatgataccaaaaatgagttatagattttacaaatcgaaacagagcatctttctgattgtatgtaaaggcaaatgtatacagcagatgtattaaaaatcaaaacttggctactgcaatttggttacttactcgatccagaagttatggtccaaaggcaatgctcgaatacatggttactgcaattttaacagaacaggaccttctctgtcggatttgtgaggtcatgtcgatgttcttcaaaattcaagcactctcctaacttgtaatcgctcttcgttcacttcttctcaaaatagttaggttatctggagaaactggggtctattgaattattatatgtcagctaacctaaactatttggagaagaggagatcgaggcgtttacagattttgtgtttagtaaagacactagcgagactctggtgaaatagacaaaacaaaacaaaaataatcctaattttataggtttttggttaatatcatgtgtaatttattattatttttaaaatgtttaaaagtaaaaaaaagagttataaagctgagtttttaacaagtgtcaaaaaaatgaaatttgaattttaagttttagattttcaatattgcatataataaaattctggaaataatcatattattattttccgtataaaatagtcaatgttaccttacctattaaaatgttaatacatatcacaaaattaaatgctaaagattgttttccaagttaaatttgaaccattaagctgtctttggaaaaccaaataatatttacttatgacaattgacctaaactatatacattaaacagatatggaaataatcataaaggcataaatcttttcaccttttttttcttcttctagaaaacagtcaatattattaaatacgggcataataacttcttactatgaacgtttagcaattagcattaagctctctttgttgaaaaaaaaaaaaaaaaaaaattctctgttcttcttttgtaattttctttttatcaccttcttgttcttctttgtttctattttttattggcttttttcgtcttcgttcaatctgaatcattttttcatgactattttttaagttgcgttttcaattataaaaaaatttgtttatagattgattgacaatatggacaccaaaaaaccatccgatccatatgttcgagaacaaacatgttctcaaagatcaattcaaccaccaacaaatcaaggcaaggtacgttatgaatttatatatgaaactttataatttgttttctgttcatatttaagtacacattcaatatatacatattcaaaagatgaataaaacttcatttgataaaaattataatcttagttcaaaggtctatattgataattccattagaattcttaacatagttttcatagaacattcattcatacctctaaaaatccctgtggattggtttaatctgttttaatcgttgatttcggttggtttagtgaaaagttcagcataggcttttatctcttgattttgggcttagttgttaaaggcccatgagttcagattttctatttcaaaccgttcgaaacagagtagacctaaacagagtaacgaacgactctagtgaaggtagcttgttttgctagcaacgaaagctatttttattggtcattgcaatacgttttcataatactaataaagcaattagtggtctagtagcatttttttattggatggtagatgcaaaaagttttctataagaaacccgactagattagccaaattacatgcaacatctttaaaaatgatttcgagaagctgcctaaaaaaagaaaaaaggatttgaaacataacccattttaaaaccaaaacataaaagttgaattggcctatcaataagttgtcaaaatggtaagttttggataggctcatcactcataaatcaattttgtttactctctttattcttagtcaacaacgcgaatttccggatctgattagtattatttccataaaataaatgaatgtatgatttgtcaatttgaaaataatacatgacatgtgatgtattgtttggattccaagttctcaccattttgaggattattgctttactacaaaacaagtccctagtcacattggtcatttcttcgttagtttaaaattatatataactcaacttgatgattcacataaatcgaagatcaagacttttctagtttaaaaaaaagtggagtcacgttacgtagttcgttgattgtcacaacttaacaatgacccattagaatattcaaaagacttagtattatatacaaatgcatgtttcgtcacctttaattaagaataaagagttgtaatcacgctagatatataactcttttgaatcaatctcctagttatagctgatcatactaaagtcaac

SEQ ID NO: 5839 - DNA, 3000 bp, Unknown
  misc_feature (1)..( 3000): cDNA_ID_3078623_gDNA_ID_1620821_Annot_ID_50695 3000 nt of promoter + ATG
ttttagatcgaagtctcttggcctttaatatagcatactgtactgtagacagggaagctgtagttggctcaatgccctttccccacatctcttggataagtgtgaccgccttatgtacgaatccattcctacaacaactagctattagtgctgtgtaaggcacaacatcaggctccaatccactttcaatcatttcagcaaaaattctttctgcctcttgaagatcctgaatcttgcactgctgagcaattaaaaacgtgtagtagacaacgtctggtttaacatcaaaggccttcatttccctcttcgtatcaaactttggaatattgagcaaaactgtgcatgttaccacatcaggtttgattcccattgtcttcatccttataaaaagagcataggcttccttcagctcgtttaaccggcagtatgtgttaatgactgtaaaagtgtacaaatcagggatcattcctctagcaactaaaacattaaattctgccgggcttctctcacattattaactcgacaccaagcaccaattagctttccatacatgctcttctcaggttcgactccaagttcccacattctttccagtaactcttgagctttgctgatataatcattctcggcgcaaagactagtgaatagtgtgaaatacacactcttgggtagaggacattccagactaatgaatcgttcaaaggcctgatcaagacagccagcttcacaatagcctttcaccatacttgcatcattttcccgagatttatgttccaatctctcataaaaagcttcagcctcgtctagtttatctgcaacaatcaggccttcaatgaccatgttgtgtgtaacagaagtgggttctacaccccgatcttccattagtttcagcgaatgcctcttgtacaagaccattcctagccaatccaccagcaaatacgttatatataacaatatcaggtgttttacctgtcccgtccatttcaatcatcaaattaaaggcatcaaaacattaaccttgaagacagcaaccacctatcaatgtcgtgtagttgatgacatcaggagctattcctttacccgtcatttctcggaacaagcttcctctactttgccaagctttcccaaagcaccaaatgcaacattgtagcaaaccttatcaagagaaatgttcatctctctaaactctttaaacagatcaaaagcttccgagaaatttcccatctgacaaatgcattgaaggattgagcttacaatcacacaatgtattctttttcttttcttcaccattttgttaaaaaaatccaaagcttagatatattcagattcttgcgatatccctcaattatggacgagttaaaatagacatccggatcaatcccaagttcctccatgtcaagaacagcttttttagcctcttctattctcatctcattacataaaccacgaaccactctgcgatatgcaattccaagatcactcttatccaccagaatatttgcgtccctcaatggttggagtacaagattagctatacctgccatctgatttaaacagagtccttcaatgaaattcatataaaacacactacatttcctaggctctgaatttaacagtctactaagaagcttctctactccttttgtatcctcattcctacacaatgcttgaaccacaagcacataagtatttgcatccgcatccagccccagccgctctatttgcatgaaagtagccacagccatattgttttctccagaagcaatcatacggttcatcaaaaaactcaatgcttgtatatctggaacacaccctaggggactagtctggaaaaatatatcgatagcttggtcaaacatatcaagattagcataggctttaaccaaggcactggagagcctgctcaacaacagcaatgacccttttccctcctcttctgcttctccaacggcctttaacagatccatgacactgaatccgcgtcctttatctccttttctaacgagttccactagaaaattattcaatttctgatccaaaccacaaccaaaaacgattctgataacagttgcataagcttggacactaggcaaaaaagtcacatttctttccattcgtttcagaaacgataaagcaagataaggatcatctttcaaactagctaaaactcgaagaagctcaatttctttaaattccaaatgctttacaatcaaagttaccttctttcacttgctccgagtatgagattatcgggttcgcccgggaaagtgcaggaaccacgtacaatcgcgacgagggtgctcttcgaatcaatcctctcacatgcgagagtaatgaaatcgggataacccgcatgagatattttccgatcttgtggctgccgggaaaaaaaccctagcagaggctaattccgacgacgattagcatcagagattttctcacttatcggagggtttttacaccgacaccgaaccgactccaaccaaatataaaaataaatttgaaccaaaaccggttaacgcggtcgtactctaattgtgtgtaccaacttttttagcttaaaagcgcattagtgtctttaataatatttaaaacattaatcaaatgtgttggttctttaaattggagatacttcttaaaaatgtctctatcaaacatttatgacgtggtgtctttattttgtagacattcaaaaattaaaataataatttcttttttatatattatattttaagtttggaaagacattctctttatatgtgcagtgaaatactcttttgtttcctttgaattcgccataaattaaaaaagaactattataaaatggtttaaaatttgataatgatagttggtacttggtaacaacaagtttgggtttggtaaaaaaaccaaaaaaaaaagtttgggattggtcaaaataaattcaacattgcttcttaatgagataagaagatgaaggtcgtgataacagtcgtcacttgtttatttcttttgtcagtg

SEQ ID NO: 5840 - DNA, 3000 bp, Unknown
  misc_feature (1)..( 3000): cDNA_ID_1829338_gDNA_ID_1620821_Annot_ID_50696 3000 nt of promoter + ATG
gcgacgagggtgctcttcgaatcaatcctctcacatgcgagagtaatgaaatcgggataacccgcatgagatattttccgatcttgtggctgccgggaaaaaaaccctagcagaggctaattccgacgacgattagcatcagagattttctcacttatcggagggtttttacaccgacaccgaaccgactccaaccaaatataaaaataaatttgaaccaaaaccggttaacgcggtcgtactctaattgtgtgtaccaacttttttagcttaaaagcgcattagtgtctttaataatatttaaaacattaatcaaatgtgttggttctttaaattggagatacttcttaaaaatgtctctatcaaacatttatgacgtggtgtctttattttgtagacattcaaaaattaaaataataatttcttttttatatattatattttaagtttggaaagacattctctttatatgtgcagtgaaatactcttttgtttcctttgaattcgccataaattaaaaaagaactattataaaatggtttaaaatttgataatgatagttggtacttggtaacaacaagtttgggtttggtaaaaaaaccaaaaaaaaaagtttgggattggtcaaaataaattcaacattgcttcttaatgagataagaagatgaaggtcgtgataacagtcgtcacttgtttatttcttttgtcagtgatgcaactctcattcttcaatattttcaattaccagcttctggatgctacaaccaacggtaaaatctttaatctttaggtcttgctgttgttactcaagttttctcctttgactcaatatttcatttttcttaggttcaaaggattccaggaaatcaaaggataaactgttaggagggcttttaacagctgattttgatgaagattcttgcttgagtaggtatgagtcttccttgtatcgcaagccttcaccatacaaaccatccagatatctcgtctctaagcttagaagctatgagatgcttcacaagcgttgcggtccaggcacagaagcttacaagaaagcaacggagattcttggtcatgatgatgagaatcattcaaccaaatctgttggtgaatgcagatacattgtgtggattgctgtttatgggctaggaaacagaatacttactcttgcttctctgtttctctatgctctcttgactgacagaatcatgcttgttgaccaacgtacggacataagtgacctcttctgtgagccttttccaggtacttcctggctactccctctggattttccactaacagatcaattagatagcttcaacaaggaatctccgcgctgttacggaacaatgttgaagaatcatgccattaactcaactacaacagaaagcatcatcccctcgtacctctgtctttatcttattcacgattacgacgattatgataagatgttcttctgtgaaagtgaccaaattctcatcaggcaagtcccttggttggtcttcaactcgaatctttactttatcccatctctatggttgatcccttcttttcagtcagaattaagcaagctattcccacagaaagaaaccgtctttcaccatttggctcgctatctttttcacccgactaaccaagtttggggcatgatcacaagatcctataatggttatttatcaagagctgatgagagacttgggattcaagtacgagtttttagcaagccggctggatatttccaacatgtcatggaccagatcttagcctgtacacaaagagagaaactattacctgaagtgtttgtcttagaaacacaagtcactaacacatcaagaagctcgaaacttaaagctgttcttgtcacttctctttacccagagtactcggagattctaaggcaaatgtattggaaaggcccgagttcaacaggagagataatacaaatttaccaaccaagtcaagaaatatatcagcaaacagacaataagcttcatgaccaaaaggcactcgctgagatatatctcttaagtttaacggattacattgtcacgagcgactcgtctacgttcggatacgttgctcaaggtcttggaggattaaagccatggatactctacaagccaaagaaccacacagctcctgagccaccatgtgttcgtgccgtgtcaatggagccatgtttccttagagctccactctatggttgtcaagctaagaaagtgaacatcaccccttttgttatgtattgtgaggatcggatcacgggtcttaagctagttgattcaaattagaaatcaaatttttttattactttgtgttgtttgatctgaaatccactagcttttatttttgtgtgtgtacttggatcactaaattcaaagttttatttattaatttaatgatttctatatagtagtttaaatttaaataattataacatgcctttcttcaagatttttttccttcactttggcgaagaatgataactccaactactacaaagaaaaaaccttactacaaattaagtgatattgaaatcactaaaaacacttctcaaacaatatatgggagtcatttcatatggtttatagaaattatatttagttataaattttagtgaatacaaatttacatattatattccacaaaagtaaatataatttttagtaattaaaagtgtattaaattttggaaacatattattgaatcataaatagtgatatatatacagtattctcttccataaaatcattttagtattactaaaagttgtttcaaaataaaaaaaattaacatagtaattattaaacattggcatgcaaataaactgattattaaattagatctcttaacatgtctttttagtactacaagttagtacctaagatttcaaatgattcatgcaaacctataagatatctttcacctcgtgatgaccataacatgaaaccataaatctatgcaacaaagtagaaaacaggaagaaaacatatctccaat

SEQ ID NO: 5841 - DNA, 3000 bp, Unknown
  misc_feature (1)..( 3000): cDNA_ID_1841814_gDNA_ID_1620821_Annot_ID_50698 3000 nt of promoter + ATG
tattagtgaagtcaaggttctccggcgggtgaagatgtcttgttggggttctccggtgcaacatacgacggagaacggttggtttacacggcgatgataaattttccggaggagatacggtggcggagtgttggtggtggtgaaggagctcatttgatttttgtttttgtttttcttaaggatatgaaatgggaggagctcaaaactataatgtctactcggtctttcatgttttgccacgtcggctgttatctctaaagttttgtattttagaatttgtgaacatgggcccataagactttaaagcccaatattatggaaacgacgtcgtcaaatacactctgatgaccgaaacgatgtcgttgactacgaaatagaatcaagttgtgttctctgtgatggacattgtgttagtggtaatcaaatccggtgaaaatggagcggagccgagtgaccagagaagcaccgaccggaaccaggatcctgcttgcttcactctctgcgatggttgcagagtcagttacgtttccgattgatctcacaaagactagaatgcagctccatggttcgggatccgcttctggtgcgcatcggattggcgctttcggagtcgtatcggagattgcgagaaaggaaggagtgattggtctctacaaaggtctatctccggcgattatcagacacctgttctacacgcctatcagaatcattggatacgagaatttgaaaggactcatcgtcagatctgaaactaacaatagcgagtctcttcctctcgccacaaaggctctcgtcggaggattttctggtgttatagctcaggtaacggtgtttcttcaccggtaaatctttagagtcatgttttgactgtaaattggatctggattaacagttgcttagagtagaattaacatttcgaattgaacaatcgatctctatgtatagtttcctttgaatatgtttcgtagaagaaggtattaattagaaggagattttgtttcaagttttataggctttcaatgttcgtttcattccaaagttagctgctactttaggttggttcagagataagaaccaatgcagatcctagtcatagacgtctcaatgtatttcacagatccttaatccaaaatttgtgcttgcttgttgtctcctatgtgttacaattaagttctctcagatcactgattacctatggaaactcgtagatttccggcgaagttaattattaaggattttcaattgtttttacgctactgaagtgagaaatgtagctatcttttaggttgttgatatctttagaattgacatttgagtgttgtttatacctacaccacactaaaatgcttcttattgtgtccatactagaaatgcaggtagtggctagtccagctgatttggtcaaagtgagaatgcaagcagatggtagattggtgagccaaggcctgaaaccgaggtactcgggaccaatcgaggcttttaccaaaatcctacaatcagaaggagtaaaagggttatggaaaggtgttcttccaaacatccagagagcatttctagtgaatatgggagaactagcttgctatgatcacgccaaacactttgtcatcgataagaagattgctgaggataacatttttgcgcacactcttgcttctataatgtcgggtcttgcttcgacaagtttgagttgtccagctgatgtggtgaagacgaggatgatgaaccagggtgaaaatgctgtgtacagaaattcttacgactgtttggtgaagacggttaagtttgaaggaataagagctttgtggaaaggtttcttcccgacatgggcaaggcttggaccgtggcagttcgtgttttgggtctcctatgagaagtttagactgctggcaggaatctcttccttctagacctgagaaactggaaaagcaaatttgagatttgtgttctttagttcttacttgttagttgttacacattttgtaagaaccttgagaagtagcatcagtttctgattaacgcgagaagagttatataaatttgggcccaaaagtgtaggcccatagatttatcattttttttttgttgattaaattagattggacatcctaagcaaaaaaatattttaaaaagtaagagattaataaaatattccatagaaatgtaatatgtgaatttcaaaattgcaattaaaaaaagtcgtgatgtttggcacatacaaaatattatatgataatggaataatattagatttatcatttatgtatatcgtatgtatatttaagttagaaaattttgtgtgtcatttgtccatgtattaaatcgaaatttggcgcgtggaaatcgttgcccaaacatattgacgtcatttttcttcttcttctcctctataataaagtagacttctgtgaacgcgaaaaaaaaaaaaaaaactgtatccaattttctgatttcgtttttccttctttccttcaataagtaactctacactgaatcaactcctctgatttctcgataaaaatctagaggcaagattccccacggaattaaggtactctttatttctgaaaactctttgatgtttacccagaataagcaaacgtgacaaatcatcttttgtttatttagcttaactattactggggtttcttcaatttaaacgtaattgaagtttatccagaagaagtactgatgaattatcttgttaattcagcctaattagttaccgggttttcttcgatttagactgttttagctggttgaatcgtcactttatagatcattagccaatttaagctattaaagttttaaactttttcttctgattcgttgaacgtcattgtccaattcagaccactttactgatttgatcagagagaattgtctttcttcaaagtaattttctacactgatctcattgattacgtcactctctctattgatgtttctttctctataatattggccttaggtttctttgttaacctctccattgaagatatg

SEQ ID NO: 5842 - DNA, 3000 bp, Unknown
  misc_feature (1)..( 3000): cDNA_ID_1010536_gDNA_ID_1620821_Annot_ID_50700 3000 nt of promoter + ATG
cttcatctcagccatcaaagacaatgaaactccatggtttatcaccctgaaacatccccatctctcactggcttcacggattttctgattcagaatcttatcagaaacctcttccaagtctatagtcggaatgatgactccgtttagttcccccatatcttcaatggagaggttaacaaagaaacctaaggccaatattatagagaaagaaacatcaatagagagagtgacgtaatcaatgagatcagtgtagaaaattactttgaagaaagacaattctctctgatcaaatcagtaaagtggtctgaattggacaatgacgttcaacgaatcagaagaaaaagtttaaaactttaatagcttaaattggctaatgatctataaagtgacgattcaaccagctaaaacagtctaaatcgaagaaaacccggtaactaattaggctgaattaacaagataattcatcagtacttcttctggataaacttcaattacgtttaaattgaagaaaccccagtaatagttaagctaaataaacaaaagatgatttgtcacgtttgcttattctgggtaaacatcaaagagttttcagaaataaagagtaccttaattccgtggggaatcttgcctctagatttttatcgagaaatcagaggagttgattcagtgtagagttacttattgaaggaaagaaggaaaaacgaaatcagaaaattggatacagttttttttttttttttcgcgttcacagaagtctactttattatagaggagaagaagaagaaaaatgacgtcaatatgtttgggcaacgatttccacgcgccaaatttcgatttaatacatggacaaatgacacacaaaattttctaacttaaatatacatacgatatacataaatgataaatctaatattattccattatcatataatattttgtatgtgccaaacatcacgactttttttaattgcaattttgaaattcacatattacatttctatggaatattttattaatctcttactttttaaaatatttttttgcttaggatgtccaatctaatttaatcaacaaaaaaaaaatgataaatctatgggcctacacttttgggcccaaatttatataactcttctcgcgttaatcagaaactgatgctacttctcaaggttcttacaaaatgtgtaacaactaacaagtaagaactaaagaacacaaatctcaaatttgcttttccagtttctcaggtctagaaggaagagattcctgccagcagtctaaacttctcataggagacccaaaacacgaactgccacggtccaagccttgcccatgtcgggaagaaacctttccacaaagctcttattccttcaaacttaaccgtcttcaccaaacagtcgtaagaatttctgtacacagcattttcaccctggttcatcatcctcgtcttcaccacatcagctggacaactcaaacttgtcgaagcaagacccgacattatagaagcaagagtgtgcgcaaaaatgttatcctcagcaatcttcttatcgatgacaaagtgtttggcgtgatcatagcaagctagttctcccatattcactagaaatgctctctggatgtttggaagaacacctttccataacccttttactccttctgattgtaggattttggtaaaagcctcgattggtcccgagtacctcggtttcaggccttggctcaccaatctaccatctgcttgcattctcactttgaccaaatcagctggactagccactacctgcatttctagtatggacacaataagaagcattttagtgtggtgtaggtataaacaacactcaaatgtcaattctaaagatatcaacaacctaaaagatagctacatttctcacttcagtagcgtaaaaacaattgaaaatccttaataattaacttcgccggaaatctacgagtttccataggtaatcagtgatctgagagaacttaattgtaacacataggagacaacaagcaagcacaaattttggattaaggatctgtgaaatacattgagacgtctatgactaggatctgcattggttcttatctctgaaccaacctaaagtagcagctaactttggaatgaaacgaacattgaaagcctataaaacttgaaacaaaatctccttctaattaataccttcttctacgaaacatattcaaaggaaactatacatagagatcgattgttcaattcgaaatgttaattctactctaagcaactgttaatccagatccaatttacagtcaaaacatgactctaaagatttaccggtgaagaaacaccgttacctgagctataacaccagaaaatcctccgacgagagcctttgtggcgagaggaagagactcgctattgttagtttcagatctgacgatgagtcctttcaaattctcgtatccaatgattctgataggcgtgtagaacaggtgtctgataatcgccggagatagacctttgtagagaccaatcactccttcctttctcgcaatctccgatacgactccgaaagcgccaatccgatgcgcaccagaagcggatcccgaaccatggagctgcattctagtctttgtgagatcaatcggaaacgtaactgactctgcaaccatcgcagagagtgaagcaagcaggatcctggttccggtcggtgcttctctggtcactcggctccgctccattttcaccggatttgattaccactaacacaatgtccatcacagagaacacaacttgattctatttcgtagtcaacgacatcgtttcggtcatcagagtgtatttgacgacgtcgtttccataatattgggctttaaagtcttatgggcccatgttcacaaattctaaaatacaaaactttagagataacagccgacgtggcaaaacatgaaagaccgagtagacattatagttttgagctcctcccatttcatatccttaagaaaaacaaaaacaaaaatcaa

SEQ ID NO: 5843 - DNA, 3000 bp, Unknown
  misc_feature (1)..( 3000): cDNA_ID_3078589_gDNA_ID_1620821_Annot_ID_169496 3000 nt of promoter + ATG
caagataagagacacataaatacataattaagacttttagcaaaaatacataattaagatctaccataacaacgaaactgaaaacacgtaaagatataaattagaacttagaaaactggatttgagatggacagcttcctctaggcaaaactggacattcgataaactcagttcctgacgtatcaacacaaatatagatctgatgaagctgggcattacgctccggatctttgttacattctattcctggcgtaaatccaattccatcttttatcgcgttggtgatcttatccagattgtagaatccatcatccggattaattcctacatttacgaaaagaaaatggtcactggtgagtttaaaatgtacacatgaatagtacatttatatagtgatttattagtgtatataccggagtttttgaggatttggaggagatttgctttttgtttgagtttaagagcattttcaaagtactcatgttggtccattacggattcggagcatgtaccgtgtttctcccattcgtgttcccaaaagttgaacccttcgttgcttggacatgatagtgttggccaattctttttcaaactacttacgagatccgatatctatacattcatatacatgatagctaataatcgttgtttaagaattagaagaaaaaattacactatcaattatatatacctgagatctatcaaattggctatcgggatcacaatttgatggccatgaaccaccgttataattaggccatagaccgtggataccaaaatctgcagcgggtttaccggatgttggatagcaacaagcacgcgatgtatcgcaataggctccaggccactgcagcaaattcataaaatttcacattcagtttatatatgtactttgtcaaaaagaatgaataaaatgattactggatcttagtttaaaccagaatatatatacctgaagaacgaagtagaagaaatcaaagtcttcttgaggacgtgaaacgaaaagaccttgaaacactagaagcttgaggagaacgttaacacaaccctttgctcccatctttcttctcttcttttctgcgattgcatgattaagacgtttcggtttcaaaatttatagacagataaaaatgccatttcccttgtaataccatttttaattagttattcatctacgtgattagttaagagattggcatattctcttaagtaattcatttcatatttccgaccttattgaaaagtcatttttgtacgttttacaagtagacagtaaactcaatctcagaatttagtaaactgattgttagaagtttttttattttatttggtagcccttcattacgcgcaattgtcactatatatgtcacaatttttaattaaaaaaaaatagttaaacatgtagactagtttttgagaaactttatgattacaagattgttaatttacactatgttagaggacttttatatcccataccgcaattgcatggtatccaaaggatcgcagaccaactatcacttaactaaaaatataaaaggaccaagtcgatcggcaaatcgatccgagtggagattaaacaaaaaaggattgacttgaaaatatttccaagggatatccatttctatgcttaactaattttaaaatatgggaaggaattatagtatcaacgtacgttacaacttacaacatgtgagcacgtgacccaagcttcaagaaaatctcaaatattttatttatttatttttctaataaaaatgttaatatttcattagaaaatgaaaaagttaggaattacaagaatgtaaaacctatactttggtctcatagcaaaaaagaataaaaaacatggaagcaaatatcaatcggtccatcgacatcaacaaaaacagttaagcttttgaaaacaatgaatcgatacaacaattttaatgaatcgcatataagacacctcaaagaggaagataatgctgtcaaacggcaaaggtcgaaacaatgaaaacccaagtggatggaagcctttcaccggtaggccgagaacactgagccgtcaacggcgaaacacacatagcacacgaaaatctcaaatataaccaactaatgtacattttaacatggaattatgaattatatgctaattaatgctttgttaaggatccatccatattccatagcttagcaaaaaaggatccacccacgattagcgttaaacttaaacttaaacatgtcttatagtaacactttaacagaaataagcaaacatcatataaaagagctagaacatagaaaattaatcaataatgaaggagaaggaaggtacgtggaattataatttaattaggaagcactactaatccacttcccgatgatatgtactgatcctggtcgtggtttaacagctaggtttggtcaaccaagccaatgtaataaggtttgatttgattatttttgttgatttttgatttgatttgatacctaactgaatccaaagtttagtagtttaccatccatgaggttacttggattaaacataatgttgactgtaaaccggtccggttcatgaaagaaagacttgatacgttaaaaccggagtcaccctgtatcggtcagaaggacccggaaatcaaatggttttgaatgtgacccgaaacaacccaaacccgacccggtccgaatttgtgaggaataggtgtgtaatttgtaaaaaggcgctcccaattttcttctccactacgaaaacggagactgagagcagcagcgacgagcttcatcggccgtcgtctccgacctcactcgcgatctccgattacaaaaattagatcctcgattaagaattcgaaacatcaaaatttcatcaacaaaaaaaaatcagttactggatttacgtttcgtttgcgtcacagatcagatctccatgatcccttatccgctttcgttgcggttccttaaaccttgatgcaacggtctaatgctcgttccaggtcgaatatcaattcagat

SEQ ID NO: 5844 - DNA, 3000 bp, Unknown
  misc_feature (1)..( 3000): cDNA_ID_3078598_gDNA_ID_1620821_Annot_ID_169493 3000 nt of promoter + ATG
gttaaaccacgaccaggatcagtacatatcatcgggaagtggattagtagtgcttcctaattaaattataattccacgtaccttccttctccttcattattgattaattttctatgttctagctcttttatatgatgtttgcttatttctgttaaagtgttactataagacatgtttaagtttaagtttaacgctaatcgtgggtggatccttttttgctaagctatggaatatggatggatccttaacaaagcattaattagcatataattcataattccatgttaaaatgtacattagttggttatatttgagattttcgtgtgctatgtgtgtttcgccgttgacggctcagtgttctcggcctaccggtgaaaggcttccatccacttgggttttcattgtttcgacctttgccgtttgacagcattatcttcctctttgaggtgtcttatatgcgattcattaaaattgttgtatcgattcattgttttcaaaagcttaactgtttttgttgatgtcgatggaccgattgatatttgcttccatgttttttattcttttttgctatgagaccaaagtataggttttacattcttgtaattcctaactttttcattttctaatgaaatattaacatttttattagaaaaataaataaataaaatatttgagattttcttgaagcttgggtcacgtgctcacatgttgtaagttgtaacgtacgttgatactataattccttcccatattttaaaattagttaagcatagaaatggatatcccttggaaatattttcaagtcaatccttttttgtttaatctccactcggatcgatttgccgatcgacttggtccttttatatttttagttaagtgatagttggtctgcgatcctttggataccatgcaattgcggtatgggatataaaagtcctctaacatagtgtaaattaacaatcttgtaatcataaagtttctcaaaaactagtctacatgtttaactatttttttttaattaaaaattgtgacatatatagtgacaattgcgcgtaatgaagggctaccaaataaaataaaaaaacttctaacaatcagtttactaaattctgagattgagtttactgtctacttgtaaaacgtacaaaaatgacttttcaataaggtcggaaatatgaaatgaattacttaagagaatatgccaatctcttaactaatcacgtagatgaataactaattaaaaatggtattacaagggaaatggcatttttatctgtctataaattttgaaaccgaaacgtcttaatcatgcaatcgcagaaaagaagagaagaaagatgggagcaaagggttgtgttaacgttctcctcaagcttctagtgtttcaaggtcttttcgtttcacgtcctcaagaagactttgatttcttctacttcgttcttcaggtatatatattctggtttaaactaagatccagtaatcattttattcattctttttgacaaagtacatatataaactgaatgtgaaattttatgaatttgctgcagtggcctggagcctattgcgatacatcgcgtgcttgttgctatccaacatccggtaaacccgctgcagattttggtatccacggtctatggcctaattataacggtggttcatggccatcaaattgtgatcccgatagccaatttgatagatctcaggtatatataattgatagtgtaattttttcttctaattcttaaacaacgattattagctatcatgtatatgaatgtatagatatcggatctcgtaagtagtttgaaaaagaattggccaacactatcatgtccaagcaacgaagggttcaacttttgggaacacgaatgggagaaacacggtacatgctccgaatccgtaatggaccaacatgagtactttgaaaatgctcttaaactcaaacaaaaagcaaatctcctccaaatcctcaaaaactccggtatatacactaataaatcactatataaatgtactattcatgtgtacattttaaactcaccagtgaccattttcttttcgtaaatgtaggaattaatccggatgatggattctacaatctggataagatcaccaacgcgataaaagatggaattggatttacgccaggaatagaatgtaacaaagatccggagcgtaatgcccagcttcatcagatctatatttgtgttgatacgtcaggaactgagtttatcgaatgtccagttttgcctagaggaagctgtccatctcaaatccagttttctaagttctaatttatatctttacgtgttttcagtttcgttgttatggtagatcttaattatgtatttttgctaaaagtcttaattatgtatttatgtgtctcttatcttgttatcttttgtaacttctcttctcctttttagagtccaaaccaaattcatggggattctaaaatctaaaattcaaataagataaaccttcgtatattggtaaaattcctaatgcatcatacgtttcataaaacttcagccctaatggctaatgcataagtttaacagaatttggtcagtcacggtacaatagttttttaataatgtgctaaagtattatttagtttagtattatagaaacaataatcggaatgtagtagaatcgtttaatctccttttgagggcattatcggatcccagttcaagccaatgttaccaagagcattgttgcatggcatttatctgttacaaaagtccatccgattaagtttcacaaagagaattaatgacgcagcgtaatcattaaggttgcctatatttttttagacaagtggagaaccaagttgagaataataaattaataaacaaattaagaaaatattctttatatattcatttttggaaacaattgattgtgaggtacctttccctttttacatatagattgggaaataaattcaaggaaacaaaaaataatcaagaaacacagagagcaaaacacatg

SEQ ID NO: 5845 - DNA, 3000 bp, Unknown
  misc_feature (1)..( 3000): cDNA_ID_3078601_gDNA_ID_1620821_Annot_ID_169492 3000 nt of promoter + ATG
ccattaaaccaaacaatcccttttaatcagacaaaactctgtctctcaatctcaaaatcaagattgacatgtctcgttttgtgcttctctttatcatttccacattcattaatctgtcacaaggtattaatgtagagtatcttcttgtttgaaacaaatatattatatatgtgcaataaggtttttcattagatgttgtttgatgttttcaggagcgcaaatgccttacatgaccacagatgctaaagaagtttccggcaagtcattcgattacatcgttgtaggtggcggaactgcgggatgctccttagccgcaactctatctgagaaatactctgttcttgtcattgaacgtggtggctcaccttttggtgatcctttagtagaggaaagaaagtactttggatactcattgctaaatacagatgaatactcatctgttgcgcaaagttttacctctgtagatggaatcgaaaactacagaggacgcgttcttggaggatcgagcgctataaatggcggattttacagccgagcaagcgatgagtttgtgaagaaagctggatgggacaagggtctggttcaagaatcttataaatgggttgagtctaaggttgttttcatgccagaactgactcaatggcaatctgttgtgcaattcgggtttcttgaagccgggttttatccatataacggatatagtttggagcacacgcaagggacaaaaatcggtggaagcatatacgatcagtgtgggaaaagacatacatctgcagatcttttgggatttggtaaaccaaattgtataactgttcttttaaacacaacggtaaagagcataatctttgatagtagtaataagactcgtgcggttggagttaggtttatggagagtgatgggaactcaagtaagagctacaaagttcatgttgagcagcatagaggcgaggttatactcgcggctggggctttaggtagtccgcagattcttctcttaagcggtattggacccgagaatcatctaaaggatttcgacattcctgtgattgtcaatctcaaagaagtcggaagaaaaatgtcggataatccagcgatctctcttcttgttgatagattctcgcaaaaccgcacactcgagccacctcaagttgcagcaatagcagaaggttacaaattcatactcgaatccgaggttctcccaactgacattaccacaacaagaatctctatagcagccaaaatcgcattccctaaatccaaaggaaggctcaagcttaacagcactaaccctagggagaatccgtcagtgaaattcaactacttggaaaacaaggcagacctcgacgcatgcctagagatggttctgcatcttcaacatgtagcgaggtctgagactgtcacgttcttcttggggacacaagctcatgataagcttgtggcgggtgacgaagagcttaaaagcttctgcataaagaatgttagaacttattatcattaccatggtggttgcgttgttggatctgttgtggacgaggagtataaagtgaatggtgttaagcgtttaagagttgttgatggttcaacgtttgaagaatcaccaggaacaaaccctatggctactgttttaatgctgggaagatatcaaggaatcaaaatactcaaagaacgagaagagcaagaagatacatttcttagccctcaaggtagcccacaaccacagccataacacattgaaatctttgtttctgttgtagtttgcttcaatgagaaagaatcaagttgctgattaatacttacaacttaagcaaccaattttattgaattcgaaattgatttcagtaaacgaaaacgaaactatacaaaacattctagcaaacctaaacctaaacctagccccatgttgcatcttgagggttcgagtcacttttaacttcttcttcctccgtcttcttagtttcttctgtcgccggcgttaatggagaaaccaatccaaatcccaatcttcttctcttcttcaacttcttcaacaggcatctcatacctacacataggacacgtggcgtgcctccctaaccactcctccacacactttgagtgaaacttatgtttacaaggcatctccgccgccacgtcacctttagaccactcatccaaacaaatcgcgcaagaaccaccatatttctccttatcttctccgatcacgacacgtggcatattctccacttctgacttcaacgccggcgacctcccttgttttccaccgtcgctaaagaaatcgtcgagtcccgatcgcgatccgatcatcacgaaccttggactcaacggatctccccgtctcgttgtttgatcggtagatccttggtcatcatcgtcttctctggcggctaaagctacaatcaccggcaaaaatcgagagagaccatcacctcttccttgtataattctctcgaacatagaagaaaactcaacgaaatcattctcagaagacatcacgctagtacccaaaacaaagagaaaaaaaccgagacttttttgttaagaacagagaaaaggagcgaactttcttggagaaaaatctcttaagaagaagaagaagaaaagtcgaaagataagacaattgaaattggagaagatagtgtttgagattatatatgttagcagaagattacagtagtttcatgaaaagaaagttgcagaagactctagaaccattgacgacgcttaagactttccatttatttttagtttcttttaaaaacaatttagtatttattatttaaaaaccttatcctctttcataaaggacaaaaaggaaatagataattacgctgtgagaaattttgcataaaggtacgaacatttataattttatttacaaagttccagtttttttggagtgttgataaaacccccagagattattcctgcacagaaggtgtttgattaaattccgctgagggtaatgttctgactttcgatgctttacgaatgatacttggc

SEQ ID NO: 5846 - DNA, 3000 bp, Unknown; identical to SEQ ID NO: 5842
  misc_feature (1)..( 3000): cDNA_ID_1010536_gDNA_ID_1620821_Annot_ID_169483 3000 nt of promoter + ATG

SEQ ID NO: 5847 - DNA, 3000 bp, Unknown; identical to SEQ ID NO: 5841
  misc_feature (1)..( 3000): cDNA_ID_1841814_gDNA_ID_1620821_Annot_ID_169481 3000 nt of promoter + ATG

SEQ ID NO: 5848 - DNA, 3000 bp, Unknown
  misc_feature (1)..( 3000): cDNA_ID_3078623_gDNA_ID_1620821_Annot_ID_169478 3000 nt of promoter + ATG
ctttgaccttttagatataggctctcttcataaattcttggatcacttttttagatcgaagtctcttggcctttaatatagcatactgtactgtagacagggaagctgtagttggctcaatgccctttccccacatctcttggataagtgtgaccgccttatgtacgaatccattcctacaacaactagctattagtgctgtgtaaggcacaacatcaggctccaatccactttcaatcatttcagcaaaaattctttctgcctcttgaagatcctgaatcttgcactgctgagcaattaaaaacgtgtagtagacaacgtctggtttaacatcaaaggccttcatttccctcttcgtatcaaactttggaatattgagcaaaactgtgcatgttaccacatcaggtttgattcccattgtcttcatccttataaaaagagcataggcttccttcagctcgtttaaccggcagtatgtgttaatgactgtaaaagtgtacaaatcagggatcattcctctagcaactaaaacattaaattctgccgggcttctctcacattattaactcgacaccaagcaccaattagctttccatacatgctcttctcaggttcgactccaagttcccacattctttccagtaactcttgagctttgctgatataatcattctcggcgcaaagactagtgaatagtgtgaaatacacactcttgggtagaggacattccagactaatgaatcgttcaaaggcctgatcaagacagccagcttcacaatagcctttcaccatacttgcatcattttcccgagatttatgttccaatctctcataaaaagcttcagcctcgtctagtttatctgcaacaatcaggccttcaatgaccatgttgtgtgtaacagaagtgggttctacaccccgatcttccattagtttcagcgaatgcctcttgtacaagaccattcctagccaatccaccagcaaatacgttatatataacaatatcaggtgttttacctgtcccgtccatttcaatcatcaaattaaaggcatcaaaacattaaccttgaagacagcaaccacctatcaatgtcgtgtagttgatgacatcaggagctattcctttacccgtcatttctcggaacaagcttcctctactttgccaagctttcccaaagcaccaaatgcaacattgtagcaaaccttatcaagagaaatgttcatctctctaaactctttaaacagatcaaaagcttccgagaaatttcccatctgacaaatgcattgaaggattgagcttacaatcacacaatgtattctttttcttttcttcaccattttgttaaaaaaatccaaagcttagatatattcagattcttgcgatatccctcaattatggacgagttaaaatagacatccggatcaatcccaagttcctccatgtcaagaacagcttttttagcctcttctattctcatctcattacataaaccacgaaccactctgcgatatgcaattccaagatcactcttatccaccagaatatttgcgtccctcaatggttggagtacaagattagctatacctgccatctgatttaaacagagtccttcaatgaaattcatataaaacacactacatttcctaggctctgaatttaacagtctactaagaagcttctctactccttttgtatcctcattcctacacaatgcttgaaccacaagcacataagtatttgcatccgcatccagccccagccgctctatttgcatgaaagtagccacagccatattgttttctccagaagcaatcatacggttcatcaaaaaactcaatgcttgtatatctggaacacaccctaggggactagtctggaaaaatatatcgatagcttggtcaaacatatcaagattagcataggctttaaccaaggcactggagagcctgctcaacaacagcaatgacccttttccctcctcttctgcttctccaacggcctttaacagatccatgacactgaatccgcgtcctttatctccttttctaacgagttccactagaaaattattcaatttctgatccaaaccacaaccaaaaacgattctgataacagttgcataagcttggacactaggcaaaaaagtcacatttctttccattcgtttcagaaacgataaagcaagataaggatcatctttcaaactagctaaaactcgaagaagctcaatttctttaaattccaaatgctttacaatcaaagttaccttctttcacttgctccgagtatgagattatcgggttcgcccgggaaagtgcaggaaccacgtacaatcgcgacgagggtgctcttcgaatcaatcctctcacatgcgagagtaatgaaatcgggataacccgcatgagatattttccgatcttgtggctgccgggaaaaaaaccctagcagaggctaattccgacgacgattagcatcagagattttctcacttatcggagggtttttacaccgacaccgaaccgactccaaccaaatataaaaataaatttgaaccaaaaccggttaacgcggtcgtactctaattgtgtgtaccaacttttttagcttaaaagcgcattagtgtctttaataatatttaaaacattaatcaaatgtgttggttctttaaattggagatacttcttaaaaatgtctctatcaaacatttatgacgtggtgtctttattttgtagacattcaaaaattaaaataataatttcttttttatatattatattttaagtttggaaagacattctctttatatgtgcagtgaaatactcttttgtttcctttgaattcgccataaattaaaaaagaactattataaaatggtttaaaatttgataatgatagttggtacttggtaacaacaagtttgggtttggtaaaaaaaccaaaaaaaaaagtttgggattggtcaaaataaattcaacattgcttcttaatgagataagaag

SEQ ID NO: 5849 - DNA, 3000 bp, Unknown; identical to SEQ ID NO: 5838
  misc_feature (1)..( 3000): cDNA_ID_1829350_gDNA_ID_1620821_Annot_ID_169476 3000 nt of promoter + ATG

SEQ ID NO: 5850 - DNA, 3000 bp, Unknown; identical to SEQ ID NO: 5836
  misc_feature (1)..( 3000): cDNA_ID_3078636_gDNA_ID_1620821_Annot_ID_169470 3000 nt of promoter + ATG

SEQ ID NO: 5851 - DNA, 3000 bp, Unknown
  misc_feature (1)..( 3000): cDNA_ID_3078585_gDNA_ID_1620821_Annot_ID_169497 3000 nt of promoter + ATG
agagttcttagatcttcaggttttatgtttcgagacgaatgggctaatgttatctctggttagttgtttttttttcttgaatcaattcttcattttggataagttgggaaatgtaatcattgggaaatgattcaggatctgatgaaggtatatattcttggattactgccaattacgcacttggttcgcttggaactgatccgttggaaacaacggggattgttgaactaggcggtgcttctgcgcaggtttagtcttgtctctctcgttggatgctagagtactagaccatgcatacatttacgctatatatagctggctttctctttttctttgtataaatgtaggtattttccgtccaattttggcagaaaaaaatgatttgactttttttttttgatataattttcatcacaaattttgtaatttaagacgttttttgtcgcttgatgattcaagattgggtttagatttttttaacaaatttgaaacgaacatttttgatgcaaaaattggtttgaaaaacgaacaattccggattaagaaactaacaacaaccgaactatactgcatctagatctgaatcttgatgttgactttagatgtacgtccggattaagaaactaacaacaacagaactatactacatttggatctgaatctagatgttgactttgtaacatatttttagacttcaactgtggtatatggtcgaattgttagtgatgactatttgtgcatatgtttaggtgacatttgtgtcaagtgagcatgtgcctcctgagtactcgcgtacgattgcctacggaaatatttcatacacaatctacagtcacagcttcctcgattatgggaaggtaacttttgagacaagaggatttgtgtctttgattccttgttttttaaaagttgtttggaaacgtattaatcgctgaattttatttcttttctttttctcatcaaaattgtagataataatgctaccaaatttgttaattttcaaaaaagctattaacttttgtctccttccaggatgcagcactaaaaaagttattggaaaaactccaaaactcaggttagttgtttttgataaattgttataattgcacttttgagttcatgtaattgtaataatattatttttctctcaatactcatcttcggtgttacaattcatatagctaactctacagtggatggagtagttgaagacccttgtactcctaaagggtacatctacgacacaaattcaaagaattattcatccggattcttagctgatgaaagcaaacttaaaggctcccttcaagctgctggtaatttctcaaaatgccgatccgctacgtttgcgcttttgaaagaaggaaaaggtaaacaaagagcattattggtacgtatagctgaatgttgttcctcgtatcgatttttcttgatctcttatgggtgtagttttgttcctttgtgaacagagaactgtctatatgagcattgttctattggatcaacattcacacctgatcttcaaggaagttttttggctacagcatctttctactacaccgccaaggtataatcccatgacgtcaagattatatgtatgaatttgtgggggagaaattgtttgaacattaatgtcttatatattttcctgtatgaaattaatctgaatcagttctttgagttggaagaaaagggttggttgtctgaattgattccagctgggaagagatattgtggagaagaatggtcgaaactgatattggaatacccaacaactgatgaagaatatttgcgtggctattgtttctcagcagcatatactatatcaatgcttcatgatagtcttggtattgctcttgatgatgaaaggtaaaatttactgcacaaattcaagaacattgtaagattaatcaaatgtgggtttttttggacaaagatataaacaaaaactatacgtttgtttttgtttgcagtatcacgtatgcaagtaaagcaggagaaaaacacataccactagattgggcattgggggcttttatactagatgttgtaacacccaattctgattacaatggtaaatctagaaaatatcttggcttttaagtaacgtagccaaatacaaaatatgaaatcatagttttgtattttacgttaaactgtgtttgaaagtaactatcatgtcgtcgttccttttcatgaaataagttagctaagttcgtaggtgtgtatcttcccctgcatgggatcgactcttctcgtttgtgggattgtattattgtaataaaactctttgtttggtttcttctctcaataatattgttacaaagttgacgagtacaaaacaaaaagaggaaggaaacaaattaaaaaaaaattactcataagaaaaagagagagaccaaattaaagtagaggtggtacataataacatgaaattcaatattgtttttttgtttttttgttttcattctgattttgattatggacacgaaatctaagattacagagcaattatgaatggtactgtttaagaaatcggcccacagcgagtgatgatatatgatcctttgttcgcatgtccttctgttttgcacacgttttgtaaatgtgcttttactttctttaactattaatttaggtgtacaacaaaataatagattttcaaataccagttaccactagtttcttatccctggaggattggttacgtgaaatatcttttaggtctaaagactagagcttgtagttataggtcttcctctggactcctatttctcagttctcactgattataaaatcagattctagactaattaagaagaacaggcaaaacgaatttgctattggcccgttacgttttttttcctttaaataatttttacgttttttcactacgtttattgctattgctataaatttatcttctcagttttcgttagagagtcttaaatgctgatacaatgtttgtatacgttccaggttggaaaaaaataatcggat

SEQ ID NO: 5852 - DNA, 3000 bp, Unknown; identical to SEQ ID NO: 5835
  misc_feature (1)..( 3000): cDNA_ID_3078643_gDNA_ID_1620821_Annot_ID_169468 3000 nt of promoter + ATG

SEQ ID NO: 5853 - DNA, 3000 bp, Unknown; identical to SEQ ID NO: 5834
  misc_feature (1)..( 3000): cDNA_ID_2042017_gDNA_ID_1620821_Annot_ID_169467 3000 nt of promoter + ATG

SEQ ID NO: 5854 - DNA, 3000 bp, Unknown; identical to SEQ ID NO: 5832
  misc_feature (1)..( 3000): cDNA_ID_1443575_gDNA_ID_1620821_Annot_ID_169465 3000 nt of promoter + ATG

SEQ ID NO: 5855 - DNA, 3000 bp, Unknown; identical to SEQ ID NO: 5831
  misc_feature (1)..( 3000): cDNA_ID_1829379_gDNA_ID_1620821_Annot_ID_169464 3000 nt of promoter + ATG

SEQ ID NO: 5856 - DNA, 3000 bp, Unknown; identical to SEQ ID NO: 5830
  misc_feature (1)..( 3000): cDNA_ID_1809195_gDNA_ID_1620821_Annot_ID_169461 3000 nt of promoter + ATG

SEQ ID NO: 5857 - DNA, 3000 bp, Unknown; identical to SEQ ID NO: 5829
  misc_feature (1)..( 3000): cDNA_ID_2041837_gDNA_ID_1620821_Annot_ID_169460 3000 nt of promoter + ATG

SEQ ID NO: 5858 - DNA, 3000 bp, Unknown; identical to SEQ ID NO: 5828
  misc_feature (1)..( 3000): cDNA_ID_1829387_gDNA_ID_1620821_Annot_ID_169457 3000 nt of promoter + ATG

SEQ ID NO: 5859 - DNA, 3000 bp, Unknown
  misc_feature (1)..( 3000): cDNA_ID_1829334_gDNA_ID_1620821_Annot_ID_50701 3000 nt of promoter + ATG
tctggtgagatacactcacaatgattagagaaaaaagatttgaattatgaatttagctaatgattctgtgtttgttaattttcagataattggagagcctttggttgttagagaagctctttatcaagttgcttcactgcttcatgataatccttcaagatttcaacacttactcctgtcttcttcaagttcttccatgcatcaacctggtgcaatgttaatgtctgcagcactgacgagctctcacagaaactacgctgtgcgtagagatatagcagatgcaagagaattttgtgtttgcttcatctgtccagctgaaaacgttggaggtgtgattggaaaaggcggtggtttcattaatcagatcaggcaagaaactggtgctactattagagtcaatacctcagaaactgatgatgatgattgcatcattttcatatcatcaaaagaggtaatgcaaatctttttcttttataaatcatacaaagattatttcatatttaaaccgaccttttttgttgtatgtagttctacgaagatcaatctccagcggtgaatgcagcaatacgcttacaacagcgatgcagtgagaaagttggtaaagatgcaaatgatttagcaatctctacgcgtttacttgtatcgagttcccaaatcgggtgtctcattggaaaaggtggagcagttatatctgagatgaggagtgtaacaagagctaatattcgtattcttcaaaaagaagatgtaccaaaaattgctcgtgaagatgaagagatggttcaggtaataaacacattcggattgtgtttggacttggttttgtttcctttgtgaaagtgaaactaagccaatgtttcctgttatattgctgtggttagattacaggaagtcctgatgccgctatgaaagctctcacgcaagtaatcttgcgattaagagctaactctttcgacatggatcatggacttgtcttgctaccaacatcttttccatatatccctcaagtgactgaaagttcgagcaaatccaaatacgcaaaacgcgatgaccacagtaaactggtatgtactggtccacaagatttttttaaaaaatatcaaatgtaatatgcatcaatcaatcaaagatattcacttaagtaatttatatgcttttgcagaattcgaattctaagagaagaaaccatgtttcttaaatcaagaaaaccaatcttagagaggaagattgagagtgttcagaacttcaatgttgatgcaatttttatacaatattatgttacttgtaggaaaaaaaagttgtctatgcaattcacataagaaatgtaaacaagagatggtgtgttttcatctttgttctttttttcttttacgttggtatactctttgaattttcgcaagtattttttaaaatttctatttctagtaaccaacatttcattattctattgcattacataaaaaataccaattcaatactctctacgtttttattgtttttgagattaatgtctagatactctggatcttttccactttactttgttcttgcaagaattatacttttagttcaagttagtggatgtacactatagagtaggtgagaagaagaggacacaaacaagattacagaagtcttagtcattcatatgaaaaatctcacgcttacgctttccatcagtttcttagttgtacatcaaatctcaaaaaaagagatgttgacactggaacgtaagccccgttcagtttggtcagaagaaagacccaagtgaataactgttttgtaacgaacggccatattatcattcgtcggagagaaggctccaaacacgtgtctcagccatattatatcattcgtccgagagaaggctccacacacgtgtctcagccatatgtctatccgacgtaaagattctctcgttgccgaggttccgcatctctacggaaaagtgacccgcggacttatctgggcctgaactttgacaagtttatagtccaatcacttcgtacagtgacgagttgaacttaccaaagttcagatgtatatataaatacactagatatcctcataatcgtcgatgtgggatgaagttacgtttgcaagctagaatctcaccaaatcggtattccttgggccttgacggtgcaataagaagaatcgattcttaaaaattgggactctaaaattggcgggttgagccaagcccgtgcaatagtgcaacgcatgggcgactcgcgaaagcccagatagcaagctatcttagtgagctatctccctcaaaaaatagagttaatatcgtgtgggccgatggcccacatatcagatattaaactgataagaacagatactacacttgatcttagccaaaaggccgagaaaggtatgaattgttcgtacggctcagcttctattttatacccaaagctatgactaaagctcttctaaactatcgatgtgggacaattcaaaaagaacctcttgaacaaaaacgcctatgaaagacaaaacatcataagttgtcgtcgtgccttaaagcactgaattcaatctgggtagctttaatcttttgaatttcttctctctttctctacgaataaaatatattcatcattctaaaaaaaatcacagtcaaatttagtaaacacttcaaagtttatagcttagattattatttagctacggacatgaatacaatgccaaaatgagaattcttattggttgttgtttgatgtaacaatatagagcaggtacagagaggataagcaaaaacacaagataacaaataaatctttgctcattatatgtcctcagcaataaacctaaattctctgtctttatatgtgaattccacaattaattatgctttaacattttttttatcttgtattcttcattataatcagctacttcaaagtcttaaccacttcttgaagtgtttcactgtggagatttatataaactgcagaccctttttgtttagtaaacagtcacagagcaaaaatg

SEQ ID NO: 5860 - DNA, 3000 bp, Unknown
  misc_feature (1)..( 3000): cDNA_ID_1829330_gDNA_ID_1620821_Annot_ID_50702 3000 nt of promoter + ATG
caggttcagagtcaccaataccgacatttcttgatgtacctggtagttgcttaacaatctgatctgcatagagaaatgaaaaaacaaaaagatacactgttcaagttccgtagatgtaaatatcataaagaggagaatgtgaatttgagtgcaacaaacctcttcttgtagcagattcaaaatcgttaggtgtccaatgaagagcttgagaaaggtcgggactacgaagaacattagcatttgatgatgtggaagatccataacagctaataccatccattaatccatggacgtcccatctcgatgaaggaggagagaaacttgtattagtctccaataaggctcatgcaggccaaatgaaaagtccccacttgtagaatttgatctatctgacttcgcagctacacaacagagcgaacccatactttaacttctattcactcgatagaccctttcgctaaaaacacctcaagctgacaacagtatagcttctcaataccaagcttaaacacctctccaactccataaactatgagacagatctcgcaaacacataatttggttttgttccttgttctttagcttagctcacctgagtaatcaaaatagcaccaaagtttcaaactttcaatcatcaaacaaacattacacattgtacaaaaagcttactagataaacaccacacagaaccaattcacaaaatcaaatctggaaactcatagaattaatctacctacccagcaatctctcactcatcaaacgacaagcaaagatctgaactttagtttccaaaatactttttttcttcacgaagaagattatcaaggaaaaagaacaacccacattgtcgaaattctgtaccagagattttcgttgcaatgcattatgaaatttccagtgacaacaaaaatgagtaaagtaaagagcttactgcttcgaaactcggagagacaaatgaggaagaagatgactgttgtcggaagaaattgaacctacttgccgcaaattcgatcgaagccaaaaaccctaatttcttggaaaggggagaaatctgcttcttctttacttgtactgtgtctatctaactttactttatcttttgtgttttttatgtatatatatttttttaattttattatgaagttaaatttaaaggtcccaaaaaggtaactctttataagcaaagcagtaattaatgtaagttgaatacttgaatgtatttgttgacaaaattaaaaagttggaatgcatttaattttggatgaaaaatgaattcgttgaattttgagtcaaagaaaattaatacaacactatgttcaaatatgcaaattttgaatcctacactaaaccatgaatatcatttttggtatcaagtgccatgcacttaataatgaatgagcaatcaactgatatatctagtcggaataatgaaggatcacatatttagaagagttgggcactcgttagtcgtttcattagctttaactgaaaaaactacaggtgaattaggggtaaaagctttattagagtatattgttaagtgttaaccataattgagtctgtaaaccggaataaaccggtaaattatctatctgaaattccgtgtcgatacatggcatgggctgcttcaagccttcaaaagtatgatatcgactccaactcttttgagagatattacgacgttgactatcaaatttctacgcatattgatatggattacagataattttaattctagtttctgatcactatttggaaaaagaaactacttttgatcattctttatattttcgatatgattgtattcaaatctagctcacatgcagaaaactccactaacgaagactaattcagagtagttgtgtaattctaattcacagctacacaatcatccaaagccaccggacacaagtggaatataacaaagtcataataatttagttttattccttttatcaaatatttcatcaagttagtgttattctatttgaccaaaagcctgttatataaaagacactaaaaatgcttaaataaaagaaaaatcgtctgctgtttttttttataatgtcgttagcacattaaaatattagttcaccaaactataatgatggttgaacattgattttcaatgtagttggtgataattttaaaaagttggttaaaatacatttatgtaattcaccaaaactacgatctaatcagtataaacgctaacttttgaagaacaaataaaacgaaattattatgtttttctaagaaaactataattattccgtcataaaatattttaatttcaggtacatatatatgtatttaaatatatatttttaagtagtagtttacgtgccgtcacgtcccgaagaacagttaaaagagaaaaagccacctgtaatcagatatttatatttaatatatagacgttagccccaaaaactttgtatttctctgctttcaaacccaagaagccaaaataaaaccattgaagctagcagcagccgaagaagcggtcacattttccggcaaaacagacagatcgaccagtgaaagctcctatctgtaagcattgcatgttcccaagctctaattcaatgaaatgttgtagattcaacaagtcatgtaaaatgtttccttaataagtcggtgatgtctcatggatcttgatcggttgtgtttgtgtagttttcttgtctcaattttgcataaagagctagaattgaggggagagatttgacctaatccctgtttcttgaataatcttgtttcttgatttagcatagttgaccaaacaagtcaaaggtgtttatgtctgaaaatttggctctttgattttaactaatgtagtgccaagatctgatctttagaattctcaaggactctgttttgtgtgtttctttagtgtttgttgattatatataaaggatcatatgaacaaactaagctctaaattatttttcatattttctccagcttcctgaggcattgtgatctcttgttaaaatg

SEQ ID NO: 5861 - DNA, 3000 bp, Unknown; identical to SEQ ID NO: 5844
  misc_feature (1)..( 3000): cDNA_ID_1829312_gDNA_ID_1620821_Annot_ID_50708 3000 nt of promoter + ATG

SEQ ID NO: 5862 - DNA, 3000 bp, Unknown; identical to SEQ ID NO: 5843
  misc_feature (1)..( 3000): cDNA_ID_1829306_gDNA_ID_1620821_Annot_ID_50710 3000 nt of promoter + ATG

SEQ ID NO: 5863 - DNA, 3000 bp, Unknown
  misc_feature (1)..( 3000): cDNA_ID_1829302_gDNA_ID_1620821_Annot_ID_50711 3000 nt of promoter + ATG
ttgacctctacattgtggaagtaaaagataggattggagtggtgtggatttatgttgcaatgatacttttgatgaaagtttcattttttgttatatagtagcttagttgagtgctagtaaaataaatgagatccattggctattgttggtgttataattactagaaatcttggaaaattttcaggatctgatgaaggtgtatatgcttgggttgttgctaatcatgcgctcggttcgcttggaggtgaacctttaaaaacaacgggaattgttgaactcggtggggcttctgcccaggttttatctcttgtcaaatctgttattgataagaaaatatgcgtatgatgccatttatcaggtttaggataaacctttacttgtatggtaatagattaattgtgagtgatgactgtttattcattcgtttaggttacatttgtgtcaactgagcttgtgccttctgagttctcgcgtacgttagcctatggaaatgtctcatacaatctctacagtcacagcttcctcgattttggacaggtaactcatgagagcagagttttttttttctctttgagaagttttgttcttggttggcccttttctgaagtttggtgtttggaaacttaatgtagttttgtccctatttactacttagtgatctctgattttctaagattcctcaagattgtagaccgtgttaccaaaagaaatgatttttgtccatactaattttcaaaaagctattaattttagtcgcctctgcaggatgcagcacaagaaaagttatcggaatcactatacaactcaggttaatttttgacaaatccttaaaataattgctctttggagttcaagcagttgaaataaacttctcttccctcaaaactcatacagtgtttcaatcctagcagctgcaaactctacaggggaaggaatagttcctgacccttgtattcctaaagggtatatccttgaaacaaatttacaaaaggacttacctggattcttggctgataaaggcaaatttacagccacccttcaagctgctggtaatttctcagagtgtcgatctgctgcatttgccatgttgcaggaagaaaaaggtaagagcatcattgttggtataggtgaatatcgttcctgtgtacaattttcttatgggtgcagttttggcacttttgtatacagggaaatgtacttataagcgttgttctattggatcaatattcacacctaatcttcaaggaagttttttggctacagagaatttcttccacacatccaaggtatataatcctttcaatttcatgttggtcgatgccaagattccgtcagaatgtgaggagaattgtttgaacattggtctttaatttctgtctggatcagttctttgggttgggagaaaaagagtggctgtctgaaatgattttggccggaaagagattctgtggagaagaatggtcaaaattgaaagtgaaatatccaacatttaaggacgagaatttgcttcggtattgcttctcatcagcatatattatctcaatgcttcatgatagtcttggtgttgctcttgatgatgaaaggtaaatgttattgcacaagttcaagatcaatcaatgttggttttctgtgacaaagatataaacaaaaagtcgaacctatgcttgttttgtctacagaatcaagtatgcaagtaaagcaggagaagaagacataccactagattgggcattgggtgcttttatccttaatactgccacagccacttttgattacagtggtaaatctagaaaaattcttgacttgagtaatgtagccaaatacaaaatatgacatttgttactatataaaacaaaattgtttcagataaaacaagtaaattattaatcatgtatatgtatttacgtcaactcgtgtttggagcttcagtcttcataaatctctttttgtgaattagttagctactataaaaaaattaaagaccaatttgaattagcttgtgtgaaaatgaaaatgtttaggaagctcagtccatgaagctatctgtgttgaagtgtattacaataatttctcaacaatcaatgagacaagatcaagaaccgtttatctgcaataacttctcaacatcaatgagggacaagatcaagagacgattgtgatggagaaagaaagtcaagacaattatgatgtgatttacactgtcaacacgtgtatcatatactgtagtcctcgataaaattaatactataaagattacagaccgatttaaaattcattaccacgatatgcatgaggacaactatttgatagtttttttttttatttttatgatagacaactcacaactaattgatccgatgcacaataatgagcttatagtatttatttcgacatttcgattgttcaagtcggatttcggagatggttttgtgatatttggctcgatcaaaattgaactcttgatggggatcataagctaaaccacgaaaatactcatgcttgcaataacgagtaggagagaaactgacccattgctagtgattcgtgtatccttgtgttaggttacacacgtttttttaaccactcaagtctacgtcacaaaaaaaatcaatttaccactaatattttatcttatcctcaattattgacccgtactataatttattttatagactagatgtagaatatattatataatagccaatagggatcggtgggaagagattcatttctttaagttataggtctggagcggccgttttgaacttctgattattaaatcagattctagactaattaagaagcaggcacaaaaagaaatagattacgtttcttattttcttgcgttgttttcactacatttattgctattgcgttacgtttttttaaactacgtttattgcttaatgctagtatttgattatcttgttaatataattttcgttacggttctttagacgttaatgcaacgatcccatgctccttcctgcaggttgaaaa

SEQ ID NO: 5864 - DNA, 3000 bp, Unknown
  misc_feature (1)..( 3000): cDNA_ID_4262256_gDNA_ID_1620822_Annot_ID_169517 3000 nt of promoter + ATG
tctggcatgtgcagctgacgagaaggatccgtttaccatgcccttgtcgccaggtgatagaaaaaaggctgctgccgcaaaacatgaacttgcatcgctttatggagaccacagtgatcatcttgccactgtcgcggcttttcagtgctggaaaaatgcaaaagcaagtggtcaagctaaggagttttgttctaagtacttcatctcccaagttgtcatgaagaggctggatgatctgtgtcgcaagcttcagggagaacttaatagacatggggtcatacctagcagcagctcaaactgtagcctgaatgctcatgatccgggtattctccgtgctgttatagcagttggattgtaccctatgttgggaaggatgtgcccactttccaagaatcggacaaggtctgtaatagagactattgctggagccaaagtccgtgtgccctcgctatcaaacaatgttgacatgtcctctaccaagtttgacgaagctttaattgtttttgatgagatcactcgaggagattggggtgtggtgataaggagctgcactgttcttcccactatacctgtgttactgttttcaagagagatagccgtttctactacagagagctatgatgctgttaagagtgatgacgaggaagaccacaaagtaggaaatgtaggagacgcgatggacatagataaagaagttggtaggcctggagagaaaataatgcttgggccggaaaattcagtaaaagtagtagtggatcggtggctgcctttcaaggttacagcttttgaaattgctcaaatgtacatcttgagagagagactaatggcgtccattttgttcaaggtacatgagttatcactacgatttaagattttcattattttattttggcaatgtcatccttttcaaccttccatatgcatttgtaggttaaacatccaaaggaaaatttgccgcctcatctcggtgcttctatgtatgcaatagcttctgttctctcatatgatagcctcgcacaatcttcagttcaaactgtagctgtgcaacctattacttcagtggtagatgcaacgagtcccagagatgacataccttccactaaccccaatgagcttcgggagcatgacccgaacactactccaatggggtcaaagctcgaattagccaacaagttgggtttgggtaatatggaagagagcttgccttcaaatttcgctgatgggaatgagcaacctgacccaaacacttctccagtggaagatgtttcggcggctacaaaacaaaagaagatgcagtcagagtccaaaaggtgcaagtcgctcaacaacgtggatttggggaacattgaagagaatttcgggaacatggaagagaacccaccttctgatctggctattgggaatgagcaaacattgccgaagttagctagcaacttggacatggggaacatggaagagaacacgccttctgatctggccaatgggaatgagaaaacagagcctaactcagccaacagcatggatttagggaacatggaagagaacacgccttctgatttggcaaatgggaataagaaaaaagagcctaagtcagtcagcaagttggatctgggtagcgagaaagtgagcattccttctaatctcgtcaatggaaatgagcaacatgacctaaacattgctccaggtgaagatgcttcagcggctaagcaaccagaaaagaagcgatccaggtctaaaaagcgcaaatcaggcaacaacctggatttggggaagatggaaaagagcaagccttccgatctggcaaatgagaatgagcaaacagagcccaagtcagccaacaacttggatttagggaatatgaaagagaacacgccttcggatctggctaatgagaatgagcaaacagagcttaggctacctaacaactcggattatggtaacatggaagagagcttgcctttgaatcttgctaatggggatgaacaacctgacccaaccactgctccaatggaagctgctaagcaaccaaaaaagaagcgatcaaggtccaaaaagtgcaaatcagtcaacaacctggacttggggaacatggaagaaaacaagccttctgatctggcaaacggaaatgagcaaaaagatcctgagtcagtcaacaggttggatccgggtaaggagaaagagagcattccttcgaatcttgtcagtgggaatgagcaacctgactcaaacactgctccagctaagaaaccaaaaaagaaaaagcgcaaattagctaacaactttgattcggttaacaatatggaagagaaaatgccttccactaatgtattgagccagggaaacaagtcaggtttgattgaggaaaaaccgagcataccttccgatcaatgagcagtgtggctcaaatactgcaccaacctaagcaaaaccgaaagaagaagggaagtatgatgcccattccactttggtgttttaatgagcatttcggtgtttgtcatgaaaccaagttttgaaatggcacttgtctacataagtgtaacagattcttaatttcaacaattttgttagataatttgtattcattctcacttagtgcttccgttgttctatcgttataaacgttttaagatatacgcatgtaactgaaagaagaaaagccattattgatccagtactgtagtgtcttagtgtgagcagaaaaaagatttgatcatggaatggctttagagtaaaatactaaaatagatggaatcgaaggcttatgaatctgacgtggaacaagaagaaagcgtatctgccacgtggcacaatacaacacctcaacagccttatctggacatcaacagagagatcctccaatatccgaaaccaaccaatcagcttcactcttggtttcacctccatacattaacacaccaacaatcctcaaaaaacactttcataacttaatcacacacaaggagagaagagagaaagagagaaagagagacagagataatg

SEQ ID NO: 5865 - DNA, 3000 bp, Unknown
  misc_feature (1)..( 3000): cDNA_ID_2172271_gDNA_ID_1620822_Annot_ID_169523 3000 nt of promoter + ATG
cggaagtcggaaaccagctaatttatgagaaataatatcaaaaattacaacttttataacatttatctaaaaacatgaacgattctctaatgttacgttattacgagatttaaactcttgaatttgcaaaatccgtgttaggagccatacaatcagattaattcatcaagctatatactaaaactgtgctccaaatcctcatgacatgatgcaaatctacatggtcggactatataagtatatataaaccatatattagttttacatcaaaaccattgatataggttgatattattaaaaaaaaaaaaaccttgtgacagtttcatgcatggctttaacagtcataaaagaaggcattacacatataatcaaagtcccaagcacccttattagacaagctaaatcacattctcagatcttgagatagagtaatccagaggtaccatcgaatcctttggatctgtagaactttgcatactctgtaatagtagtgtctctataattaggagggttttcttcagacaaaatctctttgatgggtccataaactcgaggattcgccatcaaatacgagctgaagaaacatgccactgaaattctcggtccagctacattggccaaaaccctatgctccacgcttatgaacttgtcgtttgttataagctgcacccaatgaggtaataaaagtcagatttatattagtccattgattaaccactgataaaaaaccaaaagggttagttagttagcctgaagaagatctccaacgttaacaacaagagctccagggacaggaggaacatcaacccaatattggtcatgaagaacttgaagccctccgatatggtcttgaagaagaatagtgagaaaagagttgtcggagtgtttcgttaagcctagagtaaggtcgggttggggacatggcgggtaataatggccgagcaacagcaaggagttagtgcaatccatgtccttgaggtgattagtgtttaaccctagagcttccgagagaagctcgaagagtaatttacccaatttcatcacttcctttgagtactcaatcatcatctccctgaaaaaatgtccaccaaaatctttaagacacactaatgaataatgggggcgtaaaaatcttcaacgaaatcctagcgcttataactatttgaataagttattattggatttatgtatttcaattgttataaaaatttgttaaaaaagaaaacgtattattggattaatattcgtctaacgagtagtgaaacactattcgaccatatataatttcttcggaccgaggaacacaacatgttacaaaagcaaaaatagtcaaactcgtaatttaacaaatttggaaatcttacccacaagtggcgggtaagtcctccggtctcgggggatctggtgctgtataacaaccaagtgtatctctccaattcgccgccggtgagctaaacagatcgaagttgctgctgtataccatcttactagctggatctcgagagtaaaaccctttcttcacttcagtgtcttgctcgtgaaactcacgaatcccatctatcatcttctccaacacatccatcgggatcccgtggttgatcacctggaaaaatccccatttctctgccgcgtctccgatcttctccaccaagctccgccgcgtgatcgagtccgtgccacctcctttgagatcgattgtggggatggagaaatcagaggaggaaggtggttttggacttgttaaagtagccggaggtgcacgaaatatcgaaggaatctctgtgattccggcgtcgataaggcctttcacgccggttttagtctcgtcgaaagctttgagtagagttgaacgatcaagtgcagcaacttggggaagtgatgactccattgcttttagctgaaaatgcaattgccgttggtttgaagttggatcttaatactacaagttgtcaaaagtttcacgagtcaacgacgaagatagatgagaagaagtacatgtcttagttaaattattcacgtttcccacgtggggaaaaaccgggacaagaaaaaataatgataacaaaaaataggaaaatggagatgcggggtatcgatccccgtacctctcgcatgctaagcgagcgctctaccatctgagctacatccccgatgacgaaaatgtacaattggtcaaaataaattaatatacgaactatactagtatcatattcaacagctcattttgtcacgtttatatattgtatatacaataatttttgttattattttatttttggccatcagcaagacctttttaaaaaatcgcaacaataatattattcaagtattcggatagtggctctcgcgtcgaaatgttttggaagcctgcgtcactatcatggttaatggcaagttggcaacaactacatgaggtaatcctttgtcaaaaataaataaattgaaatctctgataaaaagataaaatatagattctgttctaatacgatatttagtcgaaactaataaaagagtatatacgaactttttaatgtctttgtaatttgtaaattccgttgtagttttgtaaatttaagaaagttttgttgccccaaaaaaaaacgaaattaaaaaggaagttttattcgtttgattattagtttatttagcttcttttatttcacctttgggccttacacatcaaatcaaacttaaaagttaaaaggaaaactttgggccttggcctctgggttatatactcttaaggcttaacccgacggcggtcaactaccggcctgaaataaccggtttttatttttcctttgtttctcttttcaaagtgctcactttcccggtgactctttagtcaaaatttcaaattaattcctctaaggtgccctaatcccggctgctcgtcgggggaaaataacccggcagggattgagcaacagcgtgagtcccaaagtgagagacagtgtgaatcccaaagtgagagagtgagtgttttagcgacagagagat

SEQ ID NO: 5866 - DNA, 3000 bp, Unknown
  misc_feature (1)..( 3000): cDNA_ID_2105286_gDNA_ID_1620822_Annot_ID_169528 3000 nt of promoter + ATG
cttaccaagagcatgagcaacaataatacttggcaggttttgaagaaatatttccccctcaaggatatctaaggagcgaaaacgaaaatgtatgagaaataccccatgatgaaataagatactaagagtcataaattgtaagctgaagtacaaagaagaatcttactatgtaaagaaggcaatctgaaaactctatggttcaaatccaccgcaattccattaggaacacgaaacatcccagcccttgacaacatagctgttcccatgccgatatatagtccactgcgttcacgatagtaaggatctacaataacatttcaactgttaaagttaaaaacatttcacaagtttcgtagttggcacccctaaaacttatggataatataacactttcaagaaaaaatactggagagaaagcttatctaatacgactggattattgaggaaaactactctttaaaatttgaacgcattccaccgagtatactgtttgactcttttggctgccataatttattactcaaataatagcacctttgatcaataaacaacttaacacgtgaagcgcttaataaatcaaagacctattcttcgggtttcagttactgtgaaacaaagtaatggtcaatcatatgataggttcctgcacttattttatagagaagaaagcaaaagaaacatttctgattcttgcctgttggcagcccctggagagtggtcccacgagtcatattaacactccagtcaccttcatcaccaggttgttccatagcaacacagacagcaaccgcatctcctttctcaacatgggcagtgcaagccagtacacctggcacatagacctaccaaagacccataagagaaattagtacatatttgttcacttaaaagcccggagtttctcagctagattgtcaaaaactataacgaaatacaaccaagatagggattcatattccaacccaactcccagcagcatagtgacaggatagaagcttaagccctcccaatggaatactttaagatcgcataattttaagtatcaatgtgactagccactaaagtttcactgagagagcgtcaagattacctgggctcctctgagaactgcttcagcacacttcctgctcactagtacctcctttggagggttttcaagaccagaatcatattctatcttatgtgggcctgaaccattgacaaagacaacataatccaaaccaggtatctgacacttggtgacgggactacttccatctggttgtactagcttcaagccctcctccgagtcgtttaaaattttcgtaagcttttcgataaccgcatcactcgtcgttttaacagtgttcaccctaatgcaggagtatgaagatgggcgcctaatatggaacaaaaacaaaatatatatagagtcgagcaaaatgtagcaacaataactagagcagacgcaagaaaaatgtgagaaagtttgttaatttagttacgatggcagactacaactgaaacatgtgaaggagaagctaacattggggaaaatgcaattaaataataattcgatttaggagattagagaatgaataagcaataaggcaaagcgaatccagctaaatgcgcctaaaggagggcaatgttgcttcagaagtagatgagaatgatagaaaagtacgtgagagcctttgaaatgcgagcaaagtgatcgggtccataagctttagtgaagtagtcttcaacttcaggattccatcgcagtaccggatcataacagtaacgctccgaatcggaaggacccatctccatctgatgagagatagagcgtgactgagaaacagaggagaagaaggccttggctctggttaagcaagtggtgagggaagagggttttagcagaaccctcgctttactcattcaaggtggaaggagactggagagatagagagagcttcttcaagggaagaaacttcttgggtttttacctttttagagctttaatggtagatgggccatgggttgcaatgaataagcccatatcattcagagctttaatggtgtatgggccttgggttgcaatgaataagcccatatcattcagagctttaatagtagatgggccttgggttgcaatgaataagcccatctcattcagagctttaatggtagatgggccttgggttgcaaagaataagcccatatcattcagagctttaatgacagatgggccttgggttgcaatgaataagcccatcacattcagagctttaatggtatatgggccttaggttgcaaagaataagtccatcatattcatctgcttgtttatttactttgatgtaaggttttttatataaaggtcaaaaaaggttaggtagaagaagctaaaaggtttgatgagagtcttttcctaccaaaccccctctccttgtgatgatgattagcttcacctgccattttctcaatgactgtacccacaggttatataaatggcttctcacatttcgagctccattcctcaccagaccccttttgcaaggttatccctttttctctctctatttcatttgatttcactattagcttcttcatttttgtgagaggctcttggatttttttgatttttgcaacttgtaatggagtctgttcccattaaagtttcttcatttctgagtctttagccatctattcgttggttggaacttggaagagtaggattttagtttgaaatgctcattctccgatcataaagtttatatattttgaatagaatttgtgttcttgttctagtggatgaagtagagaataatctagggaggttgaaattagattgttgcaagttcgtgaatattaggatttgtctcattgggtctgaagttttgtggaatttcttgacagtgtagtttggcagtttgagagtgtttttcatatccgactctttcaaactgatggttttgacatttttgttgaccagattagtaagttattgttgtcgttttgagaaagctggat

SEQ ID NO: 5867 - DNA, 3000 bp, Unknown
  misc_feature (1)..( 3000): cDNA_ID_3078714_gDNA_ID_1620822_Annot_ID_169536 3000 nt of promoter + ATG
ttgtcaaaatttagtaaaatatattcaaatataattaaatttattaaaacttaaaatttaaaagtttttttggtttgaagacccgctatctaaatacaaaataccgtttctatttttttgggtatttttagggcctgaaactttttatcaaaactgacccgaatccaactggacccgacccgaaccagaaccgaatatttagaattattctattgggtagtaaatcatatacccattaatcccaaacccgaatggttctacccgaactcgaatagattactcatatgcccagccctattctctgatttaattatctaaaaactcccaaaaaaacatatgttttgctgactactttttattcgaaaaattttacatcctcttctgccaaaatcatttcataagacatcccaaaacccttggaataatgattccatgaatgaaaaatcctaatttgaatataccaaaaagttttgaaaggttttaagtttttgataggtgtgtatgtgggaaggtatagacatcgtgatgataatctgcttatttataattttaacctgcagtatatcgcagataggcttatattttagttaaactaaaaacttttattgtaaagatgattataaatatatgatattattttatttgattttaaatgtatagtaaactgcgagttgtatatattttgttgatattatttacattgtttagtgtttaaaattatacacttgtattttaagtgttaattttagagtttcacctgtagtataccatcttgtattaatatcgatctaaacccgtccattctagaattttccagcttgtattaaaaattgaatcacatcatacacataaaaaaaactaatatgttatgaattattgtagtatataagattataaattttcaaaataatatgtatgaaattgaatataaatattcaaattatgacccaatactcagtagaaagtttttttaaatctatttttgacccgttataatattttttcatgtattgaacagtttctatttgtttttaaaaattcaaattatggcatatgcgaaaaaactctaattatgtttttataacgatgatattattttttcgcaaaaatagaatcatataaagatgagaggtgaactataataattcccaaaaaaattaatatgataattaagatatcaaatctaatttgttgattttaattggttacttttttggaaatttataatgtatttcgttttttaattaaatttaattaattaaattagtatttgactttttaattcttaagggaatgaattaatttattatttaaaattttatttctaatgacatacttatgtaattacttacaaaaaataaggttatatttaaaatgtatttcccaaataatatagtaggattttagattttataagaagatgttaaaccgttattcttgcgagtaaaacagaagaggccgaactaaagatttttttaacgttgacgcagcttatcaagtttctatactctccgacaaaattggtatttaagaggaaatatatttaaaaataaaaaaaaatcaagtagatcttgtatgatctgattctgatctaatatctacggctaccagcacaacgacaaccatatatcttgactctttcaccacttagttttgtaacttgtattgccccgacgcatggacacatatgtatatatatgatcatgagtttttatatcgccatgctcattcgtttgattgtaaagttacggggatatgatattactagtaggggatacgataatattccaactattattaacttaatgttttacgtcaattagtcacgccgtacgcaataataataataataataagttgaagtagctggaaacaaacaataaaaaggttgagaagaagtcaaagtagctggaaacaaaatctgaccgttaagaaagttgatttgtccagataatgataattggttaagcctgccaagggactcattagaatagtttagtgttatcatcacacgttattttttctttcgttttgaagtattcttgagaatccagttcagaatcctagaccaattgccaaaaaaaaaaagagatgtaaaactgtgaaaatggaatgtaagggtacaaatatgaaatgtcaactatgcaaaatgtggaactgttcagaacaggtttgtatatcgttttaagcaaggaatgatatgatgtgaaatagttacgttgttgttacattcataaactaatgggtcgggaatttatacttgatactctcatgtgcctccaagttctttatgccgatacctaatacgaataacacgaaggcccattagctcagttggttagagcgtcgtgctaataacgcgaaggtcgcaggttcgaaacctgcatgggccatatgtcttcttaccttttttttttattaccttaatcttaagaacccatgggccagtaggtggcccaactaagagttgctgatttccgtgtcgttgtgtaaacataatagtgtcacgttgttaattagtaaaaacgtaaaacgtcatgtagtctagattccctatagccgttgcgtagccgtcccaaagctccgtttcgacttcacagagaagcaattctccagactttcccggggaaaaaaaatcccggaaaatctcgtaaaggagaataagggattcaaaaacctcgtcctgggtttgctttcgtacctatttatggaaaaagtcacagctcaaaagcgagcgagtgaaagaaagaaaaatcaattcttttattctgagtgtaaaggaagaagacacaaatcgagaaatcaattttttagaatatctcctttagcattcctttcttcctcgtagagcaatcgcataaccctaaagcccactccacgaatctaagctcctgttcccgcttcactttcctctgcacacatgtatatatccacaaaaagggggaagaagaagatgggttttatcgattcttcggaatttgaaattgatcagctattatg

SEQ ID NO: 5868 - DNA, 3000 bp, Unknown
  misc_feature (1)..( 3000): cDNA_ID_3078718_gDNA_ID_1620822_Annot_ID_169535 3000 nt of promoter + ATG
aaaggtacgtaattgttttttgtctgatgtgaacagccatatctcctgcttttggatctcattctttcgttctaattttgtaggttgtaagacttttgttacttttgactgttaaagaatccgcaataaatatccctcaaagtttggaagctcgtcgtcgtatgacattctttgcaaattccttattcatgaatatgccagatgctccccgagttcgtgacatgttatcctttaggtacatgttttagcttactacctgaagaaatatgctatcgaatcacaactttgataaataagagttagacatgatccaagtcttcttctatttttcagttggttcatggagaatacaacttttagatgatcttgaaagcaagtaacaattgttttccaaattatttgtgtagtgtcttaactccttattacaaagaggatgttctctattcggaggaagaactgaacaaggaaaacgaagatggaataactattttgttttacctacagaggatatatcctggtaagcttctatttggtgctttttaagtgtttataacaaatttaaagtttactgaatgaaaatgactgcataacagaggaatggtcaaactattgcgaacgtgtaaatgatttgaaacgcaacttatctgagaaagacaaggcagagcaactccgccaatgggtatcttatagaggccagactctttcaaggacaggtatactatcagaacgttgtaggattttctgacttgttctactcgctctgcgatcgctaatattcctcactatttctagttaggggaatgatgtactacagagtggctctcgaacttcaatgtttccaggaatacactgaagaaaacggtttgaacttatccttcattctcaatattgaatgttttaaccttacagatattgtggtttggccttctctgcctaagtatcctccactacttcatttagttgtcaaagttaatcttgcttgtgaagaagattgttttatgaactctattttcttcttgcagctaccaatggtggctatcttccctcagaatcaaatgaagatgatcgaaaggcttttagtgaccgtgcacgagctcttgcagatttaaaatttacatatgtcgtgtcctgtcaggtctatgggaaccagaaaaagtcaagtgaaagccgagaccggagttgttacaataacattttacagctcatgctaaagtaagaaagttctcttgtttgaaatcaaaacttcatatgcttattcttctagcttagttttaattatacattatggttaggtatccgtcattgcgtgttgcctatatagatgaaagggaggagacagttaatggaaaatcacagaaagtattctactctgtgctactcaaaggatgtgacaaattggatgaggtatgcaaaggaaatttataataattaagttcatacattcgtagcccacttccttccttactggttttaggtcacaaaggaaaacttatttatttccagtcccacataggacccagatatagttacctatttatcctgaactttgattttgatttcttaggaaatatatcgtatcaaacttcccggccctcccactgaaattggtgaaggaaaacccgagaatcaaaaccatgccatcattttcactcgcggtgaagcactccagaccatagacatgaaccaggtagctttcacctctctatccctcaaccattttattgattccaactatagtttcatttcctttttccatttcaggacaactactttgaagagtgtttcaaaatgagaaacgtgctacaagaatttgatgaaggtcgacgtggcaagagaaatcctacaattttgggtcttcgtgaacacatatttactggaaggtctgagattcttcatacattttttatttttattgagattcttcatattatttagttttctttatctttctcatctgacttctttctgacctcgcagtgtttcttcacttgcttggttcatgtcgaatcaagaaacaagttttgtaaccattggccaacgtgttctggcaaatcctctgaggtattttcatatcttgtgactagggaaaagatccttccaatccttcctttgtagcttcaaatcttatttaaaagtagcagtccccgcatcattgaacctaatagactatattatagttagaatctttttgttatggaaagaagactagctttggtctttggcaacttacccacgattcttttacagggtgcgtttccattatggccatcctgatatatttgatagaatcttccacatcacaagaggaggcattagcaaggcttcaaagataataaacttaagcgaagatatctttgcaggtagagaacgatcttgacaagtttttgttttctaattattttggtgtatttgtgatggctgatcatggtaacatccagggtacaattcaactcttcgtgggggttacgtcacacatcacgagtatattcaagcagggaaaggtcgtgatgtagggatgaatcagatttcgttttttgaagccaaagttgcgaatggtaatggagaacaaacactaagtcgtgacgtttaccgacttggacgccggtttgatttttacaggatgctttcattctacttcaccacagttggtttctatttcagtagtatggtatgcctcatttctcattcaaatagttatttcctcttgtagctctgccctatactttggttggaatcttggatttttaaaacatgtattctctgtttcagataacggtgctcacggtatatgtgttcctttatgggcgtctttatctggtattgagcggattagaaaaaaacatcctgcaaagtgcaagtgtacatgagtccaatgcccttgagcaggcactagcagcccaatctgttttccagttaggttttctgatggttctaccaatggttatggaaattggcctagaaaaagggtttcgcacagccttgggtgatttcatcataatg

SEQ ID NO: 5869 - DNA, 3000 bp, Unknown
  misc_feature (1)..( 3000): cDNA_ID_2172323_gDNA_ID_1620822_Annot_ID_169542 3000 nt of promoter + ATG
actatatggtgcttttactctctttttaaccaatccacaatttcctttttccgtcccaaaaagtaaattacatataattaatagataatggcaaaacttccaatacaagtattagattaatatgtaaaatgagtatcaattagtgtttaaacttttgattttaaacactaagaacttgaatggttattgttattagatgctttgacactaattatagaaatcgcatcataccattttaattctttgtaagtcaaaaacttatccataacattaaaatattttgttttataaaactttatatttgacagcatttatcctctcataccaaaagtttatgatatcaaactagtataattatttactaggctaaactattattgtatgtgttttattagtttaaataaattttatagcggtaattgattcgcttatagatgtgttttggtcttggacatgaaaatacaaaggtccatataattcttctacttcattttttaatttcgttttttcccttaatgcctgttaggtgttcgatataattccgcagagagtgtgggtatatacagcgacgttgtggaacgcggaaactcaaaatagctccatatactctttgagatactatgaggttcctcctcatgagatcacttctggttcacccatgtggtggctccatcatcaatgtccgatcaacgactacgtctgctcaatatgtagcttccagatcaagagaccctgttttcgagaagctcatggacaaatacaagaaccttctcaaggtcattgccatacaagaccttaccctcgccaatccaacagctgatcctccctctctatccattgagtttctctccaggctctcccagaagctccaccttaatcgtggcgctgcttctttcctgcgaaagtatcctcacatctttcatgtcttgtatgatcctgtgaaagctgagcccttttgcaggttaactgatgtagccatggagatttctcgccaagaggctttggctatcactgctactttgtctcttgttgttgaccggttggttaggctcttgtctatgtccatatcaaagtccattccgcttcgtgcggtttttaaggtttggagagaacttgggctcccagatgattttgaggactctgtgatctcaaagaaccctcatctttttaagcttagtgatggtcatgaatccaacacccatatcttagagctggttcaggaagaagagaaaagactggaatttgaggccgcggttgagaaatggagggtggttgagtgttctaaggaggattgcagtgtcgatagaaccgagattcagtttagtttcaaacatagttacccaccaggaatgagactgagcaagacatttaaggctaaagttaaggaatggcagaggctgccttacgtagggccatacgaggacatggttggtaagaagaagagtagatccggtgtgatgggaatagagaaaagagcggttgcgattgctcacgagttcctgaatctgactgtagagaagatggtggaggtagaaaagatcagccatttcagaaaatgttttgggattgatttgaacataagagatttgttcttggatcacccgggcatgttttatgtgtcaactaaagggaaaagacacactgtctttctcagagaggcttatgaaagaggacgtttgattgatccaaatcctgtttacgatgcgaggaggaagcttcttgaccttgttctcttgggacgccatgctgctttatcagaatctgggaacactagtatgtctgaacaagaatgacattacgatttttcaggccctattgagtctgagctatgcaatcttccatatggaagtgtatgagacacttgagagattaggtccaccaagaatcaggcaatgtttctatggcgtttgtccgaatttcggactaattggcttgctcacaagcaaaagctcgagataatctgaaagcaggaaaagcgagttacttgatgtagcgtaagtgagtacttggatcaatacttgtctacgaaaccaatgtaggagtaaacggtctttgttgtgtacttttttggttatgtattgtcgacagaaaggttagaaactagtatccaaactcaatacgtcttctttctttagattttgcttggttgctaattgcttcatgtggctttccttattctactaaaactctcatctttgttcttgttctattttttacttttacatcctaatttttttgaaatattattttttggaataaaatttgaattctttttcttaacctttatcactaccagggtttaaattataagtttaattatataatgtaaaaattgtgaacgttatttatgtattgaatttttgatggatggtttttgtggaaaaaatggttatagaaaaaattgtgacaagaaatgagtgaaataaaaaccgagagcccatgaaaggaagccacgtaagctgttcggagccacatctcttgtcttcaaaagtaccaaacttcatttgcttctccaaacaaacaatctctttctcttcttctgccaaattccacaggtgcgtttcactcttagctcatctgtgtaatctcaagcattttctgctttgtttggtctgaatttctgaaatcttttgatgataaaaatttctatgaaatctcggtctgcttgttgcatgattcttactacctgggttttgttcagcaagtctatttgtctttatctgttttcttcttaatttgactttaggaatgtctaataatggtggattcatgtgttgaaatatagactaatgttatatccagtggcaatttctacaaatttttttatcttggagcatgaaaatgttccaatctttcttcatatgcgtcgctaatgatcgcttatgttgattatagtcttaccagaaacttgcatgttgttaaaggtctcgttttgtttggttgttctttgttcagattgtttttttttgttcacgccatggcttgtaatcgtctgtgcag

SEQ ID NO: 5870 - DNA, 3000 bp, Unknown
  misc_feature (1)..( 3000): cDNA_ID_3078730_gDNA_ID_1620822_Annot_ID_169525 3000 nt of promoter + ATG
aaccgtatcgaaatcaaaagtattgttgctcaagttgcaactactacatgagcgtgccttgcattggtaaggttccctacctcctatgttgaacatgcactcaagttgcaaccaacaaagttgatccattatctgctctctgtgatcacttactatattgtttaagggttatataaattcaaaacagaggcttcctagtgttctggaattgttatatcttaagttggctgttctaactttgttaaatccattagtgggaatttaaaactagctcaacgaatatgtaatgagctaggaggcttggcatcaacagccatgggtgtagacatggagctaaaagtagaagcaagtcttcgtgaagctcggactttgcttgcagcaaaacagtatagccaggtttgtaaaaaagtcttattggccatctgttttttaagcccatgtgatatatttatttcaggccatgtgctatggcaatgttagtgtgtcttcattttgctttggtactacgttctctacaggcagcaaatgtggcacactccctcttctgcacatgtcacaaattcaatttgcaaatcgaaaaggcgtctgttcttcttctgctcgcagagatccataaggtaagacatggctacaagaaattactagcttgagagcacattgattggaatctgatattccattgaaaatatgttccgccttatcaaattgcaatcaaaactttttttttttttctggaaatttgttccgttccatgcatacatagctaacatccatctatatgttctgaatgtgctctttctttgctgattgctcttagactacatagaaaagtgttgtactatggtattatttctaatcttttattggttttctgaccggcggccttcacctttcgctttcccctttttgggttctcagaagtcaggaaatgctgtcctgggtcttccatatgcgctggcaagcatctcgttttgccagtcattcaacttggatcttctcaaagcatcagctactctcactctggccgagctttggcttggtcttggatcaaatcataccaaacgagcattagaccttttgcatggggctttccctatgattcttggccatggaggtttggagttgcgtgctcgagcttacatctttgaagcaaactgctatctatctgatccaagttcttcaggtagcttttgtgtcttgtactgctttgacgaggatgttcagaacataattgaatagagcctgactgttatggataaaggttgatcttgttagttgcgagtttctaatttgtttactgttgttaccagtttccacagattctgacactgtcttggattctctaaggcaagcttcagatgagcttcaagctttggaggtataacttatgtcaataagagtgctatgtagctttttgttcaaaaacaaacctgagcactatattatcgccacatcattgcataagagatgaacaaacaaacctgagcactatataattgccacaacattgcataagagatgctatgttgcttttgattcgaaaataacaccaaactcttataactaggttcagcttcgtttagctcatcataactctcctagtaccgtgatttactgttggttcacttagtagttgtgtttattgtgcagtaccatgaactggcagcggaagcctcgtacttaatggccatggtatatgacaagttgggacggcttgatgagagggaagaagctgcgtctttgtttaagaaacatatcatagctctcgagaaccctcaagatgtggaacaaaacatggcatgagatgttgtgaaccttatttaataagcttattgtgcaaagcttgtaacttaaagttgtaatcatggtccttaccaagactcgttctagtgtccgaatcttgtcgagattgtgtaacttgtaaccttgtataactctaaaatgtaggagactgaggaagtcatcaagataattgtgaagatttcgcaattgacattttacataacgtctctttctttgtgaaacaagattgtgaatacaatcatgattgatattagtttccattacttgttatcgatcgagcaacattatcaagtcgtttagtgtcacgataaagacaattgagcatgtgaaacaacagacaaagataattactctactaatgacaatcaaggaaacccatttgccaaaaacgtcgtcgttttggaatgaaacaacagctcaaaccccaaaaccgtgttgggacggtaaacagacccctccctgctcgccggagcactactcggcgacttcagatcttctttcagggttcttccaggaattagattgtcaacgaatccaatcttctgaaacaaaaatcttcggatgcgaagatcgattgtgattgtgattgcgttaacggcgaaggggtttcttcatcggcatcttctggagaaaggtaatcttgtaactgctctctcattacgcatttgcaattcccgagctttttctggtaggagtgattaccgagagagattgagaagtgggcttcactctattaagtttaacgatgcacttactttgttctgtgacatggctgagtctcatcccctcccttccattgttgatttcagtagattactgattgccattgctaagctgaataagtatgaagctgtgatctctctctttcggcatttggagatgttgggaatttcacatgatctctatagcttcactactttaatagattgtttctgccgatgcgctcgactctctcttgctctgtcatgtctaggaaagatgatgaagcttggttttgagcccagcatagttacctttggatctctggtcaatggattctgtcacgtaaatagattttatgaagccatgtctctggttgatcaaatcgtgggattgggatatgaacctaatgttgtaatctacaacactatcattgatagtctctgcgaaaagggacaagtgaatactgcgctggatgttttgaaacatatgaagaaa

SEQ ID NO: 5871 - DNA, 3000 bp, Unknown
  misc_feature (1)..( 3000): cDNA_ID_3078734_gDNA_ID_1620822_Annot_ID_169522 3000 nt of promoter + ATG
tgtagcaaacctgcaatgtttcatgtgttctgtgcattattataacattgagatccttacaagacaagtgagtgtcaaagcataagaatgaaacaaaaatataaaaaaccgacaaaattaatttcttagtagatcgtttctacattacaaaagggaaaaagggaaatatcttcagaagcccaactgttaaaaaagaaaagtctgaaaaagcttcatacaaacacatcgaaagactttgataaaacgttgatcctatgactgatgctaatcatcagcaaaaatacattaccaaacatatatgagaaaagtggcagctaaattgcagcctgatcatgaatataaaactctatttcctcatagttttctagcacctgagactctgaaaaactctaggttttctctgaattgggtgaataccataagggataccttctgtcgctttcataagtgaatctggtgtatgaaggtgaaaagggacaattccactagcagttttctgaaactctatttcttcagttggtttatccattgcataattctccatatccatctgatcatattgtattaatgactccagattattattaggtgcaccaaactgagcaaagcttgaatgggcttctttgcagtaatcttcaatacttgaaaaaagatgacaaactccctgcacatatcaatgaaatggacggttctttcaaacattcacttatgtgtttctgcagcaatcaagaacactacagctagatattacacttcaaccagaccagccagagttctgccattagatatcatattttaatgtacctatacatgcgtctacatttaagtctagcctagacaagtactccattgtagtgggtcaagaaacaaacaaacttcacatagatgtttagacacaattaagtggctgacgaaaaagctaacaaatccgcgtccttcaagcaaaacctcaaactacacgtcatgttgaataatattaatattattcagtctcaaaataaaacaagaataacacaaacgtaaaaagctcaatacctcgaacgataaaaggttgaatgccaaaatgcaacgacgaacaaacattcccaagttgctgttgggatccaaaataatctgatcatcttgcacgactcctgaatcaaggctcccaagtattcctacatacaaagaaatgataactaatttgagtcaaacatgatggaaaagaagaaaaaacagaccttaagcaagcaagtagctaacctcgcatgtcattaaagaaatttaatagatcatctggtgaagccaaagaggaaaatctattagttaaatggtcagttagccacgcgtccatctcttcaccaacttccctcaactggttgatgagcttttccagcttcggctcaaatatatcatcgcaagactgcagcatgaatatcaatctcgtcagggaaaagaacagtttgttagcacacgaaaccagcaaattcattattcactcatgaaatcaacataagttacaagagttttgagccgtgaaatcgttacaacagacatcgctgaaatcaatctcagaaattagcaaagaagctctaagaaatgcaataaagaaactcgatacaacttcgggtatgagagacgggccaggaaactcagaagaatcaaaagacattgctgaattaaacctcaaaaaactacaagatattgcaattcgagagaaatcgaagagtgaaaccttagtaagagagagcaagtagaggccgaggcggttgtgctgagcaacggaagagaaaggaaaaggaagagacatctgagcggaaggagcgtatatctgcaggagaatgcaaacggagatcttgtgtggagttaccgcaaaagcaccggccgttctcgttaatccggccatatctctctgtcgctaaaacactcactctctcactttgggattcacactgtctctcactttgggactcacgctgttgctcaatccctgccgggttattttcccccgacgagcagccgggattagggcaccttagaggaattaatttgaaattttgactaaagagtcaccgggaaagtgagcactttgaaaagagaaacaaaggaaaaataaaaaccggttatttcaggccggtagttgaccgccgtcgggttaagccttaagagtatataacccagaggccaaggcccaaagttttccttttaacttttaagtttgatttgatgtgtaaggcccaaaggtgaaataaaagaagctaaataaactaataatcaaacgaataaaacttcctttttaatttcgtttttttttggggcaacaaaactttcttaaatttacaaaactacaacggaatttacaaattacaaagacattaaaaagttcgtatatactcttttattagtttcgactaaatatcgtattagaacagaatctatattttatctttttatcagagatttcaatttatttatttttgacaaaggattacctcatgtagttgttgccaacttgccattaaccatgatagtgacgcaggcttccaaaacatttcgacgcgagagccactatccgaatacttgaataatattattgttgcgattttttaaaaaggtcttgctgatggccaaaaataaaataataacaaaaattattgtatatacaatatataaacgtgacaaaatgagctgttgaatatgatactagtatagttcgtatattaatttattttgaccaattgtacattttcgtcatcggggatgtagctcagatggtagagcgctcgcttagcatgcgagaggtacggggatcgataccccgcatctccattttcctattttttgttatcattattttttcttgtcccggtttttccccacgtgggaaacgtgaataatttaactaagacatgtacttcttctcatctatcttcgtcgttgactcgtgaaacttttgacaacttgtagtattaagatccaacttcaaaccaacggcaattgcattttcagctaaaagcaatg

SEQ ID NO: 5872 - DNA, 3000 bp, Unknown
  misc_feature (1)..( 3000): cDNA_ID_3078746_gDNA_ID_1620822_Annot_ID_169518 3000 nt of promoter + ATG
ttatgggggttgcttatttaggtttcatcacttctcctatagattatcaatgagatttacggttaatacctttgagggaataaactctgaccaccttcttcagaaagtgccttctccagtctcacttcaaatggtgttgcatgccaactcactttctgatcctgcataaggtttagtttctgaatattagaggagctgaaagagcctagaaagcagagatgaaaggcagggaatattacctccttgtatttggttgtcgaatttgggatcccatttccatcccacattttgggtgaaatctcagtttgctcattctcgatccactgagcagcaaccaatccaatgataggcctgtcacctggggttatgacaccgactcctggtgtcctttcatttaaagccgcaatgttttcattgatctggtttagccaaggagaaaaacttgcctcaaacttggacagtttctcatctgagctttcttccactttttcaccataagtttctgaagagggtgtttcagcctctatctgctcttcgtaatctaggccttcatgtgaatccttgtagaccttatataaggatgcattttccattatattggaaactgaatgcacaaactgtgacctgattctaggcctcccccttccccctgattccatgtttgcaggatatatggttccaggagtttgcatctcatcagatagtttcaagggggttggattaggtgagctcactgtaaaacaaattttgccacccatctcgggttttcttgaactgccattctcggaagaattagaagagtttgattgatcaagatcacattcaaaccggacagacttattctttccagctgtgaacgttggcctggccgttctatccaactcacccttgattgcagtgccaacgctttctacctcagtaccatcactagatgcagaagagatccttgcattgtcccggacatcgattacacaactaatatgaaaaatgaaaaagtgaacttcagatccatgaatccattaaccattagtaagatgtgagaataatgttagcatagaaaccacaccagttctatcaagaaaccatgtcaattctatcaagcatagcaaaatgagcaaaatgtctgttttattaaacaaagtaacatctctacctgctagctgtttgctctgaagtaaatgatggtcttcccacctcttcacaagctttcatgggggttgaggattcagccaaacgagaccccatagaggagctactggaaatccatgagtgaaaatgggaagatccagaatgttgaggactaagtttttgggatgctttcctaatttcaataggtgtctccggtatagtaccacaagctttaagaaaccgcgcctatgattccacaagtaaaaggaaaaaagcgttagattctcagcatagactcttgaaagcatgtaaaatctgattatattgatatatgcaaagaaagaatgctctgaaaaatttcagagcttccacaacaaaattacagagtttctgaaaaagaatccctgcattctaataagaaagtcattaatgtaaggaaacacatttacacagggatccatgcattcagatatatagacatccgtgatagaaatatgaacagtgaattaagagcagagggaaaaaagaagaacaaaacttcattatatcaacaaacctaagacgacctcagtaacaaaaaacatagaactcatcttctcattacctgaagaagagatgtggtaattataagactcgcaaaaacaaaatcagggtttcaaaaacaagaaattgattcatgtggagttaagttgagatatcaaaatcaatccaagggcacaagtcttgatcatgataaaaggaataagaatcagtatggttagaatcacatgaatagaggcaatgcttcaaataaaaatcatacctcatccctaaggcctttgtcaatatgtatagaatctaaatcaaatctttctttgtcaaggcaaggcgaagaagctgatttctctataaaaatcaagaacaaaacccttatattattaacaagaacagtaccaaaaacaagtaatcatctcgattcctgatataaacacatcgaaaaagagatttaccttcagaaagaaacaaagctgacaaatcattctgcgagtcctgtgctttctgaagataaataagaaaagaaacatataattctgggtcagatcgatacgatcttgatcaaaaatcaaaagaatcgatcagaagccaacagactaaaatccatcatatacaaaattcagctcaaggatcaaacagggcattgcgaattgcgatctatttcttatacgatcattgtagcagcaaaattgacaggatcatgcaaagaaaagaagcggaaaaagcaagagaagctaaagaattactctggaattggcgagtgaagaatgagagacgagattactagtagagcgattgtctctggcgcggaagcagtcgagaaaacaagccatggctctacagactgataaatcgatgaatctgagcacggatctgcacaaggggcttaggtttcggttcatcaacagtcgtctcatatcatttgatttcctcaagagcgaaacagtgattgaccaagaaaacaatcaggctgacgattttcccgagaaacacgcagaaaatgagagagaaaatgccgttgttttgaaatttgaaacgaaagggtgcgagggaatgaatcaggtgcggtgcaggtcttcccgatcactgttttctgttaatttccttctggcccaaaaggcccaaaaagcccaaaagactccaagttattcaataaggagttttttttttcttttcttaaaaaaatgtttgtggaaaaaagggaaagtagggcaaggagggaggcggagagcaaaaccggaacactctcatcaacgagcgtctctctggaagctcacattaccgccacatagtctctgctcacaagtattgagagaaaagaaacctttgaaagcgatg

SEQ ID NO: 5873 - DNA, 3000 bp, Unknown
  misc_feature (1)..( 3000): cDNA_ID_1989655_gDNA_ID_1620823_Annot_ID_57822 3000 nt of promoter + ATG
ataatggcaacaatggcaaggttctgtagcctaaaaagggagtgatggcaacaaaaaaaactcaccagaacttaaggaacccatgcctacggagatgaagcgagatgaaattctttcctaagaatgtctggatgaatcgttgtgccgtcaccaaaatgagcctactgggttcgatcagtgttttacatttatggttgatgggtccaccaggctgcatcaccaaatcttgctccatatcagcatagaagacatcccctatggcgatcacaccatcatcggacttaaacttttccactacctcttgagaagtccgcttagttggcttctttatatcttcactccaaggagcctcaagcttcccaccaatggaaacccccaatcccttgagcttcttgatatgatcctcatcaacataacaaggctgtggcgacgagacgtaacagatgaatctgtcaatgtgagcattgttcttcttatcaatctccttgaactgatcaaaagaaatgacaacagttcttcccaagcacgtgttaatccgctctatatcaatcactttatcatactggtaatcaaacttagagcttggaatcacaagaactcgatccagtagcgcagcaaagaacatatgtttctctaaacaaatcaagtggttactcatttgacctgagagacagatagcaaataggaacttatctggtctcggcttccattcgatcgttttccggtccaacaacttctgatctacctttctacatatatcagcgttataagaaccagtgaaactatctgaaccagaagcagtgatagagtaattcccagtcctgtgtggtgaaagaagcacttcttcgatttccttattcactgaaatctgcttcagtagagcagctttcacattgtctattactacagaagaactaattgcattcgaagaattgaaattcgtacggttcaacagagagactagcgctagctgttgctgcctaagaagattcagagcttggagctcagattccttgacacggcttgacattggatcaagcttaaagctcgagaagaatgtacgagtatcagtaaataagaacagaagtccgacgaataaagttagagagacggcagcaacgacgtaacgcttgttaactgagattttccaacgattccgagctcgcgacaagatttcatcgatctgtaacgccgatctcggactcctgccaccgccgttagccatatttacggtcctggcgtcagggcgtagattgagatcgttgtctctggtgtcgttttgtgggattaaattgcggtggtcctcttcttcgtccgacgagttgcgcaccatcgccgagctggtaatcaatgggagattcttctcagagtcaaatctcaaaattcaaaaactcgaaattcgatagaaaatgcgaataaacagattaaattatgagaaaactgttatttaatacctcaacttacaaagaatggccaaattaaccgtgaactcgtgaaatggccgttttaactctcaacaaaaagttgacttctgttttaacattcaagtttgcgttgactcggcagcataattgacagacgttttagtccgttaaacatctgttactatagtcttacgacgtcgttttcgtgctaaagagaaatcaaaatcgagaatagaaattctcaaaacaaaatcaattaccctaaacccaaatcgaaacttaatcatgcccccaaaatcaaaatcgaaaccctaattgcttcaattcgttttctgaaatgccattagttagaaagaatggcgtcgttgtgaggattggatctccaatgcttcacgaatcagagaatttggtgggagatggagttgaagcaccaccgcgaggagaaagagatgaaattggagaagaagttgggggtgaaacgaatgtggtatctgagtcttgtggcggagaagacggagcacaagatgcagctaaagcaacgccggaaggagaagcagatcgaattggagaagaagctcgaggtcaagcgaatgtagtatcaaatgttgatgtggcagatgtggccgaagttcgttctccacttaggcgaagtaaacgaaggcaaatcagattggaagaagaagctcacgatgcagttgaaccagtgccggaaggagaagcaaatcaaattggagaagaagcttgaggtcagtccgttgatgtggcagatgcaaccgcagtttgttctccacttaggcgaagtagacgaacgcaaaatagattggaagaagaagttgatgttgcagttgaagaatcaactcgtcgtgaaattggacaagaggaagaggaagctcacgatgaagctcaagaatcaggcgttgctgtggcagatgcagtcgaagttcgtgctccacttagacgaagtaaacgaaggagaatcagagatgaagaagaggaggatttagaggctgaagttcctgctcttgatgaagacgatgactgtgcagtccaaggagatgaagactgcgatgaggttgatgatgcagtagatactaatagagaagaagatgatactgctggattaggtgtcgaagaagatggtaacttagacatggaaagagattttccagaggctaatggagaagaagaagctagtgacaatgacagcggagatgatatatgggatgaagacaagattccagatcctttgtcctctgacgatgaagatgatgatagagtagaggcagctcgaaatgatcttggtgatcctgagattttactagcattggagaagacttataactctcctgaagatttcaagcttgctcctttgatgtcttccctaaagacaaggtatgacattaaactttataaatctgaagctatggttgttgctgctaagtgtgtgtatgttagtgatgagggtgttgaatgtccgtggagagtccgttgctcttatgagaagagaaaacataagatgcaaatacgaacttattacaatgagcatacttgtgtgaggtcaggacattcgaagatg

SEQ ID NO: 5874 - DNA, 3000 bp, Unknown
  misc_feature (1)..( 3000): cDNA_ID_1988782_gDNA_ID_1620823_Annot_ID_57832 3000 nt of promoter + ATG
tctaaaactgatactcttttcaagtcctcttatcaataaaagttgttcagatttcatcctctattttcattttttttttctttttcatttcactcaaattttataaacaaaaacacaattcaccagaaacaagtcttagttaagtcaattgtccaaagcatgctgacgcaggcagtggcctaagcaactaacgagaatctcttttttcttcttctttgaaagcaactatcgaaaatctttataattaaataaagattagcgtacaacactcatttctcacataaatctgttgtcaaaataatataacttgtatttaacaaaaatatgtgaacattacattaaaaaaactgaatactgatcaatattaagaacctaaaaagtaaagagggaatttttgacttattattcgcaaaactcatagtattgatatgagtgacacccaaacaaaaaaatgatgtaatcaagtgcgccaaaaggaaagaaagaaaacaatccgacttaaagaagacaaacaacgaacaacaactgtagaactaatttaatacaacttttttggctttaagagcaagcaaaatgcgattcaaaacccctaaaaattaccaaacatattttctattcatcacacatatagacacaaaacagcaaacgagagaggtcgtagtgagagcttaatcaagagcaacaatggcagatgaggtgattcttctggatttctgggcgagtatgtttgggatgaggacaagaattgctctggcggagaaaagagttaagtacgatcacagagaagaagatctatggaataagagctccttgctcctcgagatgaacccggttcataagaaaattccggttctcatccacaatggtaaaccggtatgtgaatctctcattcagatcgagtacatagacgagacttggcccgacaataaccctctccttccctccgatccttacaagagagctcatgccaaattctgggccgacttcatcgacaaaaaggtagaaaatttacggtttggttttggtttattttgttgtttctaggttttggtttcggtttaagtattttggattggtttggttcggtttcttccgctagagtctcttgtgtaagttttttgtttttaccaacggatcaggtgaatgttacggcgagaaggatttgggcggtcaaaggtgaggagcaagaagcagccaaggagttaatcgaaatactcaagacgctagagtctgagcttggagacaaaaagtactttggagacgaaacttttgggtatgtagatatagctctcattggattccatagctggtttgcagtgtacgagaagtttggaaatgtcagtatcgaatctgagtgttcgaaattggttgcgtgggccaaaaggtgtttggagagagagagcgtcgctaaagccctgcctgagtcagagaaggtcattacattcatttccgaacgtaggaagaaacttgggttggagtaaatctctactttgttatgttgatctgttgttgctttgttctattttctttgaggtctatgtaatgcataataataccaatttcaatttgtgagattatatttccctttatgtaaactcgatttcaataaaagaaactttgttgtgatgttcattcaatggagaattgttggtacattaatctggttgccataacggcgcttgctctaataccaaaatcgacgtaaatatatgataaagattaaattcgttgattcaatgaataacctcacatgtgaacaagatttgacgatcgtgattcaaaaaatatgattaacttagttaaataaccaggagaaatgctaaaccggtcgaaaagaagaatacaagaatgaaacaaactaagtgaaaactttgagccaaagaaaaaaaaactgaagtgaaactaaaccgattagcaaaccccgattaagaactttttaaccagacacatctaaaaatcgttggatatttggcccaaagataagtcatttaatcatttgatttttgaagtattggaaaaaatgttaaaagcaaatagttattatatcttaccatgcaaactcattctacaccgtttatttgtttaatcgtttattggttattttatttttgtcgttagatgcacaaaagatacaagaatggggacaatgtgaaatgggaaatggatgccaaacacatataatgagatatgcatatactctatatttttaaaaaagaggtatgtataattgtatattaatcaattttattaggtttcagacagctaaaatttgtttttttgtttttttttcgtcatccttaaagtaaatatagtcctaaccaaagaaaagtaaccaataaaaagtttggaaaaagtgaaggtaaaaaggtatgatggcgtaagcagtggcataatcaattcaactctgtgaatcatgtggtcaatgtcttgaaccgcaaaacattaataaatgagttgttcaactaaataattgtatactactcgttaccaatctctaggtttaagctttctgatttaaaatttgtcacataaattttacaccaaaatatttattaattccacattttaatataaagtacgagaaactttacacgagaagaaatcaacatgaaatttcaacatataaattacaaacccccttgatagtttttttttggtatgtataaccccttgatagttgatatactcatattcaataacacaaagtattgaagctaaataatctctgacgacttttaaactaaagctaatgaaaagaaaatgtttaatcaaaagtttattcccttcatattaaaatgctttagtgcgatgagatttagtgtaatgggcacgttaatgcatttctgactttagcggcaagcaaatgcgatttcgtttgtagttttgagttattgtctcctctataaattgaccaaaaccttgttctcttcaccataatatacttagacacaaaacaaacaaacaaaaatatcttagtgagcttaatcaagaacagcaatg

SEQ ID NO: 5875 - DNA, 3000 bp, Unknown
  misc_feature (1)..( 3000): cDNA_ID_1989641_gDNA_ID_1620823_Annot_ID_57838 3000 nt of promoter + ATG
actatgtaataatgaatcttctaataattaattttactttttctttatttataaaacgtcacgtagaatatcagtaaaaaaaaatcgaaagcaattataaaaatcagaaaaggtactaaataacaaaatctgttattgtcaaatcaaaaacgaatggcaaaacacaagttctgtatctaatacattttctttcaaacaaataacaaatactagaaatatgattttaaaatgtgacaaaaaaaaaaagaaatatgattttaaaacaatttgtttttataaaaaaatggtaagcaagttgatgaataaatcagtcaagctcatcgacgaacgtggcatgatctcgtaatagacattcgtcacgtggcgtttagctatttgatcaaaacatgtcagacaaagtgggtcctgcattttgtacgattcatctcaaaaggtgatatcgagtctcacatctccaatcctgaccgttggtttataactcttattagacgactttcaataaaaactttaggtgggtccctcgtttttagggttgtactgtcaccacctttcagtttcagtgaacgctgcacgaattttaactacaattagacgactatttacatttcgatccataactattttattatcatattttagacactcaagtttttaaattgccaattattcgctctttcggattttttgtggatttgagatgatccctgcttcaatggaggaagctcaccagctggagtcgagatccgatgacctaagtcaacggagaagctactggagatggaggaagcaggattttttcccggaattctcttttcagagcttctctacctacaaatcagctctctccgccacttgtccacgcctcgccgatcgtcttctctctcgctcttccgatgcgtacgagctcgatgcagcccgccgcgaaagcgagaaccctatgcgtcgttgtctcacttggtgggacttgctctggcttagctttggttctgttgttggttcgggtgtgttcgtgatcacgggtcaggaggctcgagttggagctggtcctgctgttgttctctcctacgctatctctggtgtctctgcattgctctcagttctctgttatgctgagtttggagttgagattcctgtcgctggaggttctttctcttatcttagggttgaattgggggattttattgcctttattgctgctgggaatattcttcttgaggctatggttggtgctgctggattagggaggtcatggtcttcgtatctagctagtttggtcaagaatgattctgattattttcggattaaagtcgattcctttgctaaagggtttgatcttttggatccggttgctgttgcagtgcttttagttgctaatggtattgccatgactggaacaaagaggacttcttggttgaatttgattacttccatggtcactgtttgtattattgtgtttatcgtcgttgtggggtttactcattcaaaaacctcaaatttggttccttttttcccttatggagcgaaaggtgtggtgcaatctgctgcagttgtctactggtcatacactggttttgatatggtggctaacatggctgaagaaaccgagaaaccttccagagatattccaattggtttggttggttcgatgtctatgatcactgtggtttactgtttgatggctctggccttgactatgatggtgaaatacactgaaattgatgcgaatgcagcttattctgttgcttttgctcagattgggatgaaatgggcgaagtacttggttggtatatgcgctttaaagggaatgaccacaagcctgcttgttggctctctaggccaagctcggtacaccactcagattgctcggtctcatatgattcctccatggtttgctttggttcatccaaaaacaggaacccctatttatgctactctccttgtaaccatactcagttcaataatatccttcttcaccagcttagaggttttatcaagcgttttctcctttgctaccctcttcattttcatgctcgtggcagtagcattgcttgtgagacgttactacgtgaaggatgtcactcctgaggccggtttgttgaagtttcttggttttctgtttttgataattgcttcctccattggagtatcagcgctttggaactcaggcgttaaaggttggatcgcttacacagtgactggagttatttggtttataggcactttagggttggcattgcttccgaaatatcgtgttcctaaggtatggggagtcccactagttccgtggttgccatcgttttcaatcgccatgaatctattccttatcggatcactcggttatgtagcattcttgagattcattatctgcaccatggtgatgcttttgtactacctattcgttggtcttcatgcaacctatgatgtagctcatcagcctttggaggaagcaaagtttgagggagagagataaaagaatcgatcgtaacacttcactacgtttggtaaattgtataaattcccttgttttctgatgtgatttcaatattcttctattaaaatgtacaataatactatcgatcttgttttcgtgttttctcattcttttcatttttcaatgttgaaacttattaacttgttgaactctgttgtatttgtttctatcttggaaatttaaaattggagttgaataaggtgttctcagttctcacacctttttatttagctactttgtgattattatactttaatgacccgagctaccggtaacccgaatgcacgacccggttaacttcacccaaaattgaatacaacatgataactcaagcccaaaaaagcccatttaaccgatttataaaagcggtgcttcagacagatatgtgttataaggagaagccgaggttaaaatccaaagcgtaaaatcatagcgagaaatttccttattcctgtgattttgctgagaagaagaagaatctcgaggaggaagaagaaacaggcgacatg

SEQ ID NO: 5876 - DNA, 3000 bp, Unknown
  misc_feature (1)..( 3000): cDNA_ID_1989646_gDNA_ID_1620823_Annot_ID_57833 3000 nt of promoter + ATG
acaaattttgatatctataatgtcaagtgcggaccgggacatggaattagtattggaagcttaggaaaaaacaaagacgaaaagaatgttaatggtttaatggttagaaattcggtctttaccggtacgaccaacggtatacggatcaagacatgggaatcttcagcttcaacaatccgaattatcaatttagtgtatgagaatctacagatgataaatgttgaaaatcctatcggcattgatcaaaaatactgtccttacccgccatgcagcaatatggtaacttactatgcaagaaacaaatttctatcttcttagaatcttcatcgactttaaaattaacatgttagttcatgttttatcgcagggagattctcacattcagatccgaaacgtgacactaaagaacatttggggaacatcaaagaataaagtggctgtgaaatttcaatgtagcaaaacctttccttgcaaagatgttcagttaattgacattaacttaactcaccatggagtcgacggtcctgcaagtgcgttgtgtgagaacgttgatggatctgctactgggaagatggttcctccgcattgtctaagttgatccagtccaaacatagtcatgtactcatgttgtttattttttggttaacatataaataacattaatgatcataacaaacatggatatatctttaacttacatataattctcagatatgtttagttgttggttctgagttgtgacataacagcgatttcataaaagccaaaaatcaaataacgatgatgaaagggatctcttcagtttctcaatcgatcaattataatccatacatcgaattcaatcgaccgcagcttcagatcagtactgtgaatcccaatccagctcaatctcgattttcccgccctcgatccctccgtgttctctcactctccgccgatccatcggcaaatcggaatcctaaatcagccgttgacgcacacgcgccgccactggtggttgtgggatctgcgaacgccgatatctatgtggagatcgagagattacccaaggaaggggaaacgatttcggccaagacagggcaaacgctcgccggaggaaaaggcgcgaatcaggcggcgtgtggagcgaagctaatgtatccgacttacttcgttggtcgtttgggagaggacgcgcacgggaagctaatagctgaggcgttgggcgatgatgggtgtggggttcacttggactacgtgagatctgtgaataatgagccgacgggacacgcggtggtgatgcttcagtcggacggtcagaattcgatcattatcgttggtggtgcaaatatgaaagcttggcctgagattatgagcgatgatgatcttgagattgtgaggaatgctggtattgtgcttctgcaaagggagatcccagattccatcaatattcaagttgctaaggtccatttttttactttcttgagttagttacttcagtgagagttggtttagggtttagggaagctctgttgaatggatgcagctgctttaggttttgaaaactatgagaggttttggaatagggttatagagttgattatgtttgaaatatcatgttcgaagaaacttaggctgctggtgggttttattgcaggctgtgaagaaagcaggtgttccagtcatccttgatgtgggaggaatggatacgcctataccaaatgagctattggattccattgatatcttgagccccaatgaaactgagctcagtcgcttgacaggaatgccaactgaaacttttgaacagattagccaagctgttgcaaagtgccataagttggtaagtccctttcttgcacattattaactccaaattttggctaatccttgctgctactggactctttgaaaatgctggtttagtggcttttgggtttaaaaggtttaaggctatgttttcctcagggagttaagcaagttctagtaaaactcgggtccaaaggatctgcactattcatacaaggggaaaaaccaatccagcagtctatcataccggctgcacaagtggttgatactacaggagctggggatactttcactgcagcatttgcagtcgctatggtagagggcaagtcccatgaggaatgcttgagatttgctggtaataattagtgacataaatctggttttctaacccgtaattcagattagttttgtctcacttttttccgatgcctgcagctgcagctgcctctctttgtgtccaagtaaagggtgcaataccgagcatgcctgaccgaaaatctgttttgaagctccttaaatttagtatctaaaactgatactcttttcaagtcctcttatcaataaaagttgttcagatttcatcctctattttcattttttttttctttttcatttcactcaaattttataaacaaaaacacaattcaccagaaacaagtcttagttaagtcaattgtccaaagcatgctgacgcaggcagtggcctaagcaactaacgagaatctcttttttcttcttctttgaaagcaactatcgaaaatctttataattaaataaagattagcgtacaacactcatttctcacataaatctgttgtcaaaataatataacttgtatttaacaaaaatatgtgaacattacattaaaaaaactgaatactgatcaatattaagaacctaaaaagtaaagagggaatttttgacttattattcgcaaaactcatagtattgatatgagtgacacccaaacaaaaaaatgatgtaatcaagtgcgccaaaaggaaagaaagaaaacaatccgacttaaagaagacaaacaacgaacaacaactgtagaactaatttaatacaacttttttggctttaagagcaagcaaaatgcgattcaaaacccctaaaaattaccaaacatattttctattcatcacacatatagacacaaaacagcaaacgagagaggtcgtagtgagagcttaatcaagagcaacaatg

SEQ ID NO: 5877 - DNA, 3000 bp, Unknown
  misc_feature (1)..( 3000): cDNA_ID_1989634_gDNA_ID_1620823_Annot_ID_57848 3000 nt of promoter + ATG
ggctctttagtctaattaatggattcagcagccaaattactttagaataaaatccaactttatgtctgtgtaatgaataattaatggttgagtgtacaaaataatgaaaattgttgtgatctccaaaaaaaaataatgaaaatatgagttctcctgataccatttatatagagtctaaaatcacaagtatatatttagaagtaaatttcaaattaatctaacaatgaaacaaaaattcatttgcgtgaaccgctttctctacttctttagactgaactttataggtgagtgtgagcagtaattgtagttctatccattatatgcacaaataataggttagatttggcttttagctttgcctacatctcttttttttcttgtttcatccaaggagaagaaagcccccatggaagccaaagaagaaaccccgtggagctctattttagttccttctgttcaggagatggtgaaggataagatgatcacgaccgttcctcccagatatgttcggtatgatcaagacaaaactgaagtcgtcgtccatgattctggcctcatatccgagatccccatcatcgacatgaatcggttgtgttcttctaccgccgtggactctgaggttgagaaactcgactttgcttgcaaagaatatggatttttccaggcaaaatctcaaacttcactttttttacaaaattatctatgttagacctaacgtggagcttattacccttgtttccatgcaagtatcagaattaaatagattacgtttgatgaaattattcagaaaaaatcgtttcttacaactatgttaaagccaaaatggagcctaaaactttccgtttcaaatttatttatttggttatgtctttgtatggtccttaacagcttgtaaaccatggaatagacccaagtttcttggacaaaataaagtcagagattcaagatttcttcaaccttcccatggaagaaaaaaagaagttgtggcagacaccagcggtgatggaagggtttggacaagcttttgtggtttcagaagatcagaaactcgactgggcagatttattcttccttataatgcaacctgttcaattacgcaagcgtcacttgttccccaagctacctcttccctttaggttttgcatgcataaaaaaaagtgttaacattctcaactaacaccacaaagtctctctatttacattttggttaatgtttttcagggatacgttagatatgtattccactcgagtaaagagtatagctaagatcttactagcgaaaatggcgaaagccttgcagatcaagccagaggaggtagaagaaatatttggtgatgatatgatgcagagtatgaggatgaactactatcccccgtgtccacaacctaatctggttacgggtctaattccgcattccgatgcagtcgggctcaccatacttttgcaggtgaatgaagttgacggtctccaaatcaagaaaaatggcaagtggttttttgtcaaacctctccaaaatgctttcattgtcaatgttggggacgtgttagaggtaagccatactatatagatgttttgatgaatttggtcgggctaaaccctgatagactttatggcagctaatcgctagtcataaatattttgatgatgggtgttgggccgtttgtaatgcagatcataacgaacgggacataccgaagcatcgagcaccgggcaatggtgaacttggagaaagagaggctctccattgcgacatttcacaacacgggaatggataaagaaattggtccggcgagaagccttgttcaaagacaagaggctgcaaagtttagaagcctgaaaactaaagactacttgaatggcttgttttcccgtgaactcaaaggaaaggcttatcttgatgctatgagaattgaagggaagtgatatcttgtttcccaagaaattctgttttctccaactggtcactgtcgtgttcatattctgtttttccttctctcttatgtctttggttcaaatctgttaaagaaaaaaacgcctgtgaataatacttaataagctcgttcgtcttcgtcaacatacaaaaatatcaactacgtagtaataccacaccttatttatttagacacatacagttcttgtttttcttttctctttgttatatatttcgatatgccctttattttttattctttttataaacatcatgaatgacaacacatgtgtgtccgtttcgctttccggccgtttttacaccgtcacaccattcacaatcccaatgttaaagacacatgaacgttgggataaatatttctttgatttaacggaaaaaaaaattgtacaatgcaatatattattataaatgtatatacaaagatatatatattatatatatatataacgacacatatatatatatatatatatatatatatatatgtcgaggtaaatttgaacgatatataaggggttggtaaaaaaaccaaaaaccaaaaagtgatttttggattttggtttatagttttcagattgtgtattaaaaaaaatgaaaaactaaaaaaggttttataaaaagtcaagtcactttaagaaaattaaaaaccaataaaacataaattttagattttctttaaaatttgacaaaactatcaaaatctaggtttcctattttttagaaaacacactttttcacaatcttggttcggtataaagtagatttttagaaaaactaaaaccaaaaacaacatcaaaatctacaaccattcaaagtatcatgtatcaatttacctactttgggtctggggtcatactcataccatatgtcttttatcatctgtcctttatttatattttcttccatcagtcagtttaaatcaatcattttcttcaactatttaagtcaatccaatcaatcatttaggaaaaatacgtatacgtttttaataccacctacaaaagaaccgtgtccaaacttttgtttcgtccaggaaagaagccgacatg

SEQ ID NO: 5878 - DNA, 3000 bp, Unknown
  misc_feature (1)..( 3000): cDNA_ID_1988788_gDNA_ID_1620823_Annot_ID_57847 3000 nt of promoter + ATG
aagatatatatattatatatatatataacgacacatatatatatatatatatatatatatatatatgtcgaggtaaatttgaacgatatataaggggttggtaaaaaaaccaaaaaccaaaaagtgatttttggattttggtttatagttttcagattgtgtattaaaaaaaatgaaaaactaaaaaaggttttataaaaagtcaagtcactttaagaaaattaaaaaccaataaaacataaattttagattttctttaaaatttgacaaaactatcaaaatctaggtttcctattttttagaaaacacactttttcacaatcttggttcggtataaagtagatttttagaaaaactaaaaccaaaaacaacatcaaaatctacaaccattcaaagtatcatgtatcaatttacctactttgggtctggggtcatactcataccatatgtcttttatcatctgtcctttatttatattttcttccatcagtcagtttaaatcaatcattttcttcaactatttaagtcaatccaatcaatcatttaggaaaaatacgtatacgtttttaataccacctacaaaagaaccgtgtccaaacttttgtttcgtccaggaaagaagccgacatggaagcaaaaggggcagcacagtggagctctatcctagttccatccgttcaagagatggttaaggagaagacgatcacgaccgttcctcctaggtacgtccggtctgatcaagacaaaactgaagtcgatgatgattttgatgtgaaaattgagatcccaatcatcgatatgaagcgtttgtgttcttcaaccaccatggattctgaggttgagaaactcgacttcgcttgcaaagagtggggatttttccaggtaaattctccaactacaaatataactcttctataaagcagcccatcgcgtctttctttattaacataatatacgtcacatggagcttatattagtttttactatttttgattgaggaaaataggcagataaaatcgtttcttacaaaacaacctctgttttttttaccatgttaaacacaaattggagccgaacactctatgtttcaaatgttattattttggttaatggttatgacttatggttatccacagcttgtaaaccatggaatagactcaagtttcttggacaaagtaaagtcagagattcaagatttcttcaaccttcccatggaagaaaagaagaagttctggcagcgaccagatgagatagaaggtttcggacaagcttttgtggtttcagaagatcagaaactagattgggcagacttgttcttccataccgtgcaaccagttgaattacgcaagcctcacttgttccccaagctacctcttccctttaggttttgttctaattcaacattttatcaactagctccacaaagtattgctctgtataatattggttttatgtttctgtagagatacactggagatgtattcttctgaagtgcagagcgtagctaagatcttaatagcgaaaatggcaagagccctagagatcaaaccagaggaactggaaaagttgtttgatgatgttgattcggttcaaagtatgaggatgaattactacccaccatgcccacaaccagatcaggttattggtctaaccccgcattctgattcggtcggactcactgtactgatgcaagtgaatgacgttgaaggtctccaaatcaagaaagatgggaaatgggttcctgttaaacccctcccaaatgctttcattgtcaatattggagacgtcttagaggtaaagtttaatcaaatacatagggtaatagatcattgtaatttcatcatgacgtttgtttgggcttaatgtagatcataactaatgggacataccgaagcatagagcatcgcggagttgtgaattcagagaaagagaggctctctattgcaacgtttcacaatgtgggaatgtataaagaagttggtcctgcaaaaagcctagttgaaagacaaaaggttgcaagattcaaaaggctgaccatgaaagagtataacgatggtttgttctctcgtactctcgacggaaaagcttatctagatgctttgagaatctaaagagagcaatgccttgtcgcccactactctgtttctctgttttcttgatttatgcaataaaacaatctctataatcttatcttcattgtctctctatttgcttcatttcgttaaagacaaaaatctcctgtagagaatgcttctacgtattgctacaataagacaataagtttgttcttagcaaaaaaaaggacaataagtttgttaaagtttcttgacacgttcgttgttgctcaaagatatacctaataatatgatcacatgattcacatactctgttatcttagaagtctatggtttgtcgcaaaatccaattttaattttcgactcctaaatttagtaacttttgtgttgttagcgtgcgctgtgagaaaagacttgctcacgtacaagatattttagataagttaagaaacctcaaacgtaagacatacattgcacttaacgtattaccaacctcttgctcaatcttgtggataacagcaacagtaacgaatgtcgattttattcttaaacatgtatttccctaaaaatggacaaacaacaataacatagaataaaaattatggttaattagcttccacaattttttaaaaagaaacaatctgttgacaaaaaaaataattaatttatagatttgcttgggatcaattagctcgcatgtggattttcatatatatacaataccatatgaagccaaatatattataaagaaagaaatcttttttagattttgagctctggaatggagaaaagtatcaatggatcatgcagactcatcaagagactcgtgattatactttcttgtctttcatattcctttgttcgatcagactttacagagagaacaaatatcaattatgtatcagctgtgggagatcccgggatg

SEQ ID NO: 5879 - DNA, 3000 bp, Unknown
  misc_feature (1)..( 3000): cDNA_ID_3078792_gDNA_ID_1620823_Annot_ID_57845 3000 nt of promoter + ATG
ataaaccgtgcaacttattgaacggatgtgcttctttcaagttcaaattatctcaggtggtgattataaatctaggccatcggaatgggatttcacattcttgttagaatttttttgtctatgctaaaaggcattgaaggatccttgttttcttttgttttgtagctttcttccaagagtgataagaggttgttctgcatcaaattcgaaataccagaagtgaaggccaattatcctttcctcgaaactgtcaccaaccaaatccgttgcatttcgagaaaccgtgattctgtttcctctatgaaacggatcagattaggagaagaaaaggtttctgagagtaaggtggataatccaatttctctgagttacgttttgttttgctttgtatccatatcccacttactgttattctgcattgttgttgctctcgagttagattgtgaatggaaatggtacgagtatggaatggaggcctcagaaccacgaagaagataactcttcaactgattccgaaaacactgaaatgagagactcgactgctttcaggagatattcaatcccagactggattattttcaaatactgccttggaaacttaacagagagagctcttcttctgaaggaaatcacaaacaattcatcagacgaagaagtctcggaatttgcagatcaagtttctctctattccggatgctcccaccacgggtaaagaaatcaaattaaactcacacctgcctcaaataaaatagaacactaatcttccaaattttccagctatcaaatcaaaatggcaagaaaactgatagcagaaggaacaaatgcgtggaatctgatctctcggaactatcgacatgttcattgggacaatgtggtaattgagattgaagaacatttcatgagaatagctaaatgcagcagtagatctctcactcaccaggtcttgtctctttctcttctcatattgcttgaactttcaccaagatcaaagtcttgatcttttgtatttgtgattctgacatgaaattgtaatcaggattttgaccttctaagaaggatatgtggatgctatgaatacataactcaagagaattttgagacaatgtggtgttggttgttccctgttgcttcggctgtatcaagggggttgattaatggaatgtggcgctctgcttcgcctaaatggatagaagggtttgtgactaaagaagaggcagaacgttcgcttcagaatcaagtaccgggcactttcattctcaggttccctacttcaagaagctggccacatcctgacgctggttccgtggttgtgacttatgtcggccatgatttagttattcatcatagattactcacaatcaaccacatctgcgagtaagtaaacctctttatctcctttttttttcccctcagtgtctgtcttgtgacaattgtttttgtttttagttctagtgaaaggtatacagatgcaaaacagttgcaagatatgcttttggcggaacctgagctatctcggcttggaaggtgagtgaggaagtgaaaaaatttagtttttgttgaagcaaagagagatcaaattgaagatcttaaattgcttattttatttattttggtttttgttgcatttttcaggattataagaggcatctgaatctaatcaacagactcaactcaacaaagtagagaagcatcgactgttattgaggtttattgtacagatagatttgctaagtctaagtattaactgatactaacttttgtaaagctcagtgatttaaattaggtggaaaggatttttattgtaagacttaagtatatttgtttatctaaaatcaattaccgacaagaaagaaaggagttgcgatttttgcttcttctgctcagtttttatatttgtgtggcccatttatgttccaactacatatttgcttggtccctaatcccttattagaggttaattatggtaatgttttttttaccaagaaataaataaaataattatggtaatgtttttctttcatatttttgttttgttatgtactaattaaatttaaaagctcttagaaaatttattcaaccatttttgttaatcttctcatatatgatgacttattgtgattggtaatacatggaatgagaataatatacagaaattgtaaattaagtcataacagtattattttgattcacaatggagttggagaaatgaattatcaatataaaaaatcatggtttcacgtaatttgatgatttgtttttaaaatactccctagagcctaattattgtaggtaaaaaacttattagtataaaatttgtgagatctggattaatgatattataattgtcttgaaaccagaaaaatggatattctctaatctcaaaatatttgatacgagttagatgacggaccaatcggtaggaaacacgtggtgacatttcagcttctgattacaacgatggacttttttttccctctctctctaatttgtatattgaattaaaaaagaaaacggacacacacacacacacacaaatctgaaatctctctcgtccgccaaaggtcgagttttgagagcgagttcttacttctgatgtggttttgtctcgtccacccaaagaaaatcaacacaaaaaaaaaaagggatcgattcacaaacttataaatttcttgtcttttttattttttatttttctgaaaatttgccatacacacacccaatctctctctcgtcagccaaaaagaaaaaaacttaacattggactctcagtttccgaagattcttctctttggactctcagtttctgaaacttattattagccgtctttttttggtttgggtttgcctaaaagttgtcgtcacttgtggattttggtctgagaaatgatgatgtcatgtcggaatatagacttgggtacgagtgttcttgatcattcttgtagctcttcttcaacaagtcgtcgattcttgtttggcaattcttcgaagaccgtttgtatg

SEQ ID NO: 5880 - DNA, 3000 bp, Unknown
  misc_feature (1)..( 3000): cDNA_ID_1989637_gDNA_ID_1620823_Annot_ID_57844 3000 nt of promoter + ATG
tttagtagacttctcaaactgacctatatcactgcctaaagtattcttctttcctccctttgcaccaccaccctcttgacctctcttctccacctttgccttccctctcatctttgcccgatcagctatcttcttccccaatgcacccggtaaaagattgtcctcatcatcaaaaccattcgcattaaaccctaaccctaaacctgagctaccaatacccaatccacctctaacttcaacatcctcatcaatcatatcattatcttcgattttatccctatctttctcatcattatgttctctagaatccttatcaatctcttgattcggcataaccgtacctgtagatacaaaattgacaggcttggttaagtctgctttccttcccgaatcacgatccttacgcctcttcctacgactgccgccgccgccagaatcatcggaatccgaatcgctctcagcgaagattccataagtagcgtcgtttttggtttgtttccgtttctccttcctcttctggtatacgaactcgtcaccttcccatcgacctccttcgtagtcattatccatactgaatctctccatatcttgatactcatccatggcgaagaaactagatctgaaactctgcgaattttccaaactatcggaggtttttggatttacgactgcaaatcgccgacgtcgccgtgtataatcggagggaaaggattaaccgacttgggctttataaataataaaggcccatttatttttgaattatagcccatttatttgtaaacttggctataacaatcagtcacctcatcttcttcattttggactcttggccaaccttatgtcgttttatcgcatctgttacaataaaacgcaaaaggtgatttttttttcaggtaaaaactatgagtttcgttatctaaccataactcaatagatactacgataactaaactaattaaaagggataaaataaacaaaaacacagttttggaaaagaaaacaaaatagaacccaccaaaacagatatagtaggttagaagtataacttataaggttaaccaaattgctcattataaccaaaaacaaaaaattgtgaacccaaaaattacgttaagaaaacgtagattccattatatcatggagttttgagtcttcaatccacatactttcgaaagtaacaaatttttccattaattctactaagatttttagggtgttgtttttgatgttttaagtttttcttattttttgtcttaatttctcctcctcctatctctcttattccaatttcataattatatatttttgcatgactagattattagaaaaaattgtttctgttttatgttatatataattaatctttctctttctgataaaatcataaaagtcaataattttttggtttaaacagtaatataaagtcatgagattttaggaacactttgttttctctaactaaccaacttttcattttgcaacatagaatagaagcattaatatattctttctggaataaatacaacaaaatccccttatttcttgtacaaatcgcataaatatgggatttgaagagtacaacaacacataaagaaacgtcccacctttttagatgttataacaaagaaaagtcggttgtatgactcggacttttctagttggtttttcaaaaatgttacgtaggttttgacgtcatatctcattatttgaaactattttccttggaatggttcactaatagctaaatgtaccattcttgttacattttttaaattagcagctaaaagtgtatacaaacttttatatatgtcgtcatttaattgcacacattggttatacaatgcaaattatttccttaaccatgtctagacttttttacttctatcaatttaattatatacttttcgtatctttatgtacataaaataagtttcaggtagtaatatcagcaaaaaataaggacttaaatgaatacgtctgataaataacttacgggatatgttatagcttcgcgacaaaaaaaaaatcctcgaagcctatagtctattaattacttgttgaacaaaacaattagtacgtactagctaatgaaataagcttacgttacaaattagtataataataaaccaacaacgcccgtagccgttaggtctattttgtcctaggtggaaaatttagtaaatgcctaatgaccctagtctacgcgtaattgcatttatatgaattattaaacttcaaaattaattgatatggttggacgaacattatcttatgaattattattatatcatatatcacatgcgtttcgcaagagagttgacattgctattcatcgtctccaaagaacaacgccacctggttccatatttattgtccccaatttaaatttaatttaatcgtgatcattgtcttagttacataaatgttaaggttgatttcgagttatacgtcaattattcaatggaaacttgtttaattatataagttgagacgaactctcctttctctacctgtttaaagataactacgatacgaagacgcaaacaaaaaaatgcgtaagaaagtaattatggaagcatcatgatcagcatatacgtactagtagatatatgtatatataaaaagataaaatactaaatactctcatgcaataaagccacatgcatgtagcgtaagggaaggaagacaaaattaaatttttggaaataaacaccaaagaacttgttgttataaattcattgccagttgcacatacagcgatttattacatatatatcccctctctctctctctctatagtctctctataaacaagttttttatcacatttcttttctacagtattttctctattcacgcatatatatagatatccagctgcctccaacatatatagtcaactgatgaaattataagcatcatcattatagttttgtctcctttttttcttcttcttttctttttctttctagctactctcttcttcatagctagatcaag

SEQ ID NO: 5881 - DNA, 3000 bp, Unknown
  misc_feature (1)..( 3000): cDNA_ID_3443592_gDNA_ID_1620823_Annot_ID_57841 3000 nt of promoter + ATG
gaaagttttgaaaatataatttatgaagaaacatgtggttagggtataataaatattaaatgcatccgtcgaagcttcgagttcttggaaatgattatgaaattaactaatgttctttatcatccatgaatatgatttatcatcttcaatcatttttatacaattaggcaatggaaactataatacagaacagagaattttatcagtagtctgtcactataagcatttcgttgtccttgtttttaattttaaatatctatttcaagttttttaattgtcacttttgtcaactaacaacatcgttgttaaactttttattactttctttgagtggaatttttttctcttcttctttcacgctaagtagaggcagcctttaattctcagcctccaaagaaacgtaaaccttgaaaattaaacttaatcaagaaatatatgcaccacaaattaaacaatataactttgaactttccacaaatttgtgcaccaccaccattcaatttacatatgctttttgcagactgtataatttctttcatatgatacacatgaaacaaaaacaaaaatctggattccgcataagatggatactctcgatctatggatttaaccatttacaagtaggaatgatcataagacaaaattgcaaaagcaagaggagaattgtgtaatggaaatagaagccaacctttgtttcaacaagcacaaatatcctcatgagagcaatcttggccaccatcatcatcatcagtggagtcagataattcttggttactagagactgtaatgatcattaccttctcatctggtttagcttcctctggttcaataagattcttcctgagatcactgaaatcctggttttcatctttcatggagctctgaagaatggagaagcaagtgaaacaagaaaacactaaattgattgcaaacaaggagatgcagaagatcacgacgatacaattgtaagcatccattcttcttggaaactgagcatgatggttgttggtttacaacaaaaaccagaatcgttcaaatggagaaatcaaaagtattattcacttgaaaagtgatttgattctctggtcccctacacagatatataagaagaaagctcaaatctgaatgtttggtgagcttacaacaacaatctcttataagaagcaaacaaaaaggataaagaaaacaatattatttttttgggtctgcggtggagaagatttttcaacagataaaggtggcaagcatgacaaaagcatttgtctctttctttcttttcccaccaaattcatataaataaagatattatgttttgctaaaaaagtacatattactaaattctaaacaacttcaaataataagcaacataatatgaaagggagagatcatcttctcttatatatgaattgcgttaattagtattgcagagtatttgattttacctgcacattttcaatcagagagtcgcaatagcatctgaagagaccatcaccacctgtctatatcagtgaaaggttcagggtttgcgatttaaatctgaagtatgacaaaaaaccatttgtttataaagattatctgatgttagcattcaatatgtagcttgagtgtggataataatctattaaggatttgaaggtttcttggtttgaagtaaacatcaaagaggccttactacgtacaaaacttcatttaaaaagacatagtttgtggcaatccgaattagtaaactagacttgttcttcgacttatctaattcataaataatttatcacaataagctcacaacttatcattgactacttgcattatgcaatctagaaatactaaggattataaagaacaatttgttgaagacagctatcaaatttaaaagccatgaacaacaaaatatagaatacaaaaacactaatatatttttcccaattcgtacaacaagaaacctataatattgttttaaagacatctttgcatcaacacacaattgacatttgatcaaccaagtcaactcttttttaaaaacatggcaagatgatgatacaagaacatgtcaaataagttctacaaaataccaaaaaaaaaacaatgcagaaaaagagaattcagatgagtaaggcagagagatcatgttgaaacagagaaccacctgcagctaatagctgggcagtagttagtctcatattcagccactactgtttcatcataatcccaaattgagctaaacaataaaaatttcaaaagcttgaaaaaatcatctcttttaaactcatgcataaaaagttagatattgaaacagaaatccttcgagaaaagtaaaacacgaaaagatcccaaagataaattaaaaaatgacaaagttgctttaactcataaagaacagatatacccgaatgtcaaaactcgtcgaagaagccaaaatttcctttcagccatttcgtcgaacacttgatgggcatttttcaacagagaggatgatatgatgatgacctggggcagtttcgagaattccttttgacttgggtaattagttttgttgttaacaaaggtacataatcagtttccgacccggaccatttcgggtcgggtggagtgtgtatttctttatttacaactgttcaaaatagttttgttgtcagacatattcctaactatttattacaaaatgatccctacagtttcatttattatgatttgatccatgtagggtgattttatataacataatcaccatttagtttggttcattacaaatattattttttcttctggttcttaaatgtgtgtacccgtggcaatttcaaactcagaactcatgacaaacggttcataggcacacacatatacaagaacaaaaaaatgacaaaaaggtcgaaacttttttacacacacacaaaacctatccgaagatgaaccacacattcacacgtaacaaataatctatattaccggtaaaaggccgcgtaaacaaagaaagaagtaagctacctagataaaaccgccatg

SEQ ID NO: 5882 - DNA, 3000 bp, Unknown
  misc_feature (1)..( 3000): cDNA_ID_1989640_gDNA_ID_1620823_Annot_ID_57840 3000 nt of promoter + ATG
atatctctggaaggtttctcggtttcttcagccatgttagccaccatatcaaaaccagtgtatgaccagtagacaactgcagcagattgcaccacacctttcgctccataagggaaaaaaggaaccaaatttgaggtttttgaatgagtaaaccccacaacgacgataaacacaataatacaaacagtgaccatggaagtaatcaaattcaaccaagaagtcctctttgttccagtcatggcaataccattagcaactaaaagcactgcaacagcaaccggatccaaaagatcaaaccctttagcaaaggaatcgactttaatccgaaaataatcagaatcattcttgaccaaactagctagatacgaagaccatgacctccctaatccagcagcaccaaccatagcctcaagaagaatattcccagcagcaataaaggcaataaaatcccccaattcaaccctaagataagagaaagaacctccagcgacaggaatctcaactccaaactcagcataacagagaactgagagcaatgcagagacaccagagatagcgtaggagagaacaacagcaggaccagctccaactcgagcctcctgacccgtgatcacgaacacacccgaaccaacaacagaaccaaagctaagccagagcaagtcccaccaagtgagacaacgacgcatagggttctcgctttcgcggcgggctgcatcgagctcgtacgcatcggaagagcgagagagaagacgatcggcgaggcgtggacaagtggcggagagagctgatttgtaggtagagaagctctgaaaagagaattccgggaaaaaatcctgcttcctccatctccagtagcttctccgttgacttaggtcatcggatctcgactccagctggtgagcttcctccattgaagcagggatcatctcaaatccacaaaaaatccgaaagagcgaataattggcaatttaaaaacttgagtgtctaaaatatgataataaaatagttatggatcgaaatgtaaatagtcgtctaattgtagttaaaattcgtgcagcgttcactgaaactgaaaggtggtgacagtacaaccctaaaaacgagggacccacctaaagtttttattgaaagtcgtctaataagagttataaaccaacggtcaggattggagatgtgagactcgatatcaccttttgagatgaatcgtacaaaatgcaggacccactttgtctgacatgttttgatcaaatagctaaacgccacgtgacgaatgtctattacgagatcatgccacgttcgtcgatgagcttgactgatttattcatcaacttgcttaccatttttttataaaaacaaattgttttaaaatcatatttctttttttttttgtcacattttaaaatcatatttctagtatttgttatttgtttgaaagaaaatgtattagatacagaacttgtgttttgccattcgtttttgatttgacaataacagattttgttatttagtaccttttctgatttttataattgctttcgatttttttttactgatattctacgtgacgttttataaataaagaaaaagtaaaattaattattagaagattcattattacatagtttcagatttcgtcaacagtcattttcatactttataaaacttacatgttcctgtccaaaggtatcaaggtaaaaatcccataataaaaatattactgttaatgtgacatattattttaggacaatgaaagactatttttatggagtatagaattcctttctggtattttgaataggaaaaaatcaactacatttaataattttatcaatttgcttacataattacgtgtgataaaataatagtattccggaatttattaaatgtctacctatattttggttattacccaaaatgagcttataaaattattattaataatctactttctatatttttggttaattattagtttatttaaaaacagcatcctgaaggacggagagagacagagtatgcgaggagtgtgaaaacgaagagcataaacaacacgggacgaggagagagaaactagtgtgttttagaaagaagaaagagagagatagacaaagagactgtttgtgtcttcttacccattcgaggaatcaaagcatctatttccgagctctcaagacgacgagaagctaaaagataaggctgaagaaatttagggttttttcttccttttgtattcagctcgttaattaaggtatgttcccaaattcttattcttaaagttcggctctttcctttttcttccgacttgtgtcttagttttttttttcaatcgtggtcaaaatttgttcttgagctactctgttataagggtttgtgggtactggaatctttgattcgagagcaatggagactttcaagcacctcagattttatggttagagaagtttttttttttgagctgctctgtagaataatgtgcttaggtctgtacggatttggggtaactagttggatcgcgagtgtttctcaccaggtccttggaaaaggatttgttttatacctgaaatttgggatttttcagactcatcttcaagtactttgctttgaatcggggatttagcagacttgggttcttcagtgagatgctttattcagttttgggggtttgttagatttgagagcttaagagataatttcttgttgcttttgttgaaaaactatgaatggagactagatttaattgggcttcccttggaaaccatcttgagctttattgaatctgtgtataatatgatggaataatgagagtataaactgaactcattctattggtatttgtaaatgcagggctatccatcttccgagttcttcagtagcttcacaagctggacctgaaaatagatcttggcgcatatcaggagtgtgattatggttatctgaattcatgtaatttgaagggattttcacgagctgtgatcgggtcatgaatgcgtgtctgaggac

SEQ ID NO: 5883 - DNA, 3000 bp, Unknown
  misc_feature (1)..( 3000): cDNA_ID_1989647_gDNA_ID_1620823_Annot_ID_57831 3000 nt of promoter + ATG
cacttcttccttctgatccttaccaaagagctcaggccaaattttggggagatttcattgataagaaggtaatctatcttccaaaaataagcttaaaaatcaaacccttcttaggcaagacatagacgttaatatttcgtataatgtgcttaggtgtatgcttcagcgaggttgatttggggagctaaaggcgaagagcatgaggcggggaagaaggagttcatcgagatactcaagacactagagtctgagcttggagacaagacttactttggaggtgaaacattcggttatgttgatatagctctcattggattttacagttggtttgaagcgtatgagaagtttgggagtttcagcattgaagccgagtgtccaaaactgattgcttggggtaaaaggtgtgtggagagagagagtgtggctaagtctcttcctgattcggagaagatcattaagttcgttcctgagctaaggaaaaaacttgggatcgaaatcgaatagattctacgctgatatgtttttatgtttctgtttgtgttgctgtttctgctctgtttcatgttctgtttcttccttgtttcggaaatctttaagataatgtcatcaaaataatacaaatatttacttgaaaattcggttggggtggttaagcatgcgtaatacgttgcattagcttcaattttttagatcttcattgcgatgataagtctagtaaaccgaattaaaccagtaccaagaaaatccaatccaaaatctaaaacaatcgatttgttttattttttctttccccttactaattactattatagtattatcaaaacaaagcgtcaaagaaaaaaaaaactaacaaaccgactacattgttgattttattaaaatagattttggtggagtgccaaatctgaataaattatcgaggctgtactaaaccaaaactaatgagtaatgacaattacaatttgtaatctttgtttgatagtcatagaccaaatcaactaatttcaaacattggactgaatcctttataatatagcccatccgaatatccaaaacataatgggcttttgggcccaaaaacaaaatcagtgtgttgagtttagccgtgatagtctatttacttgggtcttagtgggctttaaagtttaattgtactattatatttttcgaaccaataattggaatcgaatctggaggaaaacaagtttacgttgtagtttgtacacccaagtcccaagtaccaataaccatccgactaccgttgctggattatgtttatgtaggttatgtttctgttttctattgctctgtttttttttttagttttgccttttttgtaggttatatgtttctaaatgataagaactaactctgaagttgttttagtgtggactgtgccactgtggagcgcgtttgttgtgttgtgttgtgctgcgctatcatcagtctcggattcaatcattcaatggtttttaggttttctaataaagaatatcgtcagtggtgcattaggaaggggaatctaaactcaaaaccttctacgttacctagaaggttagctcgagcctcttccacgcatgatcagatttgaaaaccatattaaatatttgtagtaaagacaatttaaacgtggttcgaaaaatcattaagtattcagcctctttttggtgatcagtaatcagtttattaaaataccacgtgaaacttgaaaatcaaatactacctgtcttagcctggaataacaaatgtcaaatttgtctatgaactatgaagagaaggtctaattgagtaaattgtattgcagccaaaaattatttatttagaaaactattaacccttttcgttgtcctgaaaaattgagtctccagacatcatcttacaaaagtgaacaaccaaaagatatgttttcactgtacttgtaagctcttagttactgttaaaagagttttccaattcaaatttttttttttttgccatacaattcaaatctattttgttagtattaaaattataataggcttatcaattcaaaatattttgtcaaatcattctaaaataaaaaagttttttcaaagatattttgaattgaatattagtgaattccactttcttgatgtaatatgtaacgaataaatattattagttgttgaaacgaataaaaacaaataaaaacgagtgagagtattatttaaaattttaaaacatgtgacttgacaatacaataatttatacataatcaaataaccgatgcatcttgattagcattaggtaaagataatgtattcaattgtgttaaataagtttacccttttttgttaaagttttggaattaagtaaaagagatataagtagcagagaaataccaaaaaaagaaaaaaaaaagctaactacaacgcaacacaagcataacaaatttgtgtgatttcctcagattcaaacttaacaaaaagtttgaatcttcaataccgttcttaccacgagcaaatacagtttctttgaagactaacacaaaaaatgggactggtacagcggattcaatcatacaccccagtactatcctatcatgcgtttttttactttaaacgtcattttagtagactatattatggtacggtcaagctttatcaccctcctttttatggaacaaaataaaacacttcccaagaagaaagcttataaaaatcccaataatacagtcagtactgatatcttcttccaaatcaagatattcgttgacaggtaaggaaatcacatttcgatacaatagagattagagggatataataataaagaaataacaatatcatggcctaaacgtgaacaataaaaaataatccacatattctataaggaaaaaaaaaaaaaatagaacatgcgacgtggtactctataaatccccccaaaaccgcaacctctatcatcctcatctacatttcaataaacacaaagagttgaaaacattaaatcgatatatcagaactaaaccggatctgaaaaatg

SEQ ID NO: 5884 - DNA, 3000 bp, Unknown
  misc_feature (1)..( 3000): cDNA_ID_1989653_gDNA_ID_1620823_Annot_ID_57824 3000 nt of promoter + ATG
tcctgtgggtattggcccgtcgagactgttgttcaccacgttgaaataagacatataatggaggcttgttagcgaccaaggaattctaccagataagtgattgttggacaggtcaagcctctctaagctggtgagtttcgacaactcatgtgggatgatgccagacaaatagttatgagaaagctcgaggacatgaagaacctttaactggccaacttcgatcggtatacttcctttcaggttattccttcttatgtagatcccaggtgggaggctaaacagctgattgtattgctgatgagttgtaacattattgggactgacaaaaactggcagctttagatagttcctttctgttgcgtcgtaggccttttgggacatcagagcctttagttggaataaatccttcggcagctctcctgaaagaagattttctgagagatcaatatagaaaaggtggggaaaagttcccaaccaaccaggaattgaccctacaagctggttgtgggacaaatctatgactgctaagctcttcaatttgattagccaagctggtatttcacctctcagtccagatccaccgctagcaaatatttggagattagggaatccatctgaggaaatcaagtctttgtcgcttggaaatgtttcgttgtaaaaattctttcctatgaggagagtggacagattcctgcagccctgcagaattccaagagcgcctgtaatgttcatcagtttattgtctgaaagagacaagatcgatagagattcaagttccagtacgtgaggagatatctgtcctgttaacttattgcttgcaaatctcatcgctgatagagatttgcaggagtgaaccctccaagggaaatcaccgctgaagctattgtttccgagatctagaatgctaaggctctgaaagcgggaaaagtcaagctctgataaggttccttccagccgattaagcctcagattcaacttgacgagattagtacaatttgcaagagaaggcgggactgtaccagtgatgttattgatatggagttggaggctttgcaggcgagagagctgacctatgtccattggtatttctcctccaaggtgattggagtacagctcgagcgattttagttttgtgaggtgggtgatgtcatcattgatctttccagaaagatgattgacgggtagaaagagttgctcgagctccgaaagattgtatatgtcacttgggatttcaccagagatattgttgaagcctgcttgtagaacacttagcttcaaacatctccctagtccttgcggaatattaccggtaaaatcattgtaggagaaatccagtttgctgagctgcggtgaactcttgcacataaacgaagggattgagcctgtgaagctgttcttgctgacattgaaactgattaaatcgaaagttccttgcataaaaatagaactagggaggatttcgccttggagaaaattgcttgacagatcaactatccgaattgggaaacatctgttgcttccatttctaaatgtttgttcaactggcaactcaccatcgaggctgttgtaactaagatcaagaactttgagctgatcaagggctgagagaaagccagatgggagatgaccggagagacggttatgagaaagattgagttgagagagatggtggagacgcagaacagacaaagggagtttaccatatagtgctctaaagggcaatgagattgcagtgatgtggctatccggggaatcatcgcaggttattccttcccatgagcaacaatcaatggatgggttccaattcagaggagaaacagaagaagaaacgtttccagagaaccacagtagggattctcgatcttgcgagttgcagagagcctctgaaactgcaatagaaaggacactgatgaaaagaacacactgaaggagtatgccaatcatgtgaaaactcagagcttgtattggtcttgtggttgatgaagttctcacaaaacctttggctttgaatctcccctcattagtcatggtgagaacaagaacaagacgagaaacagacaaagaagatgaaaaaacttgttggccagtgttgactaagggggaatagcccagacataacaaaattagacttgtcgtacatctttaatattttttttatctgtttctttgtcctgacgctttcattattcctgtgatcaattttctcataccattggtccatcgttaatcctttctcaatttcattttctacgtaacatgagaggagaccaagtcctatgagaacagttgacgtaacagtggttgttaagttaagttaaaaagaggaagctagtgagagtgaccgttaggtagagaagtgagatctttaaccactcttctttctctctctctctgcttttttcgtcgtctttcacatctactgttcgcaaactctcttatgcttccaataatggtgataccaattgagacttgcaggagaatctcctcttctccacactctatcaactggtcagccatggaatggtcgtttcagtttcaatattcctggattctttttaaggattcctgtttctcttctgttcctggtatattcttaacgacgaaattagtatcggatcctggtaatacattttgaagcttttaagtatggccgaggatttggacaagccattgctggatcctgatactttcaacagaaaaggaattgatttggtaaatgttccttttaactgtatactcttattagtacttgaattcttagtggcaaaaaagggttttgacccttcttgagcttgacagggtatattgccgttggaggaggtttttgaatacctaagaacatcgcctcaagggcttttatctggagatgctgaagagagattgaagatatttggtcctaacagacttgaagagaaacaggtaataaacatgacattcttcttagtgttcctgccaattgtctctattatcttgtgctaaccgccatttaaaacaacaatg

SEQ ID NO: 5885 - DNA, 3000 bp, Unknown
  misc_feature (1)..( 3000): cDNA_ID_1989641_gDNA_ID_1620823_Annot_ID_169593 3000 nt of promoter + ATG
atcagaaaaggtactaaataacaaaatctgttattgtcaaatcaaaaacgaatggcaaaacacaagttctgtatctaatacattttctttcaaacaaataacaaatactagaaatatgattttaaaatgtgacaaaaaaaaaaagaaatatgattttaaaacaatttgtttttataaaaaaatggtaagcaagttgatgaataaatcagtcaagctcatcgacgaacgtggcatgatctcgtaatagacattcgtcacgtggcgtttagctatttgatcaaaacatgtcagacaaagtgggtcctgcattttgtacgattcatctcaaaaggtgatatcgagtctcacatctccaatcctgaccgttggtttataactcttattagacgactttcaataaaaactttaggtgggtccctcgtttttagggttgtactgtcaccacctttcagtttcagtgaacgctgcacgaattttaactacaattagacgactatttacatttcgatccataactattttattatcatattttagacactcaagtttttaaattgccaattattcgctctttcggattttttgtggatttgagatgatccctgcttcaatggaggaagctcaccagctggagtcgagatccgatgacctaagtcaacggagaagctactggagatggaggaagcaggattttttcccggaattctcttttcagagcttctctacctacaaatcagctctctccgccacttgtccacgcctcgccgatcgtcttctctctcgctcttccgatgcgtacgagctcgatgcagcccgccgcgaaagcgagaaccctatgcgtcgttgtctcacttggtgggacttgctctggcttagctttggttctgttgttggttcgggtgtgttcgtgatcacgggtcaggaggctcgagttggagctggtcctgctgttgttctctcctacgctatctctggtgtctctgcattgctctcagttctctgttatgctgagtttggagttgagattcctgtcgctggaggttctttctcttatcttagggttgaattgggggattttattgcctttattgctgctgggaatattcttcttgaggctatggttggtgctgctggattagggaggtcatggtcttcgtatctagctagtttggtcaagaatgattctgattattttcggattaaagtcgattcctttgctaaagggtttgatcttttggatccggttgctgttgcagtgcttttagttgctaatggtattgccatgactggaacaaagaggacttcttggttgaatttgattacttccatggtcactgtttgtattattgtgtttatcgtcgttgtggggtttactcattcaaaaacctcaaatttggttccttttttcccttatggagcgaaaggtgtggtgcaatctgctgcagttgtctactggtcatacactggttttgatatggtggctaacatggctgaagaaaccgagaaaccttccagagatattccaattggtttggttggttcgatgtctatgatcactgtggtttactgtttgatggctctggccttgactatgatggtgaaatacactgaaattgatgcgaatgcagcttattctgttgcttttgctcagattgggatgaaatgggcgaagtacttggttggtatatgcgctttaaagggaatgaccacaagcctgcttgttggctctctaggccaagctcggtacaccactcagattgctcggtctcatatgattcctccatggtttgctttggttcatccaaaaacaggaacccctatttatgctactctccttgtaaccatactcagttcaataatatccttcttcaccagcttagaggttttatcaagcgttttctcctttgctaccctcttcattttcatgctcgtggcagtagcattgcttgtgagacgttactacgtgaaggatgtcactcctgaggccggtttgttgaagtttcttggttttctgtttttgataattgcttcctccattggagtatcagcgctttggaactcaggcgttaaaggttggatcgcttacacagtgactggagttatttggtttataggcactttagggttggcattgcttccgaaatatcgtgttcctaaggtatggggagtcccactagttccgtggttgccatcgttttcaatcgccatgaatctattccttatcggatcactcggttatgtagcattcttgagattcattatctgcaccatggtgatgcttttgtactacctattcgttggtcttcatgcaacctatgatgtagctcatcagcctttggaggaagcaaagtttgagggagagagataaaagaatcgatcgtaacacttcactacgtttggtaaattgtataaattcccttgttttctgatgtgatttcaatattcttctattaaaatgtacaataatactatcgatcttgttttcgtgttttctcattcttttcatttttcaatgttgaaacttattaacttgttgaactctgttgtatttgtttctatcttggaaatttaaaattggagttgaataaggtgttctcagttctcacacctttttatttagctactttgtgattattatactttaatgacccgagctaccggtaacccgaatgcacgacccggttaacttcacccaaaattgaatacaacatgataactcaagcccaaaaaagcccatttaaccgatttataaaagcggtgcttcagacagatatgtgttataaggagaagccgaggttaaaatccaaagcgtaaaatcatagcgagaaatttccttattcctgtgattttgctgagaagaagaagaatctcgaggaggaagaagaaacaggcgacatgggagaacggaaggtgctaaacaagtattatccgccggacttcgatcctgcgaagcttcaacggctccggcggccgaagaaccagcagatcaaggttcgtatg

SEQ ID NO: 5886 - DNA, 3000 bp, Unknown
  misc_feature (1)..( 3000): cDNA_ID_3078805_gDNA_ID_1620823_Annot_ID_169589 3000 nt of promoter + ATG
cgttatcttgctgtatgaagattttagaaagaatttgtttttttttagaaaaaaaaatatcaaggaaaaaaaaaatcaactactaaaacctgtatacagtttatttttagtttgcatataatataaaaaaaaacacttatatagttatatacatatcaaggaatctataatacaaaaatcgaaatatgcttatataccaatgctgaggaatcatttttttgttactgagtaacgtagtcacatagactccaaatttcttatttcttatagtattctaaagatatcaaaacctgttctgcatatgtaaattatgtatgcatcttaggctggtttcacgttatgtaatgtgattccaatattccatcaaataaggcgtgctttgacccattacactatataatactgattctttcgatcgatattaaataaaggtcacataataataacaaaagcccatttattatttggtccgtcaaggctgcttgaatgttaacggtcaaacctgtctcacccgtacaagaatctcgtcaaagaccaatacaataaaattgaaaagaccacaaaataatttccttatggtcaaggaacatacaaatgaacataaaaacatctaacaaactagtgtaaaaataaaataaaaaaactatcagatttgtctatcaataattaatgaaaaatattggtgaaacgttgcaaaaaataaaccccacatgtgtatagaaattcttgaaataagtgacaatctccagtttcagttgaccccgtcgttacaaaaactctaaaatagattttattatatgcaacgtttgattagttttttttttggtaaaaaacgtttgattagttgattctaatttctttaaatagtggaaaatttgagccactccctgatatctaatcagtatataattagtcattagtcatgaaagcatatgatcgtaactccacacgtaagcaatttctagaatcaaaatatcattcgatctatataataatattcttttccaatccacaactatggatatagaatataaatgctatatcaataaaagaatctgctctcttatccatatagttcataatactaattaggagtccccatgataataaatgtttctaaacaataactaaaaatcaataaaatgataaaagttcggtctccccacaaatattatatatattcccatatatttatctacacatataaatacaaccaatatcggggagattcaaaaggcatactactcaatagagcaaaccaaaagaaaaaatctcatataacgccaaaaatatgtctgcaggagtgagatctgaaccgatgaaggttgtcttcattaacacacagtacgttcagacagatgctcggagcttcaagacaattgttcaagaactcacaggtaaaaacgcagtcgtcgccgacggtccttatgaattctccggtcaagggtacggtggcaaagattcatcacagcggttttgtggcgtaggaaaagaagcagaaagaggtgtagagacgacggagttcgatagttttttcagagagatgcctccggtcggcgaattgtataatctttggtcagaccattgactagactaataattcgttcttttttttcccacaatattaaggcccattgggtttaatattattatctcaagcctatgtgaaacacgaatgttccttagaaggtgaacttctttttttttgcttaatgcattaatgtattatactagattttaacctgcggtataccgcggagacaatttatttccttaaagttagtatatataaaagtttacaaattttatctatctataaaatatttttattttatagtttacaattgttattaagtagcttcctgccaaacccgtcccgccaacccgtctcgtaaaaaaaactatttattttattaatgttgatcttatttatgatatgtttatgaatcattgtctaaatattttgtaattttgtagtaattaattgctatcaaatatctttacggtttgctgcttataatcgaattgttatagtcataaaaaaagcaatatcaaaaatgataattttgtagtatttaaatgatattaaatattttggaaattttattttagtaattaatggtatagttaatgcagagagattttagaaaggtagttaaatgcaaacatttaattcgaagatttactttctaattatcaaaaacaattattaaatgccagtggtagccactgtaaataagtctcaacttgaaaatttatttcacaaagtggctgcaaaaatgtatatgtagattatctttcacttttttaaaaaagacaatcaataaaatcattagtagcatagtttgtttattttttttgaaagttttttttcgacccttatattattttttgaaataaatatttgcaacaataatagtctatcagattttacgacaaaatatcagaaggaacaaaaaaaaaaagaagaagcgtggagaaagttaacgcgcgagaggggcgcgtgacgataaagaagaggaagagtgaaaacaaaagagatgacgacgattcatttctttcgtatccgactaactccaccgtttcgttcttcgttcttcatcggatctttcttcttcacgacgacaacattactgtatatctctttcgcaaaggaaaagttctgatctttgtattctcttatcattcgttatctaagtctcttcgattctcgaagcttttaaggtttcttctctgactcaaactttattactcatttatattcaaagggtttgcaaattttcttctgtttgaaaagatttgttgcttcaattcttatcaacggttggaatttagggttttaaactttgtttgttagtttcggaaaaaaggaaatggctttggattgctacaagctctttattgcgttttgtgaattgtagaaagtgaaattgatttctatttgagtgttcttattatgtctctctactatcttaatttcaaggcatttaaagagacgaa

SEQ ID NO: 5887 - DNA, 3000 bp, Unknown; identical to SEQ ID NO: 5876
  misc_feature (1)..( 3000): cDNA_ID_1989646_gDNA_ID_1620823_Annot_ID_169584 3000 nt of promoter + ATG

SEQ ID NO: 5888 - DNA, 3000 bp, Unknown; identical to SEQ ID NO: 5874
  misc_feature (1)..( 3000): cDNA_ID_1988782_gDNA_ID_1620823_Annot_ID_169583 3000 nt of promoter + ATG

SEQ ID NO: 5889 - DNA, 3000 bp, Unknown; identical to SEQ ID NO: 5883
  misc_feature (1)..( 3000): cDNA_ID_1989647_gDNA_ID_1620823_Annot_ID_169580 3000 nt of promoter + ATG

SEQ ID NO: 5890 - DNA, 3000 bp, Unknown
  misc_feature (1)..( 3000): cDNA_ID_2993403_gDNA_ID_1620823_Annot_ID_169579 3000 nt of promoter + ATG
gttcgggatgaggacgaagatggctttggctgagaaaggagtcaagtatgagtacaaggaaacagatccatgggttaagactcctttactcatagagatgaacccgattcacaagaagattccggttctcatccacaacggtaaaccgatttgtgaatctcttattcagcttgagtacattgatgaggtttggtccgatgcatccccaatccttccctctgatccttaccagaagtctcgagctagattttgggctgaattcatcgacaaaaaggtaaacaactcgcttttttttttgtttactaaaaagttgtatagttttttaatttgagatccggaatagttagttagggttttagatgaagttaatttattgggagttattggtataacatgaagaaaaaactatacaacttttaaaatgttcaacaatcaaaattaggctcacgtatttttcaatgatttatgacataatcaaaattaggctcacgtactttcaatgatttatgactttgatgatttttggttggttcagttttacgacccatcatggaaggtatgggcaacaatgggcgaagaacatgcagcagtgaagaaggaattgttggaacatttcaagacacttgagacagagctcggagacaaaccttattacggtggtgaagtatttggatacctagacattgcattaatgggatactacagctggttcaaggccatggagaaatttggtgaattcagtatcgaaacagagtttcctatattgactacgtggaccaagaggtgtttggaaagagagagtgtggtcaaggcattggctgattctgataggatcattgagtatgtttatgtcctgaggaagaaatttggagcagcgtaaaaaaatggtttgggtttcaagaaggctgttattttctgtcttttataatgtttcatgtgaggtttgtaattgttatttctgtcgttttgttgaaagtatgataaaccgtaataacgaaatgtttactgtaccctattaaattcgacgacattgcactcaatttgaataaaccggattagcttcagtaaaccatccggtttaatcgaagagtcgtttcagttcacgaaccgtacatattaattccgaggacttgttcttcctgatatcaattatatcaacatcatctgacatgacatcttataacaaatgattgatctattttcaattacaaatacaatatgtagttggacttaatataactaatgattaacttactctttttgttgtttataatagagatatttaataatctataacaaatcaatccagtaatatatggaattcttgtgtctttcatgatttatcgttaattgtggagctatgaatcaaattcgaaagaaatgttacaatatacctctagattgagactggccacgagactgagaacacttatctatcttgtatttttatttttggttttatatttttgtcaaatttatttttgcttttatcttacgaggcagtttaagtttaaacattaacaaacaaaaacaaaacaataaaattatggtcaatgtaattacacatatatatatatatgtataatcttgcgtaaagatatggtttgattgatccaacacttaaacaaaacctttaatatgcgttgctaagctgtcccttatcataatccctatcaaattcatcattcatattttttagttcctctattatttatttatttaagggtaaattaggaaaaagtctcctattaattgacaaaggcaattgaattcataattacgaaagaacctatcaacgttattttcgtcgctaattatagtaacctgaattttttgatgacgttattatgatcacgtggagctcggaggaactcaataaataatgtacaataactgatttatacttgtctcagtatacggatataagatatttttccaaaacaatgaaagtacacgttgccttgccagttgcctgcatatatatacacatcgtctagtagataccattacagtatattgttgttgaggttttataaattgtgtaatgattttgtataaattaaagaaacatatctccaggcatctcataattacgaaatcacgtttaactttataaaatattattaataccacaagatttgaaagtatttttaacaaatcataatttgaatcatatgtgaaattttgcagccaagagcattcatatttgatctaccagaatgtcataatgatcaaatttcatatttgatccgccaagaccctgagcattcatttgatccaccaaattaaaaagtcctagtggattataacttagaattatttacttttattaaatcaactaatctatgaaccactcaaccacatactacattataagaaagaaaacgtaagtagccaaactaatactctatacatttattatataagacgaaacaagatatatccattctcgaccacgacattggattagcttaaagttatttttagtatcctataaacagtaccgtaaacggagcaatcttgcaaatcatttgcttcaagttcaaaaacctatctagggttctctggtggagatgtgctaactgattttctaacttgagtttagtatagtaatttttgttttttttttcgtattttaagatttgaactgaaggatttagaaaagaaatgattccaatcttgagtatagagagagaccttcatacggagtatattacaatgaattataatctagattgtagtggagtgatcaatattttgctttttagcggggagttatcattttcgaaggctttaaatgtttttttttgcttgggaaatgtgaggagtgtcatgaatatcgaaattaaatgcattcaccaaccctatcgatccaacacttccctttagttaatgtcacacattaaaatcatatccacttgtttataaccacattttctctcaaaatccataaaaagagagagagataaataaagagaaaactaaagaagctagaagatg

SEQ ID NO: 5891 - DNA, 3000 bp, Unknown
  misc_feature (1)..( 3000): cDNA_ID_1989648_gDNA_ID_1620823_Annot_ID_169578 3000 nt of promoter + ATG
ctttgcgtgagctattgcttcatttgtttgaggacgaattccatcatcagcagcaaccacaatgattgcaatgtcagtgactcgtgctccgcgagctctcattgcaccaaatgcctagatgaggacataaaagtaagatgagtaaaactatggtatgcctagcaatagatgtgagatagtcaataaacatgctacatgtaagaaagctcatgaagtataattaatgatacttcagcatcagaaatgaacatgcgaagattcaattgcaagaaaaagaatctacctcatgtccaggagtatcaaggaaaacgcaggactgcaactttccatcaacaggcactgacaccttatatgcaccaattccttgtgtaattcctcctgcttctgacgcagcaacctgcatgtatccagcgaagggagattagctgacaacgctacttagcactaatcttgacaataagcaaatgaacaaacattaattgccagtagccatgctttagaaatgataagaaactgaagaggccacaatgaaatttcttaaataataaaaggcaaattaatagctaatctcatccataccttgctttttctgatatagtcgagaagagtggtctgcaaaataggcagcaaatgcattaggaacaacctactgctaaaaaataggactctatatatccttttaagggcgagtaggacatgagaacaaaaaaaaggcaatgcaaactgtgcctacctttccatggtccacatgacccattatcgttatgacaggaggtctgtcctctaacttgtccaaatcttcttcatcaaaagtttgccttttctttgccatctcttctactttaactgaatcagcatcaaggacctcaacatcgtaatctctacaaatcatcttcaccatctcgcggtccaaagtgtgcacaccatcaggtctaatcccttttgaatataggtacccaaggatgtcaccttctccgatggctaggttgtaagccaaatcctcgatggacatgccttcttcctctacctctaagatttcagctttgacaggtgctgcgtcttttgcagcctggagtcttacagccttcctactagctttactccattttctcccttttctacctgatcgagaaatggatgcatcatcgtcgccgtcgtcttcagcaacaattcttcgtcttggactagctgatgcattttttttattacggtgctcaactctgaacttgttagagggaggaccctttccaggcttagtaggagctaacacagcctgagaggccgcaggatcaacaccttttttcttcgaagcaaatttgtcaaccaaaataggcttcctttctttacttttaacgctagaatcaacttcttcagaaactaaaggttttgctgccataccaagatcttttaagatgggtgatttctttacgggtggagctaccataggcttcccttgtaacattggctggggtcttacaggcggttgaggtctaaaaggtggctgaggtggtgccaatggagtgcctgctttggcattcacctctccctcttctctcgttctaggttcggtctgcactcctctattaaaaattttaggtgattccttaacaactttttgcacagcagcaacagcatcgcccttacgccacacactcttcatggttttcgtcttccttgttcctccatcactcgcattcgcatagctaccatttcttgagttactactgttggcactaggctgtgacggcttaacagcctcaccaccctctttgttacccggtttcggaatttccaacttctcagctttatctaaaacttcaccaagagattcaataaccttattcctctcttcttctccatcaaacttacccccattcgacaaatctttactccaaggagcagtattcacccccaaacctctttctacccttgccacagggggtttcaagacaggtttaggagtctgcttcagcacaacctcactatcatccccatctttactccccctaaacgagttagaatctatagaaactgagttgttgttttggtcagcaatgaagtcagcagtagtagtagtagttgaagacgaaacagaatatctacacagccatttcttagtccccttaacacttctccttgacaaagaaaccctcttaactaaagcatacgatgcatccgaagaactcgttccagaaacgcttgcacaagcaccacctagactaaccagagaagccaaggacggcattgtgccgacgagaacaagcatcgatggcatctcaaaaaaaacagaaaacgaataaaacaaagcgatagcaaattcagagactttatctcattccaattgcaacgaatttcgaaccagaaatgacataaaaacttcaactttgtaaagaaattggggttatcgacgaatcaaatccgaaagcatgaagctgaattgagaatcgatgagcaatttagatatatggtgagagaaagagagagaggaagaagaagataagtgaaggaggaagaagaagaagagagtgcggagataactttgaacttgagcttgtgtgggtgtggctgcttctatgcctggaattttcgcggatttccgataaggccaacttacaaaattaaaattaaaatccataaatattttagctaacaaaaaaaaaaaacacttttgtttgtctgaaaagtaaggctattgggctcgtctctaaagcccatttataaaatcagacccggaaacttctgcgtgatagacacacgtggctacatttaagccgtatattgtaaatataggggcaaattcgtcattaacaaattaaaagtatttaatattatcgataagtaacagagcatttaatactaaatttaataaatattaaataacgtcaagagagagatttgtcatttgagacctcaagatttctctttctattgcctactctctgttgaaaaagtgaagaaggcccgatatagagagagagtgtgtgtcgttgacgaaggagg

SEQ ID NO: 5892 - DNA, 3000 bp, Unknown
  misc_feature (1)..( 3000): cDNA_ID_2042114_gDNA_ID_1620823_Annot_ID_169577 3000 nt of promoter + ATG
ccattgattccacttgttgcgctagtgccacgtgtcactcccattttcttactcgtttcaggaagattggcatttatagcagcaaacggaaccggccgagaagtggtcatgaaatcacaaattctgacggttacaccacataaactacaatccagtaaaggtaatctggattctgacttatattctggacccaaaacttcataatttccagaggcttttcgggatgaagccgagaattgtttcctgcttggaccaggatcttgcagacgactttgatttctagccggtccagaagggcacccatttctagctgattgggcagaatgttcttcacaatcttggatatttggaagccatctaggctcccatccacataggcttatcagcttttgagcctacaagataaaacataaattaagaaacaatagtagtttatggctagtaagtttgatattcctgaatcctgagttcttacgcgagagtaattactgaaagcctcttctttgtacgtttctgcagctgatatattgtccattctgaaactgagatcatcattggcatgtgccaaaaggcggtcaatttgtggtcgtcttgaagcacgcatctggtcaattgcagatggcgaaacaattggtagagaatagaattgtaggagcccatcacaacgatccttgtaacctccaatcaaggctgatggaggagttggaggaaactgaactaagctttctgaacaactttttcctacccaaggacaagagctctcatgtgcatcatcaagctgcttagagaatttttctccggtggtatcagctgctcatcaaagatggatgaggaatataaaatgttagcagcatataacgaggctgattcatgaataatgatcttttgtgcttaaatgacagcgaaatagttaaaatctttcattgtagatgttggtaaactgaccaaaactcttggctcttaagatactcataaagagtgtcagatactatctttttccgtacagtataagagaaagatgaatacttaaatgttaagaagacgaatacttaaatgatatccccccaccccttgattccaagaagaaaaagaagataagttaggttacagtaacaagaactgaccttcgggaggattcaacgaatcttgtggaggggagtattgtagaatggacccacagtattcacattgaagtttgtccagatcaacactaacccagcctttctgagcacaagccaaagaactagctgtctgtaaacagagattaccaaagcaggacacccctttaatcaaacagcatttcattgaaccagttgaaacttgcaacaaatatcaaaggagatagaaaggaccaatccaaagtagagaaagaataaaaagtaataagcccacaaatgagataacctagctattcttcctcatgtttccattccaggttatctttaatacatcagtccctcagattgaattctgaatataaaggaccattaaatatactgttggattcacctatagcaaatttatttgagccaaaaaagaactacaggaggatatttgccaagtttatcaatcagcattcagtccaaattttgtttttcgcatcactaaattcactagctctaggataactggactttttgctaggatatgcactacggattttccaaagaaatatagtttgctgagagtggaaaaatgaatttgcatgtgaaagagcaaataacgagaaaacaagagtcatactttgggcttcccaagccaatttgaaggcttgaaagtggcaagacgtcgaagtaaatctcctctatcccatgttctacacgaacgcactgataatgccagtccatgacctgtccagtcaacactgccagcgtttaccagaacagctggagatgatgcccctgcagagctgcacattgattcaattgaattcaatcgtcgatatccaaaagagcaaaacttacagaaaactaaaagcaccgcaagcaaaattaagatgcaaatctcaaacaacgaaccctagatatatctcgtctcagctcaaattcaacaaatcgaattcaaactaactcataatttcacacttctgaaactcgatctgcgttaaaatggggacgaacctagcagcagcagtttgaggaggagaaggcgatctagcacgtcgtcggaacctatcaacgggagtagcagaggcggaagcagaagctgaggctacactgttccgattacttctagggtttacgttctgcgagctcacatcctcttccttcatcctccttcgtcaacgacacacactctctctctatatcgggccttcttcactttttcaacagagagtaggcaatagaaagagaaatcttgaggtctcaaatgacaaatctctctcttgacgttatttaatatttattaaatttagtattaaatgctctgttacttatcgataatattaaatacttttaatttgttaatgacgaatttgcccctatatttacaatatacggcttaaatgtagccacgtgtgtctatcacgcagaagtttccgggtctgattttataaatgggctttagagacgagcccaatagccttacttttcagacaaacaaaagtgttttttttttttgttagctaaaatatttatggattttaattttaattttgtaagttggccttatcggaaatccgcgaaaattccaggcatagaagcagccacacccacacaagctcaagttcaaagttatctccgcactctcttcttcttcttcctccttcacttatcttcttcttcctctctctctttctctcaccatatatctaaattgctcatcgattctcaattcagcttcatgctttcggatttgattcgtcgataaccccaatttctttacaaagttgaagtttttatgtcatttctggttcgaaattcgttgcaattggaatgagataaagtctctgaatttgctatcgctttgttttattcgttttctgttttttttgagatg

SEQ ID NO: 5893 - DNA, 3000 bp, Unknown; identical to SEQ ID NO: 5877
  misc_feature (1)..( 3000): cDNA_ID_3078784_gDNA_ID_1620823_Annot_ID_169606 3000 nt of promoter + ATG

SEQ ID NO: 5894 - DNA, 3000 bp, Unknown
  misc_feature (1)..( 3000): cDNA_ID_3078792_gDNA_ID_1620823_Annot_ID_169604 3000 nt of promoter + ATG
tgcaggttgtggcttctctactgtatgctgatagtgggacgcatgttgagaagaggagtgactttgaggcattccttttagtaagctatgaaggcattgaattatctgctgaagataaaccgtgcaacttattgaacggatgtgcttctttcaagttcaaattatctcaggtggtgattataaatctaggccatcggaatgggatttcacattcttgttagaatttttttgtctatgctaaaaggcattgaaggatccttgttttcttttgttttgtagctttcttccaagagtgataagaggttgttctgcatcaaattcgaaataccagaagtgaaggccaattatcctttcctcgaaactgtcaccaaccaaatccgttgcatttcgagaaaccgtgattctgtttcctctatgaaacggatcagattaggagaagaaaaggtttctgagagtaaggtggataatccaatttctctgagttacgttttgttttgctttgtatccatatcccacttactgttattctgcattgttgttgctctcgagttagattgtgaatggaaatggtacgagtatggaatggaggcctcagaaccacgaagaagataactcttcaactgattccgaaaacactgaaatgagagactcgactgctttcaggagatattcaatcccagactggattattttcaaatactgccttggaaacttaacagagagagctcttcttctgaaggaaatcacaaacaattcatcagacgaagaagtctcggaatttgcagatcaagtttctctctattccggatgctcccaccacgggtaaagaaatcaaattaaactcacacctgcctcaaataaaatagaacactaatcttccaaattttccagctatcaaatcaaaatggcaagaaaactgatagcagaaggaacaaatgcgtggaatctgatctctcggaactatcgacatgttcattgggacaatgtggtaattgagattgaagaacatttcatgagaatagctaaatgcagcagtagatctctcactcaccaggtcttgtctctttctcttctcatattgcttgaactttcaccaagatcaaagtcttgatcttttgtatttgtgattctgacatgaaattgtaatcaggattttgaccttctaagaaggatatgtggatgctatgaatacataactcaagagaattttgagacaatgtggtgttggttgttccctgttgcttcggctgtatcaagggggttgattaatggaatgtggcgctctgcttcgcctaaatggatagaagggtttgtgactaaagaagaggcagaacgttcgcttcagaatcaagtaccgggcactttcattctcaggttccctacttcaagaagctggccacatcctgacgctggttccgtggttgtgacttatgtcggccatgatttagttattcatcatagattactcacaatcaaccacatctgcgagtaagtaaacctctttatctcctttttttttcccctcagtgtctgtcttgtgacaattgtttttgtttttagttctagtgaaaggtatacagatgcaaaacagttgcaagatatgcttttggcggaacctgagctatctcggcttggaaggtgagtgaggaagtgaaaaaatttagtttttgttgaagcaaagagagatcaaattgaagatcttaaattgcttattttatttattttggtttttgttgcatttttcaggattataagaggcatctgaatctaatcaacagactcaactcaacaaagtagagaagcatcgactgttattgaggtttattgtacagatagatttgctaagtctaagtattaactgatactaacttttgtaaagctcagtgatttaaattaggtggaaaggatttttattgtaagacttaagtatatttgtttatctaaaatcaattaccgacaagaaagaaaggagttgcgatttttgcttcttctgctcagtttttatatttgtgtggcccatttatgttccaactacatatttgcttggtccctaatcccttattagaggttaattatggtaatgttttttttaccaagaaataaataaaataattatggtaatgtttttctttcatatttttgttttgttatgtactaattaaatttaaaagctcttagaaaatttattcaaccatttttgttaatcttctcatatatgatgacttattgtgattggtaatacatggaatgagaataatatacagaaattgtaaattaagtcataacagtattattttgattcacaatggagttggagaaatgaattatcaatataaaaaatcatggtttcacgtaatttgatgatttgtttttaaaatactccctagagcctaattattgtaggtaaaaaacttattagtataaaatttgtgagatctggattaatgatattataattgtcttgaaaccagaaaaatggatattctctaatctcaaaatatttgatacgagttagatgacggaccaatcggtaggaaacacgtggtgacatttcagcttctgattacaacgatggacttttttttccctctctctctaatttgtatattgaattaaaaaagaaaacggacacacacacacacacacaaatctgaaatctctctcgtccgccaaaggtcgagttttgagagcgagttcttacttctgatgtggttttgtctcgtccacccaaagaaaatcaacacaaaaaaaaaaagggatcgattcacaaacttataaatttcttgtcttttttattttttatttttctgaaaatttgccatacacacacccaatctctctctcgtcagccaaaaagaaaaaaacttaacattggactctcagtttccgaagattcttctctttggactctcagtttctgaaacttattattagccgtctttttttggtttgggtttgcctaaaagttgtcgtcacttgtggattttggtctgagaaatg

SEQ ID NO: 5895 - DNA, 3000 bp, Unknown; identical to SEQ ID NO: 5880
  misc_feature (1)..( 3000): cDNA_ID_3078796_gDNA_ID_1620823_Annot_ID_169603 3000 nt of promoter + ATG

SEQ ID NO: 5896 - DNA, 3000 bp, Unknown; identical to SEQ ID NO: 5881
  misc_feature (1)..( 3000): cDNA_ID_3443592_gDNA_ID_1620823_Annot_ID_169598 3000 nt of promoter + ATG

SEQ ID NO: 5897 - DNA, 3000 bp, Unknown
  misc_feature (1)..( 3000): cDNA_ID_2042114_gDNA_ID_1620823_Annot_ID_57828 3000 nt of promoter + ATG
cgtgtcactcccattttcttactcgtttcaggaagattggcatttatagcagcaaacggaaccggccgagaagtggtcatgaaatcacaaattctgacggttacaccacataaactacaatccagtaaaggtaatctggattctgacttatattctggacccaaaacttcataatttccagaggcttttcgggatgaagccgagaattgtttcctgcttggaccaggatcttgcagacgactttgatttctagccggtccagaagggcacccatttctagctgattgggcagaatgttcttcacaatcttggatatttggaagccatctaggctcccatccacataggcttatcagcttttgagcctacaagataaaacataaattaagaaacaatagtagtttatggctagtaagtttgatattcctgaatcctgagttcttacgcgagagtaattactgaaagcctcttctttgtacgtttctgcagctgatatattgtccattctgaaactgagatcatcattggcatgtgccaaaaggcggtcaatttgtggtcgtcttgaagcacgcatctggtcaattgcagatggcgaaacaattggtagagaatagaattgtaggagcccatcacaacgatccttgtaacctccaatcaaggctgatggaggagttggaggaaactgaactaagctttctgaacaactttttcctacccaaggacaagagctctcatgtgcatcatcaagctgcttagagaatttttctccggtggtatcagctgctcatcaaagatggatgaggaatataaaatgttagcagcatataacgaggctgattcatgaataatgatcttttgtgcttaaatgacagcgaaatagttaaaatctttcattgtagatgttggtaaactgaccaaaactcttggctcttaagatactcataaagagtgtcagatactatctttttccgtacagtataagagaaagatgaatacttaaatgttaagaagacgaatacttaaatgatatccccccaccccttgattccaagaagaaaaagaagataagttaggttacagtaacaagaactgaccttcgggaggattcaacgaatcttgtggaggggagtattgtagaatggacccacagtattcacattgaagtttgtccagatcaacactaacccagcctttctgagcacaagccaaagaactagctgtctgtaaacagagattaccaaagcaggacacccctttaatcaaacagcatttcattgaaccagttgaaacttgcaacaaatatcaaaggagatagaaaggaccaatccaaagtagagaaagaataaaaagtaataagcccacaaatgagataacctagctattcttcctcatgtttccattccaggttatctttaatacatcagtccctcagattgaattctgaatataaaggaccattaaatatactgttggattcacctatagcaaatttatttgagccaaaaaagaactacaggaggatatttgccaagtttatcaatcagcattcagtccaaattttgtttttcgcatcactaaattcactagctctaggataactggactttttgctaggatatgcactacggattttccaaagaaatatagtttgctgagagtggaaaaatgaatttgcatgtgaaagagcaaataacgagaaaacaagagtcatactttgggcttcccaagccaatttgaaggcttgaaagtggcaagacgtcgaagtaaatctcctctatcccatgttctacacgaacgcactgataatgccagtccatgacctgtccagtcaacactgccagcgtttaccagaacagctggagatgatgcccctgcagagctgcacattgattcaattgaattcaatcgtcgatatccaaaagagcaaaacttacagaaaactaaaagcaccgcaagcaaaattaagatgcaaatctcaaacaacgaaccctagatatatctcgtctcagctcaaattcaacaaatcgaattcaaactaactcataatttcacacttctgaaactcgatctgcgttaaaatggggacgaacctagcagcagcagtttgaggaggagaaggcgatctagcacgtcgtcggaacctatcaacgggagtagcagaggcggaagcagaagctgaggctacactgttccgattacttctagggtttacgttctgcgagctcacatcctcttccttcatcctccttcgtcaacgacacacactctctctctatatcgggccttcttcactttttcaacagagagtaggcaatagaaagagaaatcttgaggtctcaaatgacaaatctctctcttgacgttatttaatatttattaaatttagtattaaatgctctgttacttatcgataatattaaatacttttaatttgttaatgacgaatttgcccctatatttacaatatacggcttaaatgtagccacgtgtgtctatcacgcagaagtttccgggtctgattttataaatgggctttagagacgagcccaatagccttacttttcagacaaacaaaagtgttttttttttttgttagctaaaatatttatggattttaattttaattttgtaagttggccttatcggaaatccgcgaaaattccaggcatagaagcagccacacccacacaagctcaagttcaaagttatctccgcactctcttcttcttcttcctccttcacttatcttcttcttcctctctctctttctctcaccatatatctaaattgctcatcgattctcaattcagcttcatgctttcggatttgattcgtcgataaccccaatttctttacaaagttgaagtttttatgtcatttctggttcgaaattcgttgcaattggaatgagataaagtctctgaatttgctatcgctttgttttattcgttttctgttttttttgagatgccatcgatgcttgttctcgtcggcacaatg

SEQ ID NO: 5898 - DNA, 3000 bp, Unknown; identical to SEQ ID NO: 5890
  misc_feature (1)..( 3000): cDNA_ID_2993403_gDNA_ID_1620823_Annot_ID_57830 3000 nt of promoter + ATG

SEQ ID NO: 5899 - DNA, 3000 bp, Unknown; identical to SEQ ID NO: 5891
  misc_feature (1)..( 3000): cDNA_ID_1989648_gDNA_ID_1620823_Annot_ID_57829 3000 nt of promoter + ATG

SEQ ID NO: 5900 - DNA, 3000 bp, Unknown
  misc_feature (1)..( 3000): cDNA_ID_1817193_gDNA_ID_1620824_Annot_ID_169620 3000 nt of promoter + ATG
gacaatggaaattgcaagtgtcttacgttacaacttacaagcgatggataccaaaagagtcgacgtgaatcacataggggaatgtaacacagaccttgagtgccaaagcatgcgtagttgtgacaaggtcgatgatcgatactgtgaaagcggaatttgcaagtgtctatcgttaccaagcgatgaatacaaaaagcatcgatgtgaatcatggagggatcagggatacgtgacacataccttgagtgtggaagtatgctattctttgactatcgtcgggcgtgttgcgtaaatggaaaatgcgtgtgtcgcaaacagagccaatttgtgcccaattgcccaaaataaattatgctaaaaatttctttgtaactgactgcaatgaaccctagttatgttctatcatgcctccaatatttaatttgctaaaataacttattattaagcactttgaatcgaggacaaccttctaataaaattagatgcttaaaattttaagaatttgtcttatttcatcattcattataaattaaatcactttttaactattatcaaacttttgttttatgttctttttcattattttatcatcgaattatgtcatgtttttgtcttttaagtaaaaaattaatgataataacatatttatagatgaaaatggatcgatgaaatccttgatttcaggtctatggattcagatatgttaaatttaaggtaaagctatccaaatcctgaattcgatatgtgatcttaacaaaatttaaaaacttgaaaaatcaataatttcgtaagggatggtttttaccggttcgccggttttcactggttttaagaattcatatgttcaaacttatgtttttcatgataaacatgaccggtcaagggtctcactcgcggttcgatgggctcaaaccggtcgatccgtatcggttaacagtttattttttcccttcaattatatactttgtttagattaatatttaggatggaataagatcctggcttcgtggcttgtagtgctgattaaaaatcactgataaccaatgcaacgccggttcgatacttcacaaaatttagggttctttaaaaaattcataaactccaattcgcctccttctctctttctcgatcctctcaaaatctctccaccaccaatgaagcgacgacgccgtaactccaaacttaaattcgaagaaacctccgaccaatcaccgacatccacggcagagttctccttctctctcaccaaaatcgccgtcagccaaatctgccaatctattggatacaaagccaccgatgcctccgctctcaacactctaaccctaaccaccaccaaattcttacaatccctcgccgaactcgcatcgtcgttctctaacaccgctaatcgcacggaggttaatctcttcgacatcgtcaatggtctccaagatatcgctttatctacttccgattgtttccccggtggctctacggttcacgatattgaatctcagtgcctgatcaaatccgctgttctccgtaacctctccgatttcgttacctacgctcctgagattcctttcgctaaaccgttaccgagacgggaaagagacggatcgttcggaggagatttggatcacgtggcggtgactcgatcggtggatgtgacgtcagttccagcttggcttccgccttttcctgactctagtctctgctccgatcgttgttcaaaggataatagatctgatcacttgtgggaaaactctgattccgttattcgccgtgaaattttgccggagagtttgaaatctaaaagcggaggaagattaccggtaatgagagataaagtgagattcaagatggaacaacgagattggagtagtggtggtgatacgagattggagcggtcgcgggacaataacaatggcgaatctggccgtgatcttgaggttaagaagaaaattagagaaggatacacttactgtgccggcgagtggccgttttagtctattctgatgacgtggaaaaaaacaaaatcgcgaggtttaagatggattcgaacccgcgaggcttgagtatatgtgtgattggccaattggaatctaccgcacgagctgcttctctgatagtttcggtgctccaattgtttattttataaagccattactctaaggatttactttatttctttctatgggattattttaaaaattgaaatagaaaaatggttgaacctgttcgactttactcaatgttaacttggttagtccattgaaccatcgtacaagtgatgaagtaaacaacggattcgtctcacaaatagaggtttgttcatgaatataatgcttgtgggtgaagtgtggttcttttggaaactagaatgagaactcattggatgagttatatctcaaagaattggggaaagctatgtatgtaattgtttgtttcatttttattttctcaaaataatgcaaactataggttggtggattaaaaaatgttagaaaaactaaaatgtcatgttgttattcttttcaccaaatttcatgtattcagtatttatatgaaaaaagctttttaagcaacttgactctagtgtggcttgtatagacacatgtatgcagtctttttcttaacattatttttcattaagatctaaatgaatctcaaccgtccattcattagagaagtaaaacaaaacttacacgtggcaaccatcgaggtttgaggtacactgtttcattacctccactatgtttcatatatatataacaaaaacaagtcgccttccttcttagtaaaatttactgaaattgccactgttttcgattttgttggttctccgatctcagtggtgtcttcttctccggtagataattctcgtgttgaaaatctccggtagtgtttgactgagttacggtatgattttgttcttcattttcttttgcaataagtcgttgttatgaagtgagtaatccactggttttgactatagaaatcaaattgctacagaatatg

SEQ ID NO: 5901 - DNA, 645 bp, Unknown
  misc_feature (1)..( 645): cDNA_ID_3078847_gDNA_ID_1620824_Annot_ID_169644 3000 nt of promoter + ATG
cttgactccgagatgaataagaacatttgagagacggacaaaagtggaaatggaatcatttgtatgattacatagagcaacttcatgttggttaacataaggggttttctatctccttataacagagtatcatgtcatgaagagccagaggctgatcgcctttgctcatgttactagttagtcgttagttcaaacactatagatgccaaaacaagtgtataaattaaattaaactacacaaaacgcctaatataacctaacattatttaatttattggccatctaagaggtaaatatcatgtaaaacggtgttaatgaatgctttgttttgaaaatgaacaagggaaagttaaatgttctttttcttgggactatcagcccaacaatgagctatgaagagccgaagcgttttcacattcctcaagttttcgtaatcaacgcgagtcacattcaaacacgtattatatgcttttaaagtgagtgactctgcgttttctcgattctgtttacttataaaagttgttgtgtgataattttctctatcaagtatggtagtgtgacactcggttctaggatttagtctctcttcatcctctggtatttctgttttggtttggttgcaaggagacttcattaagatcaatg

SEQ ID NO: 5902 - DNA, 3000 bp, Unknown
  misc_feature (1)..( 3000): cDNA_ID_3078855_gDNA_ID_1620824_Annot_ID_169642 3000 nt of promoter + ATG
gtgattattcccaaatttgacatacaagttttctctcactttataacaaaatatcatgtcatgaagaacaagaggctgatcgcatttgcttatgttactagttagtcgttagtttcaacactttagatgccaaagtcaaaccaaagagaaatgacaaaaggaataaagaaggtgaaacatttgtagaatttaaagtaaataaatcgcccaacgttattaaatgtattggccattagcctgattatgtgatctatgaggttaataacataattttatcagatttggtttaaaaaaataaaggaaggaaatttggggagaaaacatttagaacgtcggaactcgcatcacttaacaatctctcagtataagtcatctaaaacggtgttagtgaatgttttgttggtgaaagtcaagtgtttttgaaaatgatttacttgggactattagcccaccaatgagctatcaggagccgaagcgttttcacaattctcaagttttcgtaatcaacacgattcacattcaaacctatttgacagtgaagtgactctacttataaaagttgttgtgtgatattataaagttttgtacatgccactcggttctcggatttattctcttttcatcttcttctagttcttttcttaggattattttctggacgtttggttgtgacttgtgaggagtcttcatcaagaacaatggaagatcaatatgaaaagaagataacatggacgattaagaatttctcctttgtgcaatctcaagcaattgattctgatattttcgtagttggtgactccaaatggtaaaaacttgttctctaatgttttgtaagtttacatttcattttaggtttacctgacatcaccctttgcttattggtttttggtttatggttgcaggcatcttgtggcctatcccaagggaaatggtgaaagtactaataaatgtttgtcactgtatctgaatgttgcggatttccaatctttgcctaatggttggaaaagacacatcaaatatcgcttaactgttgttaatcaaatgtcggagaaactttccgaacaggaaggtgattctttctacatttgctagtttatgtttccaaggtggacaaaagaaagtgcatattttatggttcagcttgtcatggactcatatgggacttgtgttgtatagtgagattctatgtatgcgttgtgcaaactggttttgactaaagttctatgtttcgtgactttacagtaatacaaggctggttttataaaaactttcatatctctggtttccaaacaatgcttcccctttccaaacttcttgacaaaaatggtgggtttctggtgaatggtgatgtcaagattgttgtcgaggtaggtgttcttgaagtcgttggcaaatcagatgtgttagaggaaactttattagttcatgaaagcatcgatatcaatgggtttcaagttcttccttcacaggtaagaaaagtacctgtaactatataactttactttcttgtacaagctgcatatttggtttgtgggtatggttcaggtctcgaaaaaatgctatctgagaaggttcgtccatgtttcccttgcaggtagaatctgtgaacaatctctttgagaagcacccagacatcgtatcagaatttcgttccaagaacccacttatgagaacaacatacttgaatgacctactatgtttgactgagatcctgtgcgagtcctctgaggaactctccactggtgatatggctaacgcgtattctacactaacttgtttgaaaaaagcggggtttaagttggattggctggagaagaaactgaaagaggtttgtgaggctcgggtgcaagaaattgatgaagagtggaaggacttgacggacttgaaggaaaagttttagctggagttctgacgatgaggatgacttgaatcgactttagtccgttaagagtttatatctaattggtgttctggtctgtttgtttttcgttttggttttgagaacaatgtcctttaatcttcgagtagaagatcaagagacttgtgttgtcattgaggtttccctacgtcttttttattgcactttagtttgtttcttgatggaattagttaaataaatgttgttggtattcttcattctaaactgctgtgaccactggcacacaaaggtagtcaaattaacttatgttgatgatgcgaagatgatacgagacagtagtgatgcttatacagaaataatcagtaattcttctctataaggaagcaaacacaatgacctggccttgtggagaaactacaggacacattattgcttctatttgtgttgggtggttttaggactttgagagactcataaaataatttgtgtttttgtataattacatagagcaatttcacgtgcaagtttaacatgtgtgttatgaagagccgatgctgcattttttcatgctatatattagtcgtgcattcaatacttcatatgctaaagttgaagatagattgagcaagccaaagagaactgaacaaaatagataaagaagtctgttgttctacgttttctttgattaaactacacaaatcgcctaatacattaataacctaacattattgatgtgaataagtggtattttattagacttggggaaagaaaaaacaggaacgaaatctgaggaaaaaactttaaaagagttgataacgaattttagaactcagaagcattagacacttttctcacttttagtcaaaggaaagtacatattttatggttctacttttcatggactcataggactaaaaacttaagtccttatgagttgtgcaattcttgttttgacttaagttttatgtttcgtgactttacagtagtaacaccatgctggtttgatcagaagtctcgctactggggttcaccagcaatgcttccccttaccgaacttcttgaagagattatgaggagacgataaatcgaaagtttatgaggagattatacatgatataatg

SEQ ID NO: 5903 - DNA, 3000 bp, Unknown
  misc_feature (1)..( 3000): cDNA_ID_3078859_gDNA_ID_1620824_Annot_ID_169640 3000 nt of promoter + ATG
atctactatgattcttagtgatgttttcattttgactttgatgtttatcatttagttgaatctcttggagagctaattttgagttttgggttgggttttagattaagaacagaaacataaggaagaggatacatgtacgtgtggagcatgtgcaacagtcaaggtgtgatgaggagtttaatctctggaagaagcagaacgatgtgcttaaggctgcaacagtcaaggtgtgatgatgagtttagtctcaggaaaaagcaaaacgatgtgtttaaggctgctgctaaagctaaatgtgaaactattagcactaagagacaacctaaaggtcctaaaccttgtttcatggttgaaggtatgaccttggagactgtcactcccattcccaatgttgtcaacgatctcaaaggtggctattgagttgtttccattttcttcattctcttctaagaatttttgcacttgctttgttctttttatgatgtttttgtatcaaacaagactgaattctatattgtacgagttcagattttgttaggaaagatggtttatcccaatcctttacctgttccatttgtatttaaaatcgtttctgcatttttcagaaaactgatactttgggaaaagttgagacatctaatctctttcagtgttagcaatttataccacacaaaaataaacagagagagcaatcgaaacaaaatctctttgtaaagttgggaagtgcagacagaccttttaattgcaaaccttttaattcctttgcagcttcacacaattgcctcctcttcattcattagttaaatgtttgagtttgctatttttgttttaactgagcttatgatttatcacaaaattttattgttataattatatatatttaactaaaaattattactccttaccaaaaaaaaactaaaaactattactagctaaacaaatactttttattgatgtaaatatatttaaattacatttttttatattcagaatataactaaaaaagtaaataaaagaattacatgaaaattatcgtagcggcgtcgaaacgaacaaagaaacctgcggttgcggcagcggctgcggcagcgtctgcggcaacaaaacgaacaacaacctgcggtagtgtttgccgccaccgctaccgcagccgctgccgcaaccgccagcgttaatgaaacgaacatgctaaatatatatatttttttccaaaagttaacggtaaataactcaatatatatagatatatataactcgatcaccttacttatttatctaataaatttataaacattactcaatatcctgaaaaattgagttaaactagtcatgaactagtctttaacagtaacgtaacgtatataagtagaagcactcaattttaattagttctattgaatttgttatcttcgttctatccattttacaccatttatcttactcgttttgttttgtctttttataaaacttactcggtttttttgataaacctaactcctttggttagtagttaatttccttcgttttgcttttccaattctatgcatattgttttaaccattttattactccgtttccgtttgtttcactacaattatttggagctacagtactacagtagtatatagttctatgttcatatcaagattgtcttcttgggaaacacttgccctttgactggatttgttatattaaaaattgtgcaagcacgtgtttgctaaaatttaaaatgagaagctgtgagctaaaagcttcgctgttaggttcatcaactagtctgtctggtgcttcaaaggaatgatgacacaagcaatgatgtaattggcaaaaaggtagttttgtcgtttagtgcttttaaatcgagaggcaggggatagatcagagtgatccggtatgggtcgcagattttgttcggtcccgacatgtttttagttctatttaaatactttataagtaaaaataattctattgtctcgtctctattatttacataaattgtatgtacattaattgtaagggaagtatgtatataactataaatctaaaaatcttagattaataaataatacatcaaaatgcctaacttacatatatgtatttatttatttctataatgaatacagtttttaattaagaagtgaaaatgtctcgtcacacttttcaaataggtcatttggagatatatcacatatcgaacgaatccatgatccctccaggcttcatccagttcactttgacctcactcactcttcttctttctttcagaaaatgatttatataacttttcttcttcttttaaacatatatatttaacaattttttataataatttctatagaattcttttaatatatatatccacaaatccacatagttttgaataatctttagataaactagtcctctccttcgatgaatacttcacgcgtactagttttttttcttcatgaatacttgtcgttgtgatgcagcattttgaaacatgaatatcttaaagccttttgcccaaaaaaaaaaagaatatcttaatgcctaatacttggattacgtatttatgtaccagtatcgcgatcaaaacaatcaccttttattcagtcaaattaaacataatttatgattcatatatcctcaaaaacatattacaaaattaccaggtatctttgtatgctatacaccactattctaaatttaaaaattaatatagagtaatatatactattaagttttaaaaatcgagattcatattaatataaaacatcttactaaaacaatgatcaaagttttattcatatgctcaataacatttttatgattaaattaagcatacgtcgagcatcattagttaggttccaagtacaaaagcccatttagattattttagcccgtttaaggcccaatatgttctgcttcacctcttgcttaggagccgttgccgacttctgggagcgacgccgacgacgaaagggtaaacacgccgccgttgattcagccggagaatca

SEQ ID NO: 5904 - DNA, 3000 bp, Unknown
  misc_feature (1)..( 3000): cDNA_ID_2172610_gDNA_ID_1620824_Annot_ID_169634 3000 nt of promoter + ATG
gatttgatgaaaacaggacaaagagggaataccacctgatcaacagaggttgatatttgctggtaagcagcttgaagatggtagaacattagcggattacaacattcagaaagaatcgactcttcacttggtattgaggcttaggggtgggactatgattaaggtgaagactctcacagggaaggaaattgagattgatatcgaaccaaccgatactattgatcggattaaggaacgtgttgaggagaaagaaggtatccctcctgttcaacaaaggtaaataacttctttttttccagttacttcagaagaattgagtcgcaaagtttttgccttgggaacattgagtcttgaactatattaactctttgtgatatctgtctcagctctcttagagttgtttgtgtggttgagtcaaaactgattgtataagataggttgcagtttattgacttgagtttcatgttttagtgacttgcccctcttgtgaaaattgcagctcctttcagctcagctcttttacttgattgtataagttgcggttcattgacttgattttcatgttttagtgactggctgcttccctcttgagaaaattgcagctcctttcgagtgtgtttacttatgcttttggcatcaaacgattctactctgcgtgcaagctgataatctatgctgtctcatataacagtgattctcattagtatttctaggatgcttatatatctcatggatgtttgcaggctaatctacgccggaaaacagctagctgatgacaaaacggcaaaggactacaacatagagggaggctctgttcttcatctggttcttgcccttaggggtggttttggtcttctctgagaagtaactcttgaagatatctttttctctttgtatggcttgttggagttcatgggaaaaaagtgattgcaatttggatatgatactttgaatattatgctgtttcactgggtttggatcattttaccaataatctgttaaatatcgaatcattttgttttgtttaacatcgaatcgtactttaacatatttatttgggatttagctatttatgatgaatatctttcattcaagaaagaggctagacatgtgaaaataggatcgagctatgtgtaagatcggaccaggccgattgagattgctggttgcatgagtccatcaatagtcccatatttatttgcattacaatgaaatagtggttacaaatcgtcaaatccaatgagtgtccatcacatttaacaatttttactttaattttctaagtaacttaacttgtcaacttgagtttgattctctatactttcatagccagaaaagcacatgagacatgactaatgtgattataaaaactagaagaaatcgtatggatgggccgaccaaaaaaaaagatgaccgttgagatttaaacgttaagctttaaagctttacaagacataaacgttgcggacagaatcggatccttccagagcctcccacaaactcatacatataaatacatgtgaagtagaatcaaagcaagaacaagagtccaagaataaaaatcaatcagaaagaagattgaacatagatctcaagagtcaagatcgatgggtttggttgtggtcatatctctgcctctaattttcttctgtctacttctcggatttggctgctacttcctcggaaaatctcgcggccgtcgtgagatccgtacaaatcctcaggtgtatggagctccagctccgcctcccggtgctatcgccgcctcctctccgccgttgtctccacacgccaagcccgacaattctcacaacgtctgattttccttcattttctcttctttgtctgtcttgcttgtctctattggaagatgcttttgtttgacttattgtgaattgttgtaacttgtaatcttttgattgtctttagttttcttgggatgaatttccttctttatttgtgtattttcctatctctttgatgtaaataagaaagctagtaatggtttacacattgattattctataagaaacatctagaaaagaaaaaaaaggaaaaaaaacatctagaaatatatcagaacttctttcacaaaagaataatatatatcagaactgcgtgttattaattcaacgagttcaaacttcaaagtatgatgtggtaacacaaccaaattctcctctcggatataattagaccaaaaaaaaaaagacgaaatatttttgctataaacaatatatatatgggtaaatgtgaagaaatttgtttcttctgccaggaaatagacagttaatacattgaaaaaatggtaaaactttaaagaaaagcatatcttaagagatgaaaccctaattaaggtgttgagacttcagagacagatcaagagatcttatcagaagatatctgtgaagcatttcaaacaaacattacaaaaaatgtagcctccttccggcggaatggtagaaggagttgtaattctgctaatgtttattttggtcatatatagatttaattctttgatattgcaaactcatgatcccattttcttattatgtggttaaccaataaaagactcaattttgcagtcttactaatcaggactatttgccaaaaaaaaaactaatcaggactaaaaaactacatctctttttttttttgctacatatatatatatatatgattattttcagtgtatatataatatgtatagatattaaaaataaataaaagataagtcgtgtgtagtccacatatcttgaacatcaaaatgacaaaactattaaaatccgcggcaaaatctcttatccagtgacatgttacttatcaaccaatcacaacacgccacctcatcaccccaagaccacttctcttatcttcctctccctccactaatcccctcaagaatctaaagctcctcccataagtcttctctccacacttcacccaaaactccagaaccctagaattcgaaatctccaaagaacccgacaaagcgccatg

SEQ ID NO: 5905 - DNA, 3000 bp, Unknown
  misc_feature (1)..( 3000): cDNA_ID_2172606_gDNA_ID_1620824_Annot_ID_169633 3000 nt of promoter + ATG
cattttaggttatattttcctagacaaagaatccatagggataaggagtgaatcctgaacaaaacccaattgagcccaatgaataaaaaagacatccaaagtaggtttgaaggaaaggatagtccatgctccctccatgtagagtgagtgatggtaagtaaatgtgtcttatgaagctatcgacaccaagttggagataaacaaaattgaaaagccaatgtacgtatgatgttgattcaggattaaaaatttataatatggttataaagtaacatatatcgtggatttgaaatctgaaaaagtcacgtactgtatgttgaatatgtaaggtgtgttaattgtaaatcattatataataacaggttcaaagaaaacgagtagccacctgccgatgcaaatttttttttgccaattacagacaaatcaaagatttgggattggagaggagaagatctattgaaaccgacacattaggtccaaaacatttcattttaattattatgatttaacgaaatagtaaaatacatatatcaacctttttggtccggtccctgttcttacgtctgtgatcataaagtatagagtgattttttattttttttcattatacaaattacaaatgactaatttaattaattagtgaacttttaatttgtcgataaccaataagaatgatggaaaacggcaaaagagtcgactgttgaagtttgtcggaaagacactccaccaaaatataaatacaaatcttatcactagtggaaactgtcgagtgtgtgtagttctcttttccttctaataaaagaatattatctttctaaattcttccaaattcattttggaattttctttcctttttctttttgttgacatgaaattttggagtcttcttctatcgccaattacgactaaaaaaacgattttatatatatcaacatagctctaacaagaacatgataatcgcaaatatacatagatttgcctatttgtacacaagcaaagttagttttaatactcagtatattacatctcatgaaaagaatttacagttttttctattaaagctgtgggagttttcttctaaaatgtttttttttgtcgtccttgtaaaatgttctacattcgtcattttcaggctatctttgatttcgaaagctgtgggcgttttctttttttaatttttttaatttttttttttttttgtctttttctacgaaaataaaatagcgtgcactgtattgtttctttcaactttattttttgactagtgaaagactagacattttgttgccctgcccctatattttttgtgtttattttaaggttgttttttctctttttataatgaccgtaaaatgagtttttacaaaatctgcttcaaatatgtaatgaaaaccttgataatatgtaaatgtactaaaaacaaaatcttgatatgggtacatgtgaaaatagtatatttctgttctaagaatatactgttttatgttctaaaatatcaacaaatagatatctttgcatttttttttatacatcaatattagtattacctacattgtctaagagatgtaacccaacttatgtcgcaactagaactacatctcagaaatcaccgagccgagagaaaattgtaagagtcctcgaccagcaaaacgtaggaacatcaactcaaagcagtcgagaataagaaccactgacttgcatcaaaacagaagatctaaccacaccacacagaatccgaaaagaagacatccaccatcgtttaaactttcaacccttgacccaaccaccggtgataaagacttgtccattatagtttactaaagtttatgatcaaacttaaaatatctgttgttagattgatacctctaattcctttgaattgcttcttagatttccactttacccttccacgatttttaagcaatggaaaattaagtttcatttgtttcagattttaatattaatccccttctatgcaaattgagggaccacgtagaaagttgtgagaatctcaatacacaaaagatatagaaacaatgattacatgcacaagcacgaggccataaatttccttatcctatacacattttcaataaagatgtaacattccaaacagaaaaccctcttgtagctcactctacaaaaaaaagagtatagaattccaatattaaagtttataggtcgactatttcaaaaccaattgctataaagtaaattgattaatatttttatactttcttcgatttataatataagttgttttggaccaatttttttgttttacaattaaattgtttttaagtttttatgcaaactatatatttattttaatattttataattatttatattatgcagtctcttttgtgattggttgaactttttaaaagtaaatattcttaatcttcgtacttttaggtaaaacaacttatattgtgaaacggagggagtatatcatttacaatttctctttatttagttttgtggtgattccgaatattaattacaacttgtaccatttaattcaaccatattcgaagaaaacattaaaggcaaaacaaattaaggggaaaaagaaatcaaaagttaaaaaaaaaaattaagaccaatgagaatagataaggggtaaaagacaaaaagagaatataaaaaaaacaaatagcatttggcgccaaaagtaaaactaaaatggtcatgtcacgtgatgttaatttttgctctacgaccaaagcaaaacaaacctaaagttttccaaatctctgggtcccactctcagatgtgctgacttttattttttttacttttgtcttaaatctttggaaattttcagttttaatttaatttaattcatctctctttctcactctataaatccccacagatccgtcacacttcacctagagaccctcccacagctttctcgataactgacaatccaacggttgagattcagttcttctagataaattcacatatccaaaggacacgtggcggcgagag

SEQ ID NO: 5906 - DNA, 3000 bp, Unknown
  misc_feature (1)..( 3000): cDNA_ID_2172582_gDNA_ID_1620824_Annot_ID_169627 3000 nt of promoter + ATG
gattccgggagagagttcccggcccagacgtagcaccgttggtgtgaactgggttaccattgtgtgtgtgttctgttctgcatttctcattacaaaggttctgtttttggttctaagtcgaagttggttctaaagctgaaacgttcttggtttgtggtgtgttaatcttcacaaaatatataacttcaaactttaaaagaaggaaaaaaaaatcggtgaaatttatttgaaaaagcaatttggaataggtcgaacagaatgttataaaagctcgttgttgacatatatataattcgtacgaatgtacttcgctgactttacttctacttacatcatacagaatacgaatccttttgataaaagttattagtcgtgttgatttcgaaatcgcacaaccactgttattatacaatcactaatccaaaaccacctcattcgttgttaaagctaatataaattcatcctaccaaaaaaaagctaataaaaatttatttggaaattgcaacgaaagatcttaaaaagtttaatgttttatatattcggattatgttatgattggtatatgaatcgttttagttgaattggtatataatttggtggtcaagtaggtttgcataaaatttaaatactagctagctttataaacttacattatacataagcacatgcctctcataacatatattggattttggccttttggtcgtttgagtcaagcaattaaaattttatttgaagaataaatttaaactatcaatattcaatcatgccagacgagtcgttaaaagtcaatggaattattggttgataagatgagatattttcgatcgttcttatgactatctagatatgaagatgagtcatacaagctatgagttcaaaaacggtgtaattttgccttgtttgaaaggacacaacaattatgaaattgtgttagtttaataaaggtttatgagtctttaagtcaagacgacgtgcataatcatatggaatgaacaaataattaatcttgtaagcttaatattgttactttgctagtaagttctgaatttaactttgaccaaaactaaaaagttttgaatttgatattcactttgttatacgcatattttagaatagcaatgaaattggaaaatttaaaagtagtattgattttttttttttaatcaaaggtttgttttcattccattagagtagctaacacatacaaggataaaaggactctaagatcccaaaatttagaacaacataataaagggtataccccaaaattactaacatgaaaataagagagtagatagagttaatcgacaaattatcttttgagagctttgaaccaaaagctaaggggctttgtagaacatgtaaggtcaaggtttgtcgaagtttcttccaagagcgagtcattgggtgaacgaattgttaatgtcgagagatgaaatatcgttgatgagggggctaaagataagcttctcgccgacacgaggagaactacacaaaatagtgatttagcaactgttcgggcaatggtggtggtgtcgcagtgagggtttaagggcatttgaccaatgttgagcaagtaaacaaactcgcaacttacggtatttggtgaagctattataagggttcgcacatggagagagtgtaaagccgtaacataataggtggatcctctctcatattgattatgacttcgatgatgctaaatcacaatttggtattgtgcatccgttcacaaaagttaattaaatcattcgaattgtatgttctttggcgacccgtacgatacttgtttgttgataatccacacacatgggctgaggaaagttttaacctacggcctaagtactaatcacattctttaatcgaacttaaggcccaagtgctaaatcacgacacattcttttaatttcatcagagagacaataaccgtaacagcgcaacaaataacaaactttaaagacaaaatgtatttccaaagagcaaacgtgaaacagaaagatcgtggtcataaagacaacatcgtgggttcaagatgactagataaacatgagttatggaccttacggttttccaaaaatccattttttaaccattcattattggattctaagaatttttactaatttcttaacaaaatccaaaatctcatttcaatgggtttttttcaatttcctctacgagatccttttttctttcaattttccatttgattttttttttttttttttacttttgttacaaaatccaaaaaccaaaaactaaggccatgaatgtttgtaattttaaaaatggtttttggattttggtttttggtttttagtttttgattttcttggtttttgtttttggtgtagattttagtttcttaaaaacttgaatggtagtttgtttagattttggtttttatgttaatggataatatttttgtaacaaaaaaatctaaaaataaaataaaagaatgtaatggatggttttatgattttggttttctttgaaaaattgttaaaacactcaaacactagattctctattttttagaaaaacttatttttttcaaaatcttgaatggatataaaatagattttgaaaaaaactaaaccaaaatctagtttaaaaaccacacccattcaaggtcttaaaactaaaatatttatgtattagttttaaattacaaagataataaaattgaggacagttgaaaaagaagaaaaaaaagtttgtatgtatttggaagttatttttctcaagtagaatactgtgaaagacgattcaacatcccttattttacggttgtgtcaaggaacattcgagaactttttttaataactccttaagggacaagttctctctgtttttcttttttcaatagcttctctgacactttattctttctttctgatattataaacctccgatttggtttagttcaaaactagaagcagcaaaattctgaacacgtaaagctttgtttcactcagtgtttcccgatcagatcca

SEQ ID NO: 5907 - DNA, 3000 bp, Unknown
  misc_feature (1)..( 3000): cDNA_ID_2172593_gDNA_ID_1620824_Annot_ID_169630 3000 nt of promoter + ATG
tagccgagaccaaacttggtctagtgactcagtgtttcttgaccatatctgccattaaaggagaaaccgtttctgatcagtacttggcaaatctcgccctcaagataaacgcaaaggttggtggaacgaacgtggagttggtggataatattttctctttcttcaaaaaagaagataaggtcatgttcattggtgctgatgtcaatcatcccgctgctcacgacaatatgagtccatccattgttgctgttgtaggcactcttaactggcctgaagctaaccgctacgcagctagagtcaaagctcagagtcaccgtaaagaagagatacaagggtttggtgaaacttgctgggagcttatcgaagctcattctcaggcccccgagaaacgacctaacaagattgtgatattccgtgatggtgtcagcgatggtcagttcgatatggttctcaatgtggagttacagaatgttaaggacgtttttgccaaggttggctataatccgcagataactgtaattgtggcacagaaacgtcatcaaacccgtttcttccccgccacaactagcaaagatggaagggctaagggcaatgtgccttcaggtacggtcgttgataccacgatcattcacccgtttgagtatgatttctacctctgtagtcaacatggagcgataggtacaagcaaaccaactcattattatgttctttcggacgaaatcgggttcaactcgaatcagattcagaaactcatctttgacttgtgcttcacgtttactcgctgcaccaaaccggtcgctctggttcctccggtttcttatgctgacaaggctgcttctagaggaagggtgtactacgaggcaagcttaatgaagaagaattctaagcagtcgcgtggagcgtcttcgtcttctgcctcggttgcctcttcatcctcttctgtcacaatggaggacaaagagatcttcaaggttcacgcaggcatcgagaactttatgttctttgtctgaaaaaaagtttgatcttaaaatatttatctaaataagaacgtctcattaacgcagttcttactcctttttctgattagaaaggatgtttgtgcgtgaatctaatcgttagatatgcagtttgtttgtttccttttcgttgttggtgtgttgaaaatagtttgtatttggtattgtaatgctctttagagctgaaactatgtcatgttatggtattttattatagttttcagactttggattcaataaatagttcatattttgctacttctctgttttgtgaagggcttgagaactcagacatgagtactctagttttgggtttacatgttctgccttgtgtctgaaattccttttttctaaaccatctattcatgtggaacattatctataaggttattttgtgtaatgatcaattgatcatgcatctctactttttttttttttttttttctttttttttttgtcgtcgatcatgcatctctactacatatgcattccaacaaaaaaaacataatggtgctcttgttttcgatataatatcagttatgggctctctgtttttattttattttattggaccttactgatatttcttgggttcatgaaccatagctataccaaatcattaaggtggattttgcacgatttctcaatgtttaatttcatgtattatatactcattgattggttgtttgcagaatcttatttactacattgactctcaagagtcccctcctatatttcatcaaatctatcttttcattttataatttttatgtaatgatagattcctcataaatgtttcttgaaaactataaaaaggtaactaacatttttttcctatatatatatatgtgtgatatatatcccatataaaaagtagcaacaagaaaatgattttagagaagtgataccaaaccaaatgaaaaagacatgatagtcgaagtgattcacacgaatcgaactataataatctatactctatcttattcacattttatcatctttttgtgtttcatgttattttcttatgtatatattcatttttcgtatattcttttgtttttatcaaaataaattcatttttctttttaccccactcattaacataagttagccatatattattataagatttttttcttgccaaataaatgtaagagtttctttttcccacaactcattaacaaagtttggcatatgtaaaaaaaagaatgaattttaaacctaatactagcctttaaaattcaacaattattttatttttattttcttattttcgtgcaacagctggagtgttttttttttttttttttgtgttcccagagatcgagtgttttgtgtttcttctctctatcgttcacatttgattaaagctaaagctttcttcttcttcaattgatgctacttctgatttaccctttctctgcttttttctctcactctctcagttttctcctccttgattcctaaagtcttctcctttgcgtgcatttcttcaattttcagattcttcctaaggtacccttctcaaaattcttccttgttttgcgattcttcatcggttcaatggatcctctttgacttcgattttgaatccgagcttcgttatccctcgattgctaatttcactcttttgtttaggattctttccccaatctaggtattgctttgcttctctgtatctatcgaatctgcattttgttagtttcgaaaattttgaaattagggttcatttgtgatttgttcatacatctttgttagattgcagaatctgttcatcatttttcgaattcacataactcagattagtttgaatctattgagattgagaaatttcttaaaaactctggatttgtgtggattaagattagtgttttgagattgatctctttgtcaatatggttttttttggtgtaggtggtagaatgatgaaatgagaatcgatagataagagtttaaagagcaccagaatctttgttatcttgca

SEQ ID NO: 5908 - DNA, 3000 bp, Unknown
  misc_feature (1)..( 3000): cDNA_ID_2172586_gDNA_ID_1620824_Annot_ID_169628 3000 nt of promoter + ATG
acgaatttgtaatctcttttgagcaaaaactacgtcttcttctttttttggtattattgtatttcagactctgcattcagtaattatttcatattttgctaattttgtttctgagttttgttaaaatgctttagatctcggagattagaattacatgttcagtgtgtgtctgaaatttagtaagtgcattaaccatgatcatgttcggtcgctactgaagtatgataagctctgtatcattcaattacttcatcattccttccacttttgccccttgtggactaccacagatgttacaagacaaaacataatctgtaaattgctaatctctgaacctaagacttgatatgaaacatttatttttattcccaatcgttttataaagattctgttgcttgcacaatctcattcaccacactactcatgtactcccaggttaatcaatcaagtttatttgtgtccgaaaaaatggaaaaatatgagaaattcccatccaattttaaggattgtttgaatgatcaaagtatggttgttttagagaaatgaccttaaacacccaattttacgttgttctcgtccaaaactagcggaaaatttataaatttttcaaataccacaagatagtaagagtttgtaagttatggtaagttcagaagaaaagaaaaatacataaatgatagttttttgagaattgaatgcatatttcgtcttagagtcaattagttacaattaacatgattaattaatagttattttgttgttttgttatttgttgtttgtatgaaatggtgttgttatatatacattggatactcttatagaagttgaagctgcaatttcttcgttgcatgacttcaacatttgatactcgttagtcaaaatctttttcgttacatcagactcgatcaggccacataatcatatttagaactaaattacaatcaattacgtattgttccaaacttccaaaagataattgaccacaaacactcatttccaacagaacatgactattactgactgactcacaagcatacactaataactatatccatttctcaacatatatctttacatccatttctcaacataaaggattgaacaaataacttaatttttcatcaaaattaacaataaccctatccctatgaattctcaacaaaaaaaagtttaaaacaacactagctacgagctctcaaaatgtttggtcgtgtgttcgagaacatttatataattaagttttttctcaacttatataattccatttagtgaaaaatctatagatatatttatataattaagttttttctcaacttatataattccatttagtgaaaaatctatagatatatttaaaaagtttactatttctttttggcggtttagagagcaattgttttttttaataattgagttagtatgtttgagtggtcgaactacgtattcactaattaaagacattttaatcttgacatagtcataccattttacataagtatggctaaatcaaaattaaaatgatcttaattagcgcagtgcctaactaaagttattttaattttgacatagtaaaagtctagtttatacaatcgcctttatagtgtataatgtattaaataattctaatcaagcaagtgttttacgcaactgatgcttttgttgaaatacattattagaatttagattaatatataaaccgatgtgaacgttatgaatttaaaacggtgttggctagtgaatgttgtgaaataaatatcagtaaattatgcacaagtcacataactttcagagattgtgctacactgctacgcctatcattcagcaacatgattttttatctgtctagttatctcatgttatagcggtttagtcgaataatatatgattaatcaaaattttacacacaaaatatacgttcgttaattgtatcacatcatcaataataaaacaaaagatcttttgactcgagctaagtaaaccacgttacatacgtaattgattctccaatcttctttattacctttttcaaaaagtatgcgtatgagcgaaccgatgagtaagtaaaagtgatcgttgatctgttggagatgagagtttgtgtaattgacttcatcaatctcttaactaaaaatagcaatgcgtgagggaaatgtttttcaaaagatgaaaagacacataaaaaccaatggaaaatacaacatcaaaagattctttacataaaatggtaaaaagaaaaatttacaatcaaagttttctttttagaaaactggaaacccacgctaatgcgtatacaatactcatcagtatatgatatatcaaatatatagccacatataataagtccattattaaaaagtaccgttattatcatgaccaaaatttaaagacaatacacacgtacaactaatattatttattaagaacataacaagtattattattattagaagtagaaatttttttccaaaagaggaaaacgaaaactttaactttatttacttacctaaaaaccttaatttttgacacctctagtgggttattataatgtcgttttcgatcgaaagtgaaacagagagacagtggacgcaagaaaaaaaccgtgggtggatgaaagaaagtaaacatgagatttttgtttttctttgttaatggtttccttaaataaattacaaacataattataattaagaagagagtttcaaataaaataaaatgaaatgccacgtcttacagttgcatctgactctgttttatgttaattgtgacacaagtttaatacagttgtactttcttactttttggtggtttcgtggaagattacgacaactttacaaactctacgacttaagcttctctgttcctacaccttttgttcttctatttaaagccctctgatttgttacttcacattcacaagttttgaaagcaaacacataaagaaaattctagttcaatcttttgtcactcaagagtcttcccgaccgtatccagtcaaatacc

SEQ ID NO: 5909 - DNA, 3000 bp, Unknown
  misc_feature (1)..( 3000): cDNA_ID_2054231_gDNA_ID_1620831_Annot_ID_169652 3000 nt of promoter + ATG
caatattaacttaagtatttactatggcatggatacaattcaatacgaaagatagctttagtcaagactaggattcagaacaatctgagtacttattaaacgatggttccttagattcataaacatgaagaattacagtatagtgtcatcatcaattttgatatatctttctttatctttttatgtttctgacgccatgtgtttatctgtctttgtttgatctagtaaatgacaaagccaaggtgcctcctagtgatgaagagttgagaaatgcaattgttgatatcttgaaagttgtggacttgaaaacggttaggattcaaacctcaaaaaatttatgtgcgtttagaagataaattgatctataagtctctaataatagctttgttatttcctgacagaccgcgattgctgacgtcctcaagcgacttggtatgagttaagatcagatcgttttatttcttcaccgacgatgtcgtctttgtaacttgctttgttttaaactggttttacagctgagaagttcgaaatcgacctcaccccaagaaagtcatctataaagacgatgatccaaaatgagctcagttcataagaagacaagaccgaggatgaggagtggagtaagttagtaagtgatatgggaaataataagggagcagagacacgtggagggctgtgattaaaagatgaagtaacggccaagatggaaacgagtggattgcctgcgtttaaaagaagctggatcaggaacattttatcataatcgtgaaagttgttgaagtttgttgttcttctctttgaggtttctgggtttcgaatattatgattcatcctctgtgaagaacaatgttcttgcaaggtgaatctagagtctcccctgttttatgaacattggagctcattgttatccttgaatattaatcggaagtgttattttggttgattgatcgattgtttgtgattgaagaaacagatcctagtttttctgtatcagtaagtaagaagaaacttaggatttaacatgaagcatctccttaggatttattcatgcccactttaagaagacctgaaagttagagaactagacttaggaaacaaacaggttcaggtttatttgtatgtgaaaattcagtctggttaaaaccaagctaaacgggttacccattactgatgaacgggtttattattgatgaacatatagttgggccttgttattttggcccaactgttttttatttttttgtcgttttgtcttcctcataccgccggagaaaccctaacgtcagagaaaagggtttgcatccccaaagtttacatttttacttttgaactccgtgcaggtttgttgtgctcatgtctgaagtaaatgttccggtgttctgttgctggaacggttgcatcaaggatggcactaatggcatatactatgaagggtccaattatagaatgaccactgtgaagggaaagactaagtttaacgaattgctggatcatctgtatcaagttactgggttagataggaagagatcaaagtttggtataatcggtagatatcctacagatattcaagcgtttagggttaagtataaacctcttcccgtggtggacgacactagtttggagactatgcttgagattacaaccaaacatccttatattaaagacattgacctgtatttggaagtggaatcgacatccgttggagttattgatcctgctacttgttcatcgccttcagacattcttggtggttcttcgaaaagacagaagaccgatatacatgttaagttagagagggagacggatagaaactcagaatcagatggcgtggtacacttggttgatagcagcactttgaataaagattccatttctggtcatgtttcaaaaccgtgtatgtctagtttgtggcttgacgatcatgacttgcgagtaggattgtgctttaaagatggcgatgagctgaagaaggcagtggactggtgttcccttaaagctcagcaaaagtgtgtagtacgagagactgcaaaggacgagtatatctttgagtgcatcagatggaaatgcaagtggtcacttggagccgctagaatgaaaaagcacggacttgtcgagataatcaagtatactggtccacatacttgtcatcccattgttccagaagatttcaaatcagagtttgaaacagatgagattgaacgtgcggtcaggtatatgcccacacaaacaatttcagagttgaagaagtggtggaaaaaaaaaattggctatgagcttgaaacttctgatgtgcggttagcgaaagagaaagctatcaaaagagtttttggagattgggatcaaagttttgaagattttcccaagttaatgtctgccctttgttcatctaatggactccttgtggactggaagtatgatctttttcctaatcctaattttgcatccttctgtggtgtgttttgggcgttcccacagtctatagaagggtttcaacactgtagacctctgatcgtagtggataccaaaaacttgaactgtgagtaccaattgaaattgatgattgcctcaggagttgatgcagccaacaaatattttccacttgcctttgcggttactaaagaagtttctactgatatttggcgttggtttctcactggaatcagagagaaggttacacaaaggaaaggcctttgcctcatttccagtccccaccccgacataattgctgttgtcaacgaatctgggtctcagtggcaagaaccttgggcttatcacaggttcagtctgaatcatttttactcccaattctctcgtgtttttccaagcttctgcctgggggctcgcattaggcgggctgggtccacgagtcagaaggatgagtttgtttcctacatgaatgacatcaaagagaagaacccagaagctcggaaatggttagaccaattccctcaaaatcggtgggctctggctcatgacaatggtcggagatatggaatcatg

SEQ ID NO: 5910 - DNA, 3000 bp, Unknown
  misc_feature (1)..( 3000): cDNA_ID_2042150_gDNA_ID_1620831_Annot_ID_169654 3000 nt of promoter + ATG
acgaagatgatgatgatccctttgatggttttgctttgcctttgatcttcaacgtacttttagccgccattgattctgatctcagaactctctctctctctctctgcttatctctgtgtcagagtcgatttagctggaagacaaaaaccctaaagggtttaagcacctttttaaagcctctatgaaacactctgtctaactcagagggtcctttattttttattaaaagtatgtttatccaataatgattctctggctcgctggaaaatagctgtcattatttatatttgaagcatacataaataaaatttctctctctttgtttattcgttaggtctcaaaggctctctctgtctctttctcaaaaatcatctgcaggaagtgaatcgtcaaaaccgagtttggaggatctgtcttgaggtaaaaaagctcaatcctttatcggaaattttcaacctttgcttttcctttgtttgttgcgttgctgaatctatctagggtttggttttttggatctaggagtttttttttggttgagaaatggcttcgaaaaggatcttgaaagagctcaaggatctccagaaggatcctccaacttcctgcagtgctggttagtctttacctctcctctcgtaaatcgtgtctgatctatttttgagctttgttgttagatcttataatcttatctttaagcaaacaaaaaaatgaaatcttttttagtcttcgtaattttataacgaagttatctagagatcttgaggtggtaattgccgctaagttatgatcttagtttagaagataccaattgaaagttgagatttttcttagaacagaacaaatttatggctgtactgatccttgattgaaaattacagctttctaataatcatagtctagaagatagctgttaaaaattgggatccatttacccatcctggatactattgatcataattaataagataacagttggaagttgagatttttcttagaacaaagttgagattggtcgttgcagttatcttatgatcatagtctaggaaatagctattgaaagttgtgaattttcttagaattaagcttttggtgttgtatgctgccttgtttatccaagtatccataacggatcttacagacttgatacctcgcactgatagtctttcttagttatctattgcattcaggtttatacatgtttgttttgtttattaaaatatatgataagtggataatgcgtcgaaattgttggtcttaatagagttagaggattgttgtcggagattctcaaactgttcatgcattcttctgctagagaagtctcaggacattgctatggcacatgttttgttgtgtgtatttcagtaaatgccatagatcatcatgtttaaaagactaatctttctattttttccttctatgaacaattgtgaaatcttcaaggcccagttgctgaagacatgtttcattggcaagctacaataatgggtccatctgatagtccttattcaggcggtgtctttctcgtaaccattcacttccctccggattatcctttcaaaccaccaaaggtaaattattcattgttaccaaactgaaatcatgaactggaattcaaaatgctctttttcttgcaggttgcattcaggacaaaagtgttccaccctaatgtcaacagcaatggaagcatttgccttgacattttgaaagaacaatggagtcctgcactcaccatatcgaaggtgaaaaagcactctttaaccaatagcagtggatgatatataatgaatctcctcttattttaatcaaatctcttgtgaatttataggttttgctttcgatatgttcattgttaacggacccaaacccagatgatccattggttccagagattgctcacatgtacaaaaccgatagagcaaagtatgagtctactgcgagaagctggactcagaaatatgcaatgggatgaaagtttgtgtcctttgatccctcacagactcggttttaatagagagagagagagaaagagagaggacttcttcacatagggatcttccatgaaataagttagattcctatgttttatcatctctttgtttgaaacctctttaatctcaaacaaaaacattacttcacctctttattatccatatgttccctatctttgtttctatgctttttccaaaaaattataagaaaaattatttatgtaaagctggaaactttgagcttttacctaacaaagtatgacgatgattaaatgggaacatttgacatttgctaccaaattttcaaaattccgtgtttgagaaaatattgaaataaaaccatttttgcagaaaaataaaataaaaattgcatgattttgaagatgttgattaacatattaattcgaaatttacccttgtatgaaatgcaaagtgataaatttaccctacagaaaattttctccacctttatcatttcccttgcttgtaagggatcaatgattccatatgtgcattaatttaaaaatacctcaaatcaaagaataaaggtacactttatctaccattgaattaagttacctcattatgaaatggaaagcgaaatcaaaaggcatattattacgaaacaataaactgtagatttattggttagctagatcatccaacttttcattcaatctgaattttcatttaatttatgatgatttgaatgtaaaatctgtaaatcatggtgtattattattaaccaatgaaatattctaaatactgaaaataattcatgtagtgatttagccaatcatttaggctatatttagttatttacatagcaactaattacgttcatgttgattaacaaggaaaaacgcgttcattacgcaataccatgcaattggaatccttcattatccaagaaatacctaaacaaattctcatgttttgcacagaaaacaaaaggaatccaaaatatttgctataggtatatctaaaagaaacaactatatatacatgcatg

SEQ ID NO: 5911 - DNA, 3000 bp, Unknown
  misc_feature (1)..( 3000): cDNA_ID_2687185_gDNA_ID_1620831_Annot_ID_169655 3000 nt of promoter + ATG
gcaagaattaaatacacccaacgatcaaaactcagagaaacggtctcaatggttttaatggctccaaggtttttttagttttctcagcttatataagagaagacttttttgccggctaaaacctgccggcgtatctttctaatcactcttttatctatttttttaatcagaaacaaattcttctgctaaagaaaatttctctgttttacagttagagacaaaaactagtttcttcacaatgcaaatcttcttgttcttcttctctttgattctctgttttgttctgatttcctctcagactcttgaagacgacaagaaagctttgcttcatttcttgtctagtttcaattcttctcgtctccattggaaccagagctcagacgtttgtcatagctggaccggtgttacctgcaacgaaaacggagatcgaattgtatccgttagattgcctgcggttggattcaacggtttgattcctcctttcaccatcagtcgtctctcttctctcaagtttctaagccttagaaagaaccatttcaccggagacttcccttctgatttcacaaatctcaagagcttgactcatctctacctacaacataaccacctctcaggtccactactagctatcttctcggagttgaagaatcttaaggttcttgatctgtctaacaatggattcaacggaagcatcccaacctctctttcaggattgactagccttcaagtcttgaatcttgcaaacaattcattctcaggggaaattccaaatcttcatcttccaaaactgagtcagatcaacttgtccaacaacaagctcatcggtacaataccaaagtctcttcaaagattccaaagttcagctttttctggcaacaaccttaccgagaggaagaaacaacgcaagactcctttcgggttaagccaacttgctttcttgctgattctgtctgcagcttgcgttttgtgtgtttccggattatcattcataatgatcacttgtttcgggaagactagaatctccgggaagttgcgaaagagagactcgtcttctcctccaggaaactggacatctagagatgataacactgaagaaggcgggaagatcatcttctttggtggaagaaaccacttatttgatttagatgatttgctaagctcatctgcagaagttttggggaagggtgcttttggtacaacctataaggtaacaatggaggacatgagcacggtcgttgtaaaacgattgaaggaagttgtcgttggaagacgagagtttgagcaacaaatggagatcattggtatgatcagacatgaaaatgtagctgagctaaaggcttactactactccaaagacgataagctcgcggtttatagctattacaatcatggaagcctcttcgaaatactgcacggttagttattttcattgctctcattctgatgataaatcgaaactacaaggttccattttctttgcaggaaacagaggaaggtatcatcgagtaccgttagattgggatgctagactgcgaatagcaaccggtgcagcgagagggctagctaaaatccacgaagggaagttcatacatggaaacatcaaatcctcaaacatcttcttagactcacaatgctatggctgcataggcgatgttggcttgacgacaatcatgagatcacttcctcaaaccacttgccttacttctggctaccatgcacctgaaataacagacacaagaagaagcacacagttttcggatgtatacagcttcggtgtggtattactggagctcttgacagggaaatcaccagtgagtcaagcagaattagtaccaacaggaggtgagaacatggacttagctagctggataagatctgtggtggctaaagagtggactggagaagtgtttgatatggagatattgagtcaatcaggtggtttcgaggaggagatggttgagatgttgcaaataggattggcttgtgttgctctgaagcaacaagaaagacctcatatagctcaagttttgaaattgattgaagatattcgatcagttgatgcagagtgagacaacacaaactagtagtagtaaccattaaagcaaattctttgtttcttcatagatcatttgattttattgaatttgaatcatgcaaaaaagaatgagactttgaattatagaatcagaaacaaatataaatccatttcataaaacgaagaaaacagaacaaatttgggaaaaaaagtaaaagcatctaagaagaacattacgaagaagatccaatttgtggattaaacgggagagaggaggtgaaaaagatgaggtttaggatctgagttcatgccgatgatgatgatcagagggatgaaaccatagtgagtcgcgactttggctttctgtaatgaccagttggtccaatccttgaagaccttgtactttgatgatgcagaggaggacgaagatgatgatgatccctttgatggttttgctttgcctttgatcttcaacgtacttttagccgccattgattctgatctcagaactctctctctctctctctgcttatctctgtgtcagagtcgatttagctggaagacaaaaaccctaaagggtttaagcacctttttaaagcctctatgaaacactctgtctaactcagagggtcctttattttttattaaaagtatgtttatccaataatgattctctggctcgctggaaaatagctgtcattatttatatttgaagcatacataaataaaatttctctctctttgtttattcgttaggtctcaaaggctctctctgtctctttctcaaaaatcatctgcaggaagtgaatcgtcaaaaccgagtttggaggatctgtcttgaggtaaaaaagctcaatcctttatcggaaattttcaacctttgcttttcctttgtttgttgcgttgctgaatctatctagggtttggttttttggatctaggagtttttttttggttgagaaatg

SEQ ID NO: 5912 - DNA, 3000 bp, Unknown
  misc_feature (1)..( 3000): cDNA_ID_2042148_gDNA_ID_1620831_Annot_ID_169653 3000 nt of promoter + ATG
tcatctctatctttaaaacacagtcctaaatgcatgtcatgatcgtcatcaatccacagtctaggcagaagacagggttttaaagcaccagaattgacaactttaaccaagatgccagctgagcctgaattattatccactatttcttgttgtgtgatcctctgtctttttgaggaactatcaggactttccagtggcgatgaacaagtaacaggaacaacgacagcatcagaagttggttgagcttccaaatagaattccaaattgtttacagaaggatgattccttggaacctcaagcatagtctccaaactagagtcgttcaacacgggaaaatgtacatacgtaaagagatccggtgaaacatctacagggtacttaccgaagattttgaactctgatttctgcttatctaatccaaacaattgataaagcctatccaacaatctgcttaaggcagtctttcgcataattgtgatctttttaagaatggatccttcatagtatacgccatcagcaccatacttaatataaccattcaagtgacacaacaccataaccttttctctgactgtttcaatcgccatgagcacaacaaatctgcagtgaattcaaagaaaaaatgtaaaaaatttaggcatagcttcctaaaatgaaaaaccctataaagctcaatatcaacggtaatgtacagctctaaaaggagaaagctttctagctatagaagcagataaactcattcaaaaacataaaccctaaacagtgatactcaaaactaagacttgtaaagttttacgcaactgaaaagaagaaaaacagggaatttggaaatgggtgtcgcagaaaaaagcttagatctttcagaaatggaagtaatttcaccttcgctaacgatttcgccggtgatgttactgttacaggtcaggtcactgatgaagacaactactacagtctacagggaaatgagaaatatagcttttcgaaattttataacagaaaaaaatataaaaaaatcaattgggccgacggaagaaagcccgtgaatatttgtagcttgttttacaactgaaaccagattaatcctacttccctaaagtcataagatgcccggctcggtgcaaactcaaatccatctttcagctcttcttcttagtagcgagaggagtagttctgcatttggtacctgatacgtaagttggaggtgatggaggtggtgacggtggaatgacaggaggaagcaatctcggaactccagaagcttccggccaagctgacatttccggaacatgagagaaaatggtggcgtaagttctttttaaccgttcaagagtgtaacagtcgtctacatactgtaaagggttgaatttcaacttcttgcagacggctagagcgtgtagacatgggaatttgtaacgctgaaaatccccgcatgtgcagctgcagtcgctcagctgaacaatacattcacccttatctaacgctgttgcaacctgaaaggcgttattgtctaagggcgttacaatgtaactgtaagtaacgaaagttgtcctgaattcttcaagcttgtccatgacaggctcggtgtacacatcgccgcagttaagagaacttcggctacaactaaaagacttgtcaaacttggatctcagttcatcaaatagaagaagcacggaacctgtcactacatgaccagcctgctcaaatgcgttacaaactgcaaacaaagcttttgtatttatctccatgattccatatctccgaccattgtcatgagccagagcccaccgattttgagggaattggtctaaccatttccgagcttctgggttcttctctttgatgtcattcatgtaggaaacaaactcatccttctgactcgtggacccagcccgcctaatgcgagcccccaggcagaagcttggaaaaacacgagagaattgggagtaaaaatgattcagactgaacctgtgataagcccaaggttcttgccactgagacccagattcgttgacaacagcaattatgtcggggtggggactggaaatgaggcaaaggcctttcctttgtgtaaccttctctctgattccagtgagaaaccaacgccaaatatcagtagaaacttctttagtaaccgcaaaggcaagtggaaaatatttgttggctgcatcaactcctgaggcaatcatcaatttcaattggtactcacagttcaagtttttggtatccactacgatcagaggtctacagtgttgaaacccttctatagactgtgggaacgcccaaaacacaccacagaaggatgcaaaattaggattaggaaaaagatcatacttccagtccacaaggagtccattagatgaacaaagggcagacattaacttgggaaaatcttcaaaactttgatcccaatctccaaaaactcttttgatagctttctctttcgctaaccgcacatcagaagtttcaagctcatagccaattttttttttccaccacttcttcaactctgaaattgtttgtgtgggcatatacctgaccgcacgttcaatctcatctgtttcaaactctgatttgaaatcttctggaacaatgggatgacaagtatgtggaccagtatacttgattatctcgacaagtccgtgctttttcattctagcggctccaagtgaccacttgcatttccatctgatgcactcaaagatatactcgtcctttgcagtctctcgtactacacacttttgctgagctttaagggaacaccagtccactgccttcttcagctcatcgccatctttaaagcacaatcctactcgcaagtcatgatcgtcaagccacaaactagacatacacggttttgaaacatgaccagaaatggaatctttattcaaagtgctgctatcaaccaagtgtaccacgccatctgattctgagtttctatccgtctccctctctaacttaacatgtatatcggtcttctgtcttttcgaagaaccaccaaga

SEQ ID NO: 5913 - DNA, 3000 bp, Unknown
  misc_feature (1)..( 3000): cDNA_ID_2042156_gDNA_ID_1620831_Annot_ID_169657 3000 nt of promoter + ATG
tgttagacgccattttctttattgaagttcttttttgttccttcaaacaaataacactataacagtgtgtgaatttagccaagaaggaggagactttgaacccatctaaataaataggcaattaggcatatacagctaaaaataaatatggctatgtatatctaaaaaaaagtatgtgaatttgacgaagaaggatgagactttgaccatcctgtgacgctttctttcttgtaatcaaccatgtgtcacgaaggagaagttctaaatcttaggtaacaaaaagtgtgacaaagttaggataaaaagttgacaagatgatgagcaacttactcttatcattatcaatacaccaccaaaccaaacaaatatttatatcaattaacaacaaaagaccaatgcccatcaacaaattacacataatttagaaaaaatggtgacaatagaaagaaatggataaatggagccacaaactttccttggttataaagttggagtcactcatcaagctgcaccaaccttgccgaagagcgactttcggatctacacacatttcaagaaaagatcctttagaacaaaactaaaaatacttaggacaagacaaatgaggtttcaagagttttgaaaccaataagaaggtataagcttaggaacatggtactacaaatttaagagagcaaatggggattttaatttaacctctggaagtttattgcggaaggcaacctccaacctcgcatcaagcgtgttttcacacacgattttcccatcacgagaagccaaaaccactcctcctgcactgttatatatccacaagtgccatattggtattagagtttttgattcttatatagcttttagtattttggtttgatgaaattttaccaggaaagagcatgaggatcatcatctgaaggagcaggaggaaggaaaatgtccttgtctacaataatctcaggagcatgaacctttgctttcttgcaatattcttcactagcatcatccagcatagactcaacaatgtcaagatcttcttcacgacaacggagtaacactgcaggctctttcaatctaagcaaacactacaacacatacccaaaaaatcccaatataaagaacacatttcaaagaaacaaacgagggagctagttgtgcttaagacagaacctgaacaatgagatctttcaagagatgcttatactgatggtgatgatgattgaaaaagccatgttggctaactttcaagagttgcttagctgcctcttctttcattgcattgacaatgtcatcttgcgcttgtagaactttgatcctcgatgcgttcagttgcattgagtaatcactttttacaaaacataagaaacagagcaaactcacaattaacaagtggcctaaatcaacaagatctaaagaacgatatgagtcagctcaaaactagcatctaaacgctcaatgccattaaactaggaattaatgagccaaagaggaacagatctcaagaacaaaatcaaacagataagagagacatagagaagtgaaaagagctctcacatcttctttctgacatcgacctgtttctccttcttctcatactcttgtctaatcttcttcttctctgcttcaacaagctgcaatttctcaatgttgaattcctgtcacatcaaaagaccaatcggttttagactcaaaaccattttttcatgttcagaaataatctcacagaggatcttaagatccgaagatcaatgtaaaacaacagtcaacatattttcaaaagaacaaaccaaaatagtcacgcaattgtcaacagagtcacgtattcgtaaagatcgagatcaaaagagagtggatgtaatgtatggacttacttcttcagaggagatggagatctcgttagccttttcttcggcttcctggcggataaacctaaccatctgctggatctggatggaagcatcggcgtcgttcatcttcgagaaacaagaaccaaagtctgaggatgaggatgaatgatttgatgaagaagccgtttcgtcttattttggtcaccaagcagcagttattatagtagacccagccaaatcatatttctttgtttttatccaatttgattgggtactagaaccatcccatcacacgtgtttctcgttttatgccaatataaatattatttattgattttatacccaaaaaagagtttatatttatcatacattttttgaataatgtataatgttttatgttacattaaatcatttagggcatgtaattctgttattcatatagtatcttctttctgagctttttttttgaatcaattttagactttggagaactctaaagctctatccatttgttagccaacaatcaaagaaaaaaaaagtcctaaccaattacatgaatctgagagacaaacaatgatacaaaataaaatgaatttctaaaattacttaagacaatcatgtttctattaaataatacattgattaacaaacgtacgcatatatgatacaaatgaagaagactttttgttttttggtaggcacaaatgaagaagacattatcttaaaataccacaaaacagaacatttcagctcttggtgatcaaaaaaaaaaaaaaaaaaaaaaaaaaaagagaacatttcagctctttttgtttgttgataattgtatgccaagcctctgaattttaccgcgcttacgttacaggctttaggaatagagttaagagaaattagccgtttggtatgaattttcttgaagcaagaattaaatacacccaacgatcaaaactcagagaaacggtctcaatggttttaatggctccaaggtttttttagttttctcagcttatataagagaagacttttttgccggctaaaacctgccggcgtatctttctaatcactcttttatctatttttttaatcagaaacaaattcttctgctaaagaaaatttctctgttttacagttagagacaaaaactagtttcttcacaatg

SEQ ID NO: 5914 - DNA, 3000 bp, Unknown
  misc_feature (1)..( 3000): cDNA_ID_2054212_gDNA_ID_1620831_Annot_ID_169668 3000 nt of promoter + ATG
acaagaaactagtaacaattcatgaaacgaaatcagtaaaccgattaccgatgattctgtatttccactgccgtatttgctctgtatctgcaaacacaataaagaagatttaaggttcacaatggagaagactcaaagtaagaaacatatttcaatgtttttgtttaaagttcaagaaaccttgagtgcaaaatcgttgacgtctagaagaagtaacttggcatcgaagaaatgagctagggctttggctagcatttgttggtaaagctctgcaaggaaacatattaaaattcaaaacacaaacgaattggttcaagatcaagatcgaatcatcggaatctaaccggcagggccggacaagagaatggctcggctagctggagacaagtttctcgtatattttgaagcatcgaagtgcttcaaatggacataagctgcacttgttagaagcactcgtgtttgttcactgcacaatcccaaaaaggtaaaaacattgatgaacaagactacatgtactatgtatcgatcggtgtgggtatgtttcagtgatcaaaagaataaatccaaacattttgggataaagatcaaagaatctaaatgatagtgacacgtgtcggaactagaaaaacaatgaaatcattatcggcgtatgtaaacagaaattcacatgcttcaccattattatcactccaacaaatatcttatccgtttttgtaaaactacatttaataactaaaacaaataaaaacactatccaaaaaatatgtgatgactcatattatttccttatcatttctatattctcacttgtattatcgtcttgaaactcgtaaactataaactaaagtgacgatcaaaacatatgtatattccatcacaagaattgttttaagatcctaattagaattgattgatcttaaagtctagttgaatgcatgcgaattatgggaactttcgatgttatatgttttaaattacctgagataataaggaaactcatcgaaagtaattttactctctctgccgtcaacaacttgacggagtatctccttctccatcttatccgccgtgacggcgttatttgacgacgagttcccgccggcccattttccgacggcttgaccagaagccaagcctaaacccacacctactccaactccgacgccaagcgccgacaacaacatctgtttgctgtccatttgatcttccaaaagcaaaatatgtattaaaaaaaaaacaaaaaaaaacaaagtattagtattattaatatatagatcaagatctaaaacgttgttactaatcgtaacaacaataaaaattgaatgataacaaacaaaaggtatcgatttatctataattctatattgactatttaacctaacttattcgagaatccaaccgaaactttgaaagtattttcaaagatttaacaagagaaatatataccttgtttcgtaagatatctctctcaaatcttttcttctgcagtttctttgtacttgttttggtcctaacgattcaatagtctgaaaaatcacagagagtagtgagaaccgtgaaaaccagatctatttacacgtcatcaccggtgttgaaaatgaggcaaagacggcggcggatatgagagatttagggttcttttaatgaagatttttttgatcgcttctctgcttttttatttcatgggggtaatatgtttgcacatgaaaactgatgagtcattaccgagactttgcgtacgtgttgtcatataaacggctactaggttggtttttcggcagttttttaattctgatgttgccgcttctttactctaatgccctttagttttttagtttctttaatttattccttgatagtttcggaattgtcattatagtccagctttaattaaattattccggtaaattttgttttcgattgtgggtattctgtgataattgaatatttttataggggtaagttatagatgttggcacaaaattaaacacaaaggaaaaaatgtagataaaacactaaaaaaaaaaggggtgcagactgtagaaagcatgactgtgttagatctggaaggcgtggctcatttagaaccgttggattgtataataggatcccacgtaagggaacaagttgacggcttagattgaaaggtatggcttctcctgtcttcgcagaatcgtaggcattattaaacaaatatatcctactttcaatcttttggtctattgattgactagtgatatttttctagtgattgaatgggctttttgttttggtcctcgaaagaaaaactaaccattcgaaattttgaagtcatatacacactatagggtttcttaaaaatatgtatgggccagtcttggatgttttataggaaaaacatatagcttctgaaaataatacatacactttgtcaccaaaaaaaagagtctgaagattggtatggatattgaaaattatacgattatttacactatatacgtataagtttaacaaaaagtcaggatggccgagtggtctaaggcgccagactcaagttctggtcttcgaaagagggcgtgggttcaaatcccacttctgacatttatttttgtgcatttctttttgtgcgttacttcctaattaatttgttcagagataagtttttgggttatatattattgctaagaaaataagttaatgaagaaaaattagcaatgttaatttgatcggttcaagttcattgataaatttggtccgctcaagttattcttccatccaagtgttgttgccttgattaagtgaagcagagaatgcaattatgcaaatggccaacgaattttgttaaatgtagaaaaatggcatatctaatgaaaagttgaatgggtaatctgctgaagaaaaattaatgcaacatgtttttcataaacatttggctatataaacatgcatgttacattgagatcaagaccataattatttataaaactcacaaaaggcaaacatcaagtagctagagaaatg

SEQ ID NO: 5915 - DNA, 3000 bp, Unknown
  misc_feature (1)..( 3000): cDNA_ID_3078906_gDNA_ID_1620831_Annot_ID_169672 3000 nt of promoter + ATG
gtggtagctacatacttttttagttaaattcgaatgtgtatataatatcgtttcaaatgatatggattatggtccgaaaacacacatttaaatgcacagtgggttatagaaaaatcaaggaaacaaccagccaatgtgattagaccaataaccagaatatgattttgtcttacatgactaacaataaatatgatgagtatgccaggcagaaagcataaatatatagcatcacaaaataaataacatattgtgttctagtgacaaaattaatactaaatctatattatttttatattttagacttaaatctatatttgtcaaaaaaaaaaaaaaaaaaaagctgttatttttataacttcacttaacctattgggctttccctcaagtttcttattggcccaaataaaatctcatcatagcatcgtctattctatgatccctataaacaaatttcccttaaatttcatacgacgtcgtagtcaagcatctaccttctcgacgacgacgacgtgctgaccccattgaacgctacactaacggagacgttaattaagaattcgtcgtctgtcttccgtctcaaagatgttactgttatttaatgattttcttagaaagtaagctattaattcccaacggccaagattgagttaaataaatcgacgggtgagattgaatctgtatcaaacgctcttatttagagagaggtatgactgaaagagacttttcgttttcttctccgtttctcgctcatcgcttactgaaaccagaaacaagtttagggtttttgcggaggtttcaaagttaacaatggcggaagagcacaagcacgaggaatcgatcatggagaagatctctgagaagatccatggtcacgatgactcttcttcttcttcttccgattcggatgacgataagaactctgcgtctctcaaaaccaagatttatcgtcttttcggaagagaacagcctcttcacaagcttttcggtggcggaaaacgtatggatctctctctctttttcaccgatttgcgattttagttactatttcttatcggatctggaatctagccattgattgagacttaggatttgatttgttgcttggattgagtatagattcagaaaatcaggatataaacgaacgatttggtttggtgtttgctggttctggaatctgagagtatctatggaatgagtaatttcgtaagcttattatcatttatttgtttgattcagctgccgacattttcctgtggaggaacaagaaggtatcaggaggagtattgggtgctgcaactgtttcctggatcttattcgagttacttgagtacaatcttctcacactcttcggccacatttcaattcttgctctcgcagtattgttcttgtggtctagtgctagtaccttcattcacaagtaagttttatggatgaatgtttatgtttattgtgagattgatgtttagtccatggtatgttaaagctgattgttgtattacaggtcacctcttcatatccctgaagttcacatccccgaggatgttgttcttcagcttgcttctggattaaggattgaaatcaatcgtggatttactgttcttagggacattgcatcaggaagagatcttaagaagtttctgttggtaaacctttttgttaattatgttgttgtttgattttgctggtttcttgttatttttttttaacattggttcacaaatatgttttaggtgattgctggtttatgggttttgtccaaagttggtagctcctgcaacttcttgaccttaatctacatcggtacgaatccatacttttattgcatctaatcgattaacttcaccaattgtgttttttttttttcgtaatatataatcctcttttgttctgcttccagcaactgtacttctcttcacgattcccgtgctttacgagaagtatgaagataaagtagatgactttggtgaaaaggcgatgagggagatcaagaagcaatacgtggagttcgacgtgaaggttttgagtaaggtgatgagcaaaattcctaaaggagcctttgcctttatcaagaagaaagattagagagtgtgtaagtttctctcatcatcattatccgagattattcaagattgatatataaatctcgaagcattgtttttttggctgttggttaataaccctttattctctcaaatatctgctatatggattttattcgggttttaaccaaattttatagcaatattgaatctgattgaaatttgaattgatccttttttcggataccatggtcgtcatgaatgttattatgataaatctttaaatattccgaacttaatttaatgtttacagaagttgattgttttgtaaagaaattgattgtttctgccattgatttcgcaaagttggttagaactatgaattcgtagaatgtttacagttttttcctaagatttacatgttgcactgattttggtgtcatctttcacattgttatttatctccgttttccataaagtgtatttaaataaatgagttcccctagttttagtgcaagtgtgcaaccattaatgtaaaacgtagacatatgtagaagtttatttttgacatgtaatctaagggatcaaattatggatgattctgtttgtagtttaaagacacattctattatgattctgcattttgggacttgaatatacatttgacagattcttgtaagtgaaacttgttacacagcccaataattttgatccgtgggggaaaagaggttatttaattgcactaaaatttagaaataagaacgatattaacttcagtagctccaacttaactgatgtcaaaatttaactagacttaaaaggaaaagagaaaaaactttattcagttggcaaaaccagaggtcagctaggtccgactagattaatcttaaccggtcaatgtaccgaccaattaatggaacctgtcgttttctgattatctcttatagtacgtacactcatg

SEQ ID NO: 5916 - DNA, 3000 bp, Unknown
  misc_feature (1)..( 3000): cDNA_ID_2042203_gDNA_ID_1620831_Annot_ID_169674 3000 nt of promoter + ATG
gaggctgttctcttccgaaaagacgataaatcttggttttgagagacgcagagttcttatcgtcatccgaatcggaagaagaagaagaagagtcatcgtgaccatggatcttctcagagatcttctccatgatcgattcctcgtgcttgtgctcttccgccattgttaactttgaaacctccgcaaaaaccctaaacttgtttctggtttcagtaagcgatgagcgagaaacggagaagaaaacgaaaagtctctttcagtcatacctctctctaaataagagcgtttgatacagattcaatctcacccgtcgatttatttaactcaatcttggccgttgggaattaatagcttactttctaagaaaatcattaaataacagtaacatctttgagacggaagacagacgacgaattcttaattaacgtctccgttagtgtagcgttcaatggggtcagcacgtcgtcgtcgtcgagaaggtagatgcttgactacgacgtcgtatgaaatttaagggaaatttgtttatagggatcatagaatagacgatgctatgatgagattttatttgggccaataagaaacttgagggaaagcccaataggttaagtgaagttataaaaataacagcttttttttttttttttttttgacaaatatagatttaagtctaaaatataaaaataatatagatttagtattaattttgtcactagaacacaatatgttatttattttgtgatgctatatatttatgctttctgcctggcatactcatcatatttattgttagtcatgtaagacaaaatcatattctggttattggtctaatcacattggctggttgtttccttgatttttctataacccactgtgcatttaaatgtgtgttttcggaccataatccatatcatttgaaacgatattatatacacattcgaatttaactaaaaaagtatgtagctaccacctagccaaatcaaatctctagggcttactattgcgccatcatgccaaacaattagcccgacaagatcagattttcttagggtagtaatattcttctcgtgatcaataggataaagagaacatattgtataactatctgaaatgatttgggatcgacgtttagttaaaatatataattaacttaatcattgagtttgacggaaatagctaagctgcaaatgcaatgaagcgtttttcttttaccagtaaattataagatttgttaaattcgttggagtcaaaatatggatcactctcatccaaattcattttaaaacttatacattatgctattagtgtatcaatctcaaccaaaaacgtaatagcttctttatattttggaggaagtccactaaagctgaatttcggggaagcctatcaaacaacgagtgactagcttctttgacttgcttttgaaagtgctttgcccttttgaattttagataaagcgaattaatgaggagaaagaaagaaatttttgttttattttgacgagagtgtgtcccattcatttgtttaccaactcaagctctataaacttattttcagaaacactaatataagaattatacatgattgcagtatgaatccatgaattggattaagaaattaaatggaatagaaaaaaaggattaataaataaataaatggatcatacgaaatcacgtacacatgtacagtgtaaagggcccatcatctttactgattttgggaacttgatgaggcccattaaagaagggtgataatgggactttggggtctacatccattgaatctgacggcctgaaattttttggcaaataatgatgatgttaataatacgtctcggaactacaaactttacacatatattgtgcatattttttacaagtagtagtaatattaaacattatccagattctttcagaatcagtttagtttttttaaatgctttgtaggcgacaccatcaattttgtcgattcccatatgattaatatattactacttagtagtataatattatgtaacataatctcgtaaacataaaacaaaattgcactaatttgtgtttcaaatgcaagattttctttggttcaaagtagtgccaaaaagtatcactattatttatgtgtactatgtagaaaataaaagagtacgtatataaatactttaatgatctctgaccttttggtctgactgtctcagtctgaaagtcacgtgactcagctgctccctacgcttagcaacgcaacgcaacgcaactctttgccacgttttttcttatttgcctctgcttcttttgttaaaacatggcaaaacaaaatgaatttacaaatttataacaaaataaaatttgttttattgtgaataatttcaatttttaaatacatacaaaaacagtatccaaagcttttttttttctttttgtggttgtggtttattttctttcagccatagctttgtttgtaaaacgtaaacacaaaatttaaaattttgcctaaaattttagttttttttgtctgtcaactatatacgaaaccttttattgtatcaaatcaatattaaattctactgtattagttttattatggtttgttatatttttcttccttgtaaaaaccaatgtttcacaccaaacagtaaacataaaaatattgtcttgcaatgtaactaaaattactaattatagacttatgaactgtaacctatggttattaaagacagataaattagcatagtctttaagtacgttttcttttgtcataactatttcataccatttttatgaaaatggaactaaaagcaataaagaacattatatatatcaagaaaaaataaagtaataatttttatatatatagctttcactcttctcttacaagcactgttattaacccttctttttcatctaaaaggagaggagactttgaagaagaaagaaaacattcaaagctaaaaaacgcagcgttttaggaaaaaagaggtagagagtgattctggctttcccaaca

SEQ ID NO: 5917 - DNA, 3000 bp, Unknown
  misc_feature (1)..( 3000): cDNA_ID_3078902_gDNA_ID_1620831_Annot_ID_169673 3000 nt of promoter + ATG
cctcagtttcggtaacagaggtgacaatggtggtggttccgatggattcaccggcggagtaacggcaaagagaagaagaagaagattcggaggagtgaggaaggaaagtaacagcaccaccactgtttttccagtagttaaggagactgaaagcttccattgttgggaaagccagaatcactctctacctcttttttcctaaaacgctgcgttttttagctttgaatgttttctttcttcttcaaagtctcctctccttttagatgaaaaagaagggttaataacagtgcttgtaagagaagagtgaaagctatatatataaaaattattactttattttttcttgatatatataatgttctttattgcttttagttccattttcataaaaatggtatgaaatagttatgacaaaagaaaacgtacttaaagactatgctaatttatctgtctttaataaccataggttacagttcataagtctataattagtaattttagttacattgcaagacaatatttttatgtttactgtttggtgtgaaacattggtttttacaaggaagaaaaatataacaaaccataataaaactaatacagtagaatttaatattgatttgatacaataaaaggtttcgtatatagttgacagacaaaaaaaactaaaattttaggcaaaattttaaattttgtgtttacgttttacaaacaaagctatggctgaaagaaaataaaccacaaccacaaaaagaaaaaaaaaagctttggatactgtttttgtatgtatttaaaaattgaaattattcacaataaaacaaattttattttgttataaatttgtaaattcattttgttttgccatgttttaacaaaagaagcagaggcaaataagaaaaaacgtggcaaagagttgcgttgcgttgcgttgctaagcgtagggagcagctgagtcacgtgactttcagactgagacagtcagaccaaaaggtcagagatcattaaagtatttatatacgtactcttttattttctacatagtacacataaataatagtgatactttttggcactactttgaaccaaagaaaatcttgcatttgaaacacaaattagtgcaattttgttttatgtttacgagattatgttacataatattatactactaagtagtaatatattaatcatatgggaatcgacaaaattgatggtgtcgcctacaaagcatttaaaaaaactaaactgattctgaaagaatctggataatgtttaatattactactacttgtaaaaaatatgcacaatatatgtgtaaagtttgtagttccgagacgtattattaacatcatcattatttgccaaaaaatttcaggccgtcagattcaatggatgtagaccccaaagtcccattatcacccttctttaatgggcctcatcaagttcccaaaatcagtaaagatgatgggccctttacactgtacatgtgtacgtgatttcgtatgatccatttatttatttattaatcctttttttctattccatttaatttcttaatccaattcatggattcatactgcaatcatgtataattcttatattagtgtttctgaaaataagtttatagagcttgagttggtaaacaaatgaatgggacacactctcgtcaaaataaaacaaaaatttctttctttctcctcattaattcgctttatctaaaattcaaaagggcaaagcactttcaaaagcaagtcaaagaagctagtcactcgttgtttgataggcttccccgaaattcagctttagtggacttcctccaaaatataaagaagctattacgtttttggttgagattgatacactaatagcataatgtataagttttaaaatgaatttggatgagagtgatccatattttgactccaacgaatttaacaaatcttataatttactggtaaaagaaaaacgcttcattgcatttgcagcttagctatttccgtcaaactcaatgattaagttaattatatattttaactaaacgtcgatcccaaatcatttcagatagttatacaatatgttctctttatcctattgatcacgagaagaatattactaccctaagaaaatctgatcttgtcgggctaattgtttggcatgatggcgcaatagtaagccctagagatttgatttggctaggtggtagctacatacttttttagttaaattcgaatgtgtatataatatcgtttcaaatgatatggattatggtccgaaaacacacatttaaatgcacagtgggttatagaaaaatcaaggaaacaaccagccaatgtgattagaccaataaccagaatatgattttgtcttacatgactaacaataaatatgatgagtatgccaggcagaaagcataaatatatagcatcacaaaataaataacatattgtgttctagtgacaaaattaatactaaatctatattatttttatattttagacttaaatctatatttgtcaaaaaaaaaaaaaaaaaaaagctgttatttttataacttcacttaacctattgggctttccctcaagtttcttattggcccaaataaaatctcatcatagcatcgtctattctatgatccctataaacaaatttcccttaaatttcatacgacgtcgtagtcaagcatctaccttctcgacgacgacgacgtgctgaccccattgaacgctacactaacggagacgttaattaagaattcgtcgtctgtcttccgtctcaaagatgttactgttatttaatgattttcttagaaagtaagctattaattcccaacggccaagattgagttaaataaatcgacgggtgagattgaatctgtatcaaacgctcttatttagagagaggtatgactgaaagagacttttcgttttcttctccgtttctcgctcatcgcttactgaaaccagaaacaagtttagggtttttgcggaggtttcaaagttaacaatg

SEQ ID NO: 5918 - DNA, 3000 bp, Unknown
  misc_feature (1)..( 3000): cDNA_ID_2054192_gDNA_ID_1620831_Annot_ID_169683 3000 nt of promoter + ATG
tcttaaattaagagatgctatatcagaaactaatattatattttagttaaaatctatttaaattttaaagtaaactatatattggatacaatataaggtggtgctaaagtcaatattaattaattttaagtttttaccaaaaacataacacataatcattgtaatatctattatgaatattgaataatcatactctagaaacttcacttaaattttatttataattaaataacaaaattcctatatataaaagataagatatttaaattaaaatttcattataaagcctgaaggatcctaatcatgattatcataaaagtgtatatatgattaaaaaagtttagttctcctaacagatatcagattattatatggtatgtatatacttttttttttcccctaattcgaagatgcaccaagttctatcttaattagatactaggcatcttatattttatatatatatttgtgtgctcagaacaaaaattaaaaggaagaaccaaaaacttagcacatcagaaatcgcagagcccttctctagcactcaacacgaagaaaaagcaaaagatggattctttgcaagaacttcttgacaagaagcaatacgacgaagaagcaaaacgtccatgtcaagaagcgatgaagaagcaaaacgacgttgctcttttccttgcgggggaagtaatctctgccgcagacaaaaactctaacgtcgtcttctctcctgcatctatcaactccgttctcaccatggccgctgctacctccgacagtgaagcactaaaatcttgcatcctctccttccttaggtcttcttccaccgacgagctcaacgacatcttccgcgaaatagcttccgtcgtcctcgtcgacggaagcaaaacaggtggccccaaaatcacggtggttaatggagtgtggagagagcaatcacttccgtgtagtcccgagtcgaaagatctctttgagaatttctacaagtctgctttcgctcaagttgatttccgatccaaggtcagtttctgatttcgaatttgctttgattaaattagggcaagagattgtgtgaaacgagtgcttagagaaactacatatcgtattcaatgttttggtttgttgttttgaagtttgaagaagtgcgtgaggaggtgaattcttgggcattacgtcacaccaatggtatcatcaaagatcttctacctcctggatccgttacaagcgaaaccttgtggatttatggaaacgcattgtacttcaaaggagcctgggaagacaaattctataagtcaatgacgaaacacaaacctttctaccttgtcaatggcaaacaagtacatgtgccattcatgcaaagctcacaaagtcaatatgttaaggcttacgatggtttcaaggtccttagacaaccataccgacaaggcgttaatgatacaagtcgccaattctcaatgtgtacctatctcccggacgagaaagatggattggataatcttgtggagaaaatgacatctactgatggattcttggacagtcacattccgagttggagagttgaagttggtgaattcagaattccaaagtttaagattgaattcggttttgaagcttcaagcgttttcaatgactttgcgcttgatgtatcattataccaaaaagctatgattgagattgatgaagaaggtactgaagctgcggctgctactgctctagttggtgcttgtggctgcagcctttataggcctcctcctcccatagattttgtggcagatcatccattttttttctttattagagaagacaaaaccggaactgttttgttcgctggtcaaatcttcgatccttccttatcttcttctgcttaagatcggcctaaataggagtttgggattttaagatttggtttttcatatgatttttgagttttgtttttggttttgctaaatctctatttgctttatcttattatataaagtattaaagttagtaactcaccacagtgttaattttaacggtctcagattttcaacatgtgaaacaaaaaactcatttatttattttaaaagaggaaatttatttatttaaaaaaattaaagaagattcttttttttggtgaagaaaaattaaagaagataattataagaaaactataaatatcttattaaataaaaataaaaaatattttataattctaattaatagctactaattcttgaaaacatgcaaagggaaatttactaattcttaaaaaaaggaaattttcctttaatttattccaaaaaagtatttctaaaaagtcaagagattgaaaatatgaaaactatatctcttattaaataaaaataaaaatggataaataaaaattttaaaaaggattttaaaagttatataatgttcatataaaataatataactaagaaaaatttacattcaattattaattctaaaaggaaaagaattgtgaatctcaccaaatcaccagttatttattattttaaaacaaataatcgaacaaatcaacccaatatcctaaaactttcctcaaatctctcaaaaacttcaaataaacaaattccacaaaatattctaaatttcttgttccaactggaaaaattaagaagaattttaactattttttgttttgggatttatctttatacaataaaaaataattacatttatttcaacgtaaatttacttttgttgactctttttagttttacctacctatttgaaaaaaaaaaaaagaagaagaaatattaactcttttttccagtgagtgtattgaaatatgaagtttatctaaattaaacctttccggattccatcattcaactaattaataaagaaatctacattttaataataatttgaaatttcctaaaatatcatcaatatgttcaatacaaaaagcacatccaccccttaactggtttacatcatgtaaattacatgtctgagtcctctatcttttctcttccgttatagtcttatagatcaaaa

SEQ ID NO: 5919 - DNA, 3000 bp, Unknown
  misc_feature (1)..( 3000): cDNA_ID_2042225_gDNA_ID_1620831_Annot_ID_169681 3000 nt of promoter + ATG
atgagagttacctaagcaactagtagatccttgtccacatatctccttggtgtcgttatctctctgtgtcctcaccgtttcatctaaaaggatcaatttcgtccttctcggagtgccattaccactactacttctagaaagttttcctcttttcctaggagactccgcactttctggactagcaatcggtgaataaccattttgaggctcagatgaattgtcaacccgaagtttagtaagcctatcatgtacaaagtcatgtgaatgcattaacttgcgccataacgatgaatcagacgctccactgctacttcctgctcctaaatcaagaacaagactaaatcaaaacccatccaaccaaacttgaaaaagtttgcaaatttaccaagaacaaaaacacaaatttggatctacaactataaactgtactcagtgtaaagaagaataatttcaaaatccccaaatgaaatttgaagtcaaagtgaagagaaattagctaacctttcttgttgattgaagcactactacaacgctcaattgaagaattaacaccaatcgagacacgagccttgtcacagttgttatctgctttattcgacgaaaccctaactccaccaccacacccttcagatcccataagcttagccggcaacgaaacatccacaggacaagaaatcttcaaaccatccatcacaaacccaaatcgaaaacatcgcagccgtgtaagctgcgatacgaactcatcatctccttttaaaccaaaacccagatagttcgatcgagctttagagaaagctaaatcttagaaatttctggagaatagtgagctacaagagtgagattgatttggtttttttttcctcgatgaagaaacgcaatggtgcggctgcgtgaatcgagggattttaatctagggcaagaaaatgaaagaggagaaaaaaaagatgagtatttatagttttcgggaaattaactttggccttgttttagataagccgtcgacggtgagattgttccggtgagctcgtctgtactggtaactctgacgtggctactacattattgcgaaacggagtgatttagaaccgttggatgttgactgatgacggggtttttatgatcttgttggttaatagagtgacacgtattcaagtgaagatttcacttggttcatgtggtttgatatgagtttccaaatatgccactggtggattctcaggtgtttgcttggagcggagggtgtttttgattttgacgaaattatcccttatctgaatgttaacgccgttagattgtgttggttccgttaacagatttttgatttaactatttcggttcaaggtcttcttgaacaagtcaatgaagttacattgacaaaaaagaataaaacatgaactttacaatattgaagggattgcttttgtatttaaagttagtttttacaggtagtgattgtttggatatgtgctctatttcttttgtttatttgtgttcgtttttgttgagattatggttgtgtaagcgtggtttagtatttgtttaaaactattgaggcaatctaatgttgggtcctcttggaagatcatctttgtaatctttctcaatacatcaaactgttttgtcaaagagttttcggctatgttgcttttgaatgtggtatttatatattccgtgtgctttaaggttcttctttctttatatccgctttttaatttttggttttagagtttttatgtatccgccagttttatttttagaaaaaaatttttttttattaaatataactatacatatcatagataaatcatttagacgagaaaaattaaaaagacgttaattttatgtacccgtcaattttatttttggaaaaaacaaattttcttattaaatataactatacctatcatggatgaatcatttagacgagaaaaattaaaaagacgtttaattttaaaagcataattagtttcagatcattttaaattatggaaatttaatagtaaagtttcttaaaaataatatgtattactcaaaataataaattttctaaaaactttctttatctaaaaaacatgtcttaccaacagttgatcctaaaccaaaacaattatgaatctaaacacttagaagtttttttgttaacaaaatggaataaaataacaataatccagttttgtcttaaacgtataaagccttattgttttatattggattagcaattgggcctgaaagaagaaaaacaatcatatgggccaataggacttggatctatattgcttcaacttattacaatattcatgcatgtgtggaatttggctatgtcatgtggatggataagcgttggcagagtcttcgttacgttttcataaattatctaaacaacttaattacacaatattctcaggtattggcaagaagaaaaaaagaagaagaagagaaaaatcataatataaatatacttctggacacgttgaagagacatatttgatgactagtctaagcaagattccacaaaaatgaagcatcgattttgatcaaattattcggacttcaaaatatgaaaatagtatagaaatattttctttatgtaatattcaagccgcattttgacaaaaataattaataaaaaaaatgtaagagtatccccatctttagtttttaaaataatagaaaaaataaatttggtcaaaagacaaagccgtcccttccggttcacacgagccgcacgtgtgctttccttttttctccttccccgttctctagccgattctctctgtctagggctcctccgtcttcttcttctcataccttcacataccacaaaacctctcttctctctctattgattctctacgaagaggaaagtgattttgaaccatcttgatcggaaacggcgtttcgaaactggaggtcgaagacgaaaaaaactcttatctcatcgctccggtgtaccgaattcgagaggtttttgttaggtttcgtagtgattgattgattttg

SEQ ID NO: 5920 - DNA, 3000 bp, Unknown
  misc_feature (1)..( 3000): cDNA_ID_2042217_gDNA_ID_1620831_Annot_ID_169678 3000 nt of promoter + ATG
ggcaagatatcagatttttatgtgtaggaaaaccaaagaagaagaaaacgaacaaaccaaaagttaagacttttctttactgttcggtacggtatgcttcaagttttaatcatcctacatatatttaagatgtgtgtagtcgtcgagtagtaacacttatcatattttctaatgaatctaaactatgaaactattttgacaaagaatcctaataaaaatcgaacctaatcaagaagaaaacgaatttgctatatcataaaaaaattaccactaggccactactttctaaacttaaagttaatccatcatatttccaaatcgtttggtaatcaatggatcggataaatgaactgattagtgattacgtactatataattaacagtcatgaaaagcaaaccgcaaacgatacgtcaaattttaaaacttgaaaagtcaagcagtgggttaactttctttagatttatgaaacaatgttctatattctaaatagtttcttacagtaaaattcaaatctatatatacacaaatagaaaaatgattggtttttgtaacttgggttggtagaatattcatatcacatttgacatttctattcttcaagaataacttatgggagaagttactttcgttcgaaaactataaaagttgcagaagatagtgaagatagttgcagaattgtattatatatgttatacccagttatgtgtgcatgtgtgtacatatatatatgtgtacactaatacacacgtttttctatgaaatacgagtttgttcaaaaacatctgacttttgttcattcatataaaatgttaaacgaacttttcctactttttagtgaatatatttcgtcaaattgaaattgatgccaaaattaggtataacgtgaaaaacgtatatgttttttaaaaatgagattagttacgtttgaaaatcaaatcttttcacatttcactttcatacttggagtttttgttttgttttataacttgtgtatttactactacaactgtttgcacaacataacattgaattgaaatctttatatattaaaatgaaaacactcaaccccttaaaatagaaatggttcacattcgagtttggttattattttctgataactgaattagatgccgaaccaaaaccatacaaatttccgagagatgtagaatgatgggcattttaatcgtaccaaacagaaccgaaccaaaccaaacaaccgaaccgtagtgacgtagtctacatctaacccatttggttaaacttttttcaaccctaatggttcggtttgaaccattaaccctaactgttttttaatttataattaatttcgttaggtagataatattacatgcttgattttggttatttatcaaaactaagtttacttagttctttcaatccttaaatctctaattctaagctacaattttataaggtatggaaaaaactattcatatctcatttctattccgttacttttcaaaaatttcaagttttttttgactaagaaaagattttataaaaaaaatatggctaataaccacaacgtttttcttgagtattattattaatagactaaacaaatacaaataaagtttaccccactcgaatataaatatttttgaggaaatgtatctactatcttcttaaacaacgtcgtgtcattactcaaaagtgtccaacgggcaatacaagattatgatggacgacccatgattaaacatgttcgatctaatctaaaatctttttagtctatattagtgaagcactgaaaacaaaatgttgttatcaaatttgatttgttcttgttaacaataaattcttttcaaaagtgagcaaaatatttgtagtcgtggacttaacaacaatacatcaatcgctaataaaacactggcttccacaaatgatgtataaaaactatattcaaagtcgtcgtccttgttttttctctcatcagttcacaaacaagctcaactttggataaaacgcgtcggacgtacgaaaaaaagaagacttgcagagaaacaacagtcacacacacaatcacctcagatttaaaaatattcctttggtattacttgaactaacgtcatccgagttgtttctatatatatgtacatatattctttacatgttatttatagctaattggaagtttttagtgcttattgctagctactaattaataacgagtttaattctaatgaaaattggacacaaaatctgatactaagttgcctatataagattagaaatttaaactaataacagttacatatatacaaaatcgtgttgtacctcatataattatggtgcatttgaataagatatctattgaaaaatatataatgaaaaattaaattggtactctaatcaaaaaaaaaaaaaatctttaacacatcaaatgttcaatttttttaaaagtccaaatcgttttgatattgttttttattgaagagcaaactactataagaaaaatatttgaagaaacatagcattttcccatgcataaactagaatgaccaacaaagatactctcaaagtctcacttgtctaaaaaacagataaaaatcatttccaattttgagaaaaggaaaaaaaacaactccaataatactttttgattttcttttcgttgcattaaaataaatgtggcaaaaatccaataatattactattataagttaaaaaaactcaaaaaaaaaaaaaagtatattccgtcaactttttctcagtccggttcaatcatctccatcatcgttgatctctctctctccgtcaacgttctctctataaagcagagagtttcacagcgcgtgaaaaatggcttttcccacttagccacaacgacgcgtttcaattctccatctctccctctctctctctctttcttcaaagattccaccaacctatacatatacttatatataatctatgctacgtgtatatacttccgatatccttcaaccaactctttgaattccgactttggatctatg

SEQ ID NO: 5921 - DNA, 3000 bp, Unknown
  misc_feature (1)..( 3000): cDNA_ID_2054198_gDNA_ID_1620831_Annot_ID_169675 3000 nt of promoter + ATG
atcttaagaatgtgtgagtgtgatcatctctgcaagaatgtttgtacttcgtttgtctcctttggaaaacaaaaatcatatagaaaatgaatgagtatatgtacatacatgagaaataatgtacccacctctttatttttctctgtaatacctttcatatttttcttaacaaacatgtaccatttctctttcattgttggaacatttgttgatggacctaattgtcattgcttctgagccactaagcccaaaaattaaaattattaaaaggcccagtggagtttgtgatcacaaacctaaagaagtttagtgtatgaaccatttaatcaaaggaggtccaatccaatagtggtggtatctatgtgagaaactgctattgttacagataaaggactcagcaggagttggacctttgttgcaataactgtaagccttttttaaaccaataactaagacttaagagttaagaccaaaccttgtaagattttttactttcaagaacatcgatttaagattttggtgaatgtagtcctaaaattttgagctgaagtctgacctaaattgcaagatttcacagttgccatatcaatgttgacgtcgtctaaaagaatacgtcaaggtaaaatattttcttgagttaattttgagttcaaccatttgaacaaattaccataagattactatttcaactgtttgatttcagagttgcctcaagagttgttttctcatacgtatgactgactttgtaaggctggttttcatacaaaaaaaaaaaaaagagactttgtaaggttgcttgcgtatctttatctttgatcatgtctatggtttcttaaaccccgcttactcatatcaccaaaaatactgaaattaattttattttgggatcattgtgctttatgatcttctttttttctcaaacttttgttgaagtatcgaacatgatcacattttatttttgtttcttaacgagaaagttttagaagagacctagtaagtagtaagcatcaccacagtacctatatatcttgatttgttcttaaaactaggtcccctgagaacctttctccattccatttcgcccgatcgtagacaaatgcgaatagtatttattatgagcacattggtccactaatcatcgtcaaatttctccgtacggattctaatttttgaactttaaatcaaagacattaaaagagaaataaaagtcaagtgataggtttcaaaacaaaagaactaatactatttaggtattgtaagtttcccaaaattgatgaaagaagaaaactgaaacccttcaaaggtttctaaaaacaattgatgttagttgaaacatttaaatctttgacgtcgtcttcatctaaagactcttctcctttcttttttttcactggactcttctgctataactcgcttttataaacgaataaaaataaaatcaaaattaacacacaaaaaagaataaaataattaaaagacaaaaatcaagccctccggaaaagacttattaaggataaaaaacaccgcgtaagactctaacttaacacgatcgtgccacgtgtcctccagaaatccctcttttaaccgccaaaaaagaaaccacccactcttccattaacattaactttcctcatcttcttcttcttcttcctctgatctaaacaacaaaacaaaaaatggtggacgaagatcggataacactagctcctaccgagatctatggcaggagtgatgaagaacagagcggaccaagaatctggcgtcggaaaacagaggaaccaccagggaaatgtctagtctattccttaacaataatcgtcatcatcttcgcactttgtctcatcctatcttcaatctttctccgtatctcaaaaccagagatcgaaacaagatcaatatcgactcgagatctacgatcgggaggtaattcaacaaacccttacttcaacgccacgctagtaagtgatatctcgatcagaaactcgaattttggcgcgtttgaatttgaggatagtacgttacgtgttgtttacgctgatcatggtgttgtgggagagaccaagattgaagggagaagagtggaagctcataagacggttaggataaccggtgttgtagttgagatcggttcgtttcggttattggatactaaggatttggataaggatttgagattagggtttttggagttgagaagtgttgctgaggttagaggaaggattaaggttttgggaagaaaaagatggaaagttagtgtgatgagttgtaccatgagactaaatttaaccggtcggtttattcaaaatttgttatgtgaatagtagtgattgattgatcggtttcatgatccggtttaagaagatttatttgtttgttgttttttttttgggtgttgtgtttttgcggtattgtaattgctatggtctttgtatatgaacggaacatcaatattgtagaaaagaaaattagtcactacaaaattgatttgtaaaataaataaataaattgattagtatgaatttgtaggatcatcatttgagaaaaacgaatgagaaaactaagaattttctcaataatttaatatattaaatggtgaaataaagttggaaacttctcaagccccacatgttgacccattcatgcatgtacacatcaaatcgacatacgtatacatccactatattaatagttttttttcaaatttttttttttttggtatcaaaatattactcttttgagtttcgacatctactgagacattacgacaatttaccctaacaaaaagaagaagaactaaatagtgttttatgaggtataccggttctcttgtttataatttttgagggaccgtaaaagtggagaaaatttcatactcaccttctcaaaagtaaacggtgaatagtgaatatgctttttacattttctccaacatatatggctcctccagagacatttttgtttatctaatcgtcaaagttttatcgttaccctaatctcatg

SEQ ID NO: 5922 - DNA, 3000 bp, Unknown
  misc_feature (1)..( 3000): cDNA_ID_2054208_gDNA_ID_1620831_Annot_ID_169669 3000 nt of promoter + ATG
gaacatggatacaatgaaagcgagaagtgctaccggatctccagagactgatgttgatctcaatgagtatgaagcaggattggggttagctccggaaggaagagtccatggtggaagtttgatgatggcgatgttgggtagagatggtggctctggctctaccggtgggccaaagaggtggatgtaagttgtcttcagtttggttccagtcttgaattcaatgcgtgtgggcaagtgagagtgaaagagtctgtggttgttctagttttaggtttgcttagagtaaaaaaaagggtccaaagtctgtgtcttattggtctttgtagatattgaattaaagggtcgaagcataggttattgtgatgttgtgaattatacaggtaaaagcccacctgtggaaattgtcaaaaacagtcttatgatgatgatgataataataataaaactcatgtcttttgtttgcaaattgcaattttatcggtagggcaggtttgttgggatcatgctgagtcgatgccagtgtgtttttactttttagcagttacgttgaaacattcacaagtaggtacttaatatgtagctatatattaaaggactggatagtacaacaactcatgggaggttctatatctattttatcttcttagagatccctttattgtatagacgcgaggaacacttgtcatatatagtttggatcgattttacgtcccacgggaccattacttaagacgtcgtaggagctgaccaccagtacgaagaaccaactcattgatatagtccacaaggaattggacttggtcaaggtctttgatctcagggccagtcttatcgtactccacactgatatcgacgaggctatacaagccaatggcggaatcattaacttttgtagttgatgtaatcatcttatagccttcaaagaattcaggtacggtaaaccgttgcgtcatgcttctcgtttcgtgatccactgactcaatggtcatgtgttctcgttgccaaggccttatctctaataaccaacataaacaattacgaattatgaacaaaacatatgaataaggtgagagttattataaatagatacctgaagggttctaattagatatatgagtcatatggtagaaaaaactatcccagaatagttttggtggaagcgaaaacagaaactgcatctcacaaagtcgtctcaatgccatttctctagctacttgatgtttgccttttgtgagttttataaataattatggtcttgatctcaatgtaacatgcatgtttatatagccaaatgtttatgaaaaacatgttgcattaatttttcttcagcagattacccattcaacttttcattagatatgccatttttctacatttaacaaaattcgttggccatttgcataattgcattctctgcttcacttaatcaaggcaacaacacttggatggaagaataacttgagcggaccaaatttatcaatgaacttgaaccgatcaaattaacattgctaatttttcttcattaacttattttcttagcaataatatataacccaaaaacttatctctgaacaaattaattaggaagtaacgcacaaaaagaaatgcacaaaaataaatgtcagaagtgggatttgaacccacgccctctttcgaagaccagaacttgagtctggcgccttagaccactcggccatcctgactttttgttaaacttatacgtatatagtgtaaataatcgtataattttcaatatccataccaatcttcagactcttttttttggtgacaaagtgtatgtattattttcagaagctatatgtttttcctataaaacatccaagactggcccatacatatttttaagaaaccctatagtgtgtatatgacttcaaaatttcgaatggttagtttttctttcgaggaccaaaacaaaaagcccattcaatcactagaaaaatatcactagtcaatcaatagaccaaaagattgaaagtaggatatatttgtttaataatgcctacgattctgcgaagacaggagaagccatacctttcaatctaagccgtcaacttgttcccttacgtgggatcctattatacaatccaacggttctaaatgagccacgccttccagatctaacacagtcatgctttctacagtctgcaccccttttttttttagtgttttatctacattttttcctttgtgtttaattttgtgccaacatctataacttacccctataaaaatattcaattatcacagaatacccacaatcgaaaacaaaatttaccggaataatttaattaaagctggactataatgacaattccgaaactatcaaggaataaattaaagaaactaaaaaactaaagggcattagagtaaagaagcggcaacatcagaattaaaaaactgccgaaaaaccaacctagtagccgtttatatgacaacacgtacgcaaagtctcggtaatgactcatcagttttcatgtgcaaacatattacccccatgaaataaaaaagcagagaagcgatcaaaaaaatcttcattaaaagaaccctaaatctctcatatccgccgccgtctttgcctcattttcaacaccggtgatgacgtgtaaatagatctggttttcacggttctcactactctctgtgatttttcagactattgaatcgttaggaccaaaacaagtacaaagaaactgcagaagaaaagatttgagagagatatcttacgaaacaaggtatatatttctcttgttaaatctttgaaaatactttcaaagtttcggttggattctcgaataagttaggttaaatagtcaatatagaattatagataaatcgataccttttgtttgttatcattcaatttttattgttgttacgattagtaacaacgttttagatcttgatctatatattaataatactaatactttgtttttttttgttttttttttaatacatattttgcttttggaagatcaa

SEQ ID NO: 5923 - DNA, 3000 bp, Unknown
  misc_feature (1)..( 3000): cDNA_ID_3078914_gDNA_ID_1620831_Annot_ID_169663 3000 nt of promoter + ATG
agtaaaacttttattcttagcttctgtgtttacatttttaacaacattttttatcttctccagtagtccctaaacgaattaatattctttcttgcaaacaatattttatttttaacgttttcactaaattgtatctaatgtttacaattacatagcctacgtggttacattctcggctaataacacaatgttcctttccaaatgatatataatgtatgttacagttccagtggcaaaaaaaaactagaaactctccaaaacggtgagagcagagcatgagggtagagcatggttcatgtacataggattctagcttatttggggcctaagcataaatggtggactggatcagacttatgatgggcttgtggtgtaaacctaatataattcagaatcaaaccctcagggccaaatggagagcagattcggtcacaagtgtttggggccttaactaaatattggctcattcaaatgattactggaaatagaaaaattacagtacctatgtttgaatttggggaaattaggctaatttaaaggagttttacttgacaggattaaaagagtttagcttttaccgttatacacaagtaaaagagttttggtctactgatcgaccatggtgcattgcattctataaaagtaatattttatatgtttcatttttttttctgtcaatgacacattaattaaaatatcaattctctgataatctaatttaaaagacaaaaaaattacaaataaaatttcagaaaataaacttttaggacaacggagtagacaatatgttttagcattacaagaataaagaatacaaaagaatgaggctccatctcttttgtataaaagcatcattagcggcaactaatttaaccaacaaaaaatatatggtaaaataaagttggtaaaaaatattaaatatatttagttttcttagaccaaaaaataatcatgtggtctggagaaaccatgttagaattcgaattggggtgatcaattatactacttgaacctagttggcagagatttttgtctcttttaccaccgtaccatatcgacttggtcaatatatttagaattttgacattaaaaattaaaaatatcttttaaattttagattttctacgaggttgtttgaaataatatgtagaaaattgtttttcttatggaatttaaaaagctatattagagtaaccgacaagtaacaccttgactttgtagattatatataatgagacgaccattttcatccacaactaaattttcttttcttgtttttgtttgttttacatttcttagacgtgggacctaattacaaaatactccaataatttaggttgaaaattgggaatgggcaataatacttgatagtgtattatattgtctcctacccgttttttaagaacattaatatgtattcacccttagcggaaattggtgtggctttgatcgaggttgaactttgattctagtgacaataagaaaaagaaatggctactagatatattttaatttctttgtttataaaaaacattgttttttaacatgttttacgcaaattatgtaaatttctattataataaaaatatgatacgataattttgtagaacaaaaataaaaatttaaaatgatattttttgtgaaacggaaaaaatagatacccttaaattattaaaataaaatattctttcttttaccaaacttactaaaactaaatctcattctcattaattaagactcatatctaagaaaaatgtacatggtgtggtttatatacaaactcatgtgtggactaaaccaaaaaccttaaccaaaaacaaaaataaaatcttctaaactggtttatacttgtaccattgtacaattgacaaatgaacctaagcattatacaggacggatacatcaataacatatttgacgagaccaagtcagtctagtcgtctcaacaataatagtaaaactcatttttttgtccccaaataataaaatatctacttaacttaagttgtggagagttttgtaaaacaaattggttttcgctgtcccaataagaaaacatttctccaaaacattgtataaattgaacttcgaagttctgcaaaacactaaacgacgtcacaacgtaaaatacaaaattaaaatagaaaaatgttattgtcaataatacacatacatacacagagaaatgattttagaaaatacacaagtttcagcttagaaaaatcgacgtgaaaaatgattaaaagacagtttgcaatcagagtaattgataaacaaatattttaaaacaacaatcaaagatatgaaccaatcaggatctaagacatgatatgttctagcaacggaccttctgtgtcaagctcatctatgtggccttcaaaaccagcatatacgagaacagctaacactatcaacaattgaagtcgaactttaaagtgaagaaacaggaaaaaaatccggacaatatcaaactttttcctctaaaaaatattagtttggattgcgcgacatgaaaactttctgattatagaatatgaaagtataacgatgacgttttgtttttgacaaaatacgatgacatctaatttatttatcttttatcaacacacacaacataaagcatagtccacaagcaatctttttttacaatgtgatggaatctgcttgaatattgaagtaacgaaccagtgtccggtttaaccacaccaaaatttgaaatggcataaaccggtgacattgttagtccactttataaggttttgtcttggcctgctctatcagatttcattagtcagaaagtaaatcgaaaaatcttatcacctacttgatataccctacggacactattttcaaaccaagttgttggtttgagatcttatgtatatatatattacatacatacacatatatagaccacataagatactctagggaatcacaataagtcaataatgattatataagtcagacacaaagatatttacatttttgcagacaata

SEQ ID NO: 5924 - DNA, 3000 bp, Unknown
  misc_feature (1)..( 3000): cDNA_ID_1989673_gDNA_ID_1620833_Annot_ID_57898 3000 nt of promoter + ATG
agccttatcttaattcatctttaatcctatagagtaatataagctaattcttattttttcaataatcagttgtcatttgcaacggatttcatctacaattatttgtcacgagatgttacagctagtgtcgggtatgacctcattactagacaggtacatacctcattccttttggtcccattcgagttttgaaacagcaacaaagcgctgttctaattatgggtttggttgtggtttggtgtagtctcgattaagaggaaaggttgattctaacggtgttgtcgctgcttaccttgaagaacaattgcctattggactcagatttcttctatctgcagaggtaaagaaaatgatttaatccgctactatacattttttagtgcatttgttaatgactagtttttgataatgactgatttttgatattaaatgaaccaggtggatcatgtgaagaaggattacaagtttggtttcggtgttaacgccttttaattccatcaaatggccttcacaattagttagaaacctcaagatttggttattttttgatgttcagtttttttagtttagatatttttactgtattgctcccacaagaataaaagccaaggaggtttcttcatttcacattgaggaagagcctttcttgtttattatttaatttaattaatgtgtaaacatcagaactctttttttgttagatttaactttgggagaactatgaaaatagtctaaattttcttttagctttcagttaattttttaattaacaaaatagtttaaagtggaggaattttcaaaattgctccttttgttgtactcattttcatacattttcaaaaatgctttcattaaacctgataatgttagtaaagtttattgtttacatggtacttctcgatagtaactaatttttgaagagtcgatccaagtatttataaggttttataagatatttaaaagtttttataaagtatataaaatgttttctaagatatttacaaggttttatacatgtaagaaatagttttgtattttttataagtttaacataaataataagactttggatgaagtttacttttaacatttttaagcgattttctttcttattattataaaataaattgtctataataaacttagtcaattttatgttttttccaaaccaaggtaattattatgaaattttggtcaactataaatatttacttcacaagatttttagtatttagggaataaagtttccaataactaaaactcgaactatattgtatccctatataaatatacgtctttctaaattctaaagataacaacaaatctactaataccaccacatatttttctgttgtcctacttttgaaacaatcccaatactagaaggctacgagaaaaatcttagtaaaatcttgagactaagtatcggtgctttagtccaaaaggtaaaatctcattttgttgaattctttcaatggcttttttttgtttctaatgggttctgaatttttgctagacaaaatattcgggatccaagattcattctgaaattcgatctaaaaataggttatccaaaatctttggatttagatattttgatttaaaaattaggatatccttattttatataaattgctcaaaaaatcaccaaaaaaaatattttaaatttgttgtgcaatattttaaatttaatccatttgaaaaatagttgataattaaatttgttttatgattaatttggatacaaactttttatttgttttatactattattttaattgtgagttatttatggtggatttgaatccgatattaacggatttggatctggatatgtcgtttctcatatatggtggatgtggattcaagatccatgtatcttaaaattccaggaaatattagtagtgtccaccttgattaatgtaaatgatatctcggaagctcaattttttttatgtcaattagtatttttgaaattataatttacttttatataagaaatttttagtgatatattacattcaaaaccaataagaaacagtactagtaaattttataacaatttttttttttgatttcatacccattttatggagtgagaattcacagtctaatttgtttaattatgttctcaatgatttttttcttttttttggtcaacaatcatccttaatatatatatatatatatatatgtgaagttgaaataatatgggccgagaggtttgggcctggttctgtttttttgttcctactattaatttaatttatttgttgagatttttcctcgttttttaaaaaaccgatgagagcgtatctatatttcttttttcatttttctctccgatcaaaacgccgccgttgcgtctctgattcttcctttgggtcaactgaggaaaaaacccttcctatgaagaacaacaattggcttcacactctctcttttctcaattttgcttcttacttctttccccggtactcactgattctccccaattttccttatttcgtcgtgcccttagggtttcttacatcgaaagtttggtttttgattatgttgtcccgccattgcatgacgttgttctgttttgttctgtcctaattgcttatttgggtttctgaataatcttcaattggagttttttttttgttcaagctgaagagtttcggtgatcgtcctctagagattgatgctaattttttcaaacattacaaagtttccaaagccaccgcccacttgaaacattcttttggtgattatgattgtttatatcgatttagcattactttacaataagcaagtgattctcttcataaagtatgtagctttactttgtttgatcctactcttttggtaatcttagtttcggatttgcctttctcgcaataacagagcgctttgtaaagttttgcgttttagatgattaacattcctttcttgcgtatttcaggctgattagaaacttgaccgcttgattctcttaaaggaggtcttgcgatg

SEQ ID NO: 5925 - DNA, 3000 bp, Unknown
  misc_feature (1)..( 3000): cDNA_ID_2993930_gDNA_ID_1620833_Annot_ID_57905 3000 nt of promoter + ATG
tataatagttaaaccaatgagggaaaaaaaagatgagcaatagaaggtgcttgttgctttaggaaaaataaataaattaagctttctctcctagtcctgattaccgaaaccaatcccctaccttcttttgctgaaaaaaaaatcaagtaatagaaggttttgccggcgtccggatctctgtttcaccattttcttttgcttcccaaagatctctgttttacattgcttttggtcaacttctcaatcaaccaagcctttccctcttaactcaatgtcggatggttattgatcagatgctagagttggatggaggttcccagaaatctcctttgggaagctatgcctactacttttctcgtgattttaaacctaggaagccattcttttacaacagtatctctttctttgaacttgagacgattttctttgtgttgctcagatctcccgattttggctctccctcaatctgcacaaatgccttttcccaccagaattcgccttcggtgacaaactaacctaatttatgtcgatgtcactagattggacattcctttctaccttctgggcttaggcccaattatcatattttcaaagctcaactccaaaaagtgtattccactgttctctctgcaaaagcccatgttttgcataaaacttttctgatcttgcttagcgaatttttgtgtcgactcatggaactgattgttaatggacgtcgattggaacataatcaaacaatcttgctatgctggtataaaacttatctgagaacatgaccattagaattacctaggggtaatactctctattttcaaagcttgaaaaacaccttatatgatagcttcctttatcaaggcttgttgaataggtcgaggagaaacggcattatgaccccgtctctaaggagcaatggttaccgtagcttcttcaaccccatatccatgtattccctgtttatcgagctcatatatgtacaattaccaacttctgggaccttttccatatgctcaaatccaataagctcatgtctgattatttttgttatgtgttaagtcgactaaaaactttgtgtgaaattcttaattttcatggtataatactccatgtgagagaggatccacctattatgttacaaccttatactctttttttacgaaccttggttttagcttcatataatatgttgtggtatgactttctttgcttgaaagactttggtctaatgctgttgaaccttcatgcgagagtttttatggtggcttgggaagcttgtcaaaggaccacccctcatcatgctcgcttaacgtcttcaagtcatacacctcacttcatgtttgctattgtttgcctaacctcaactttcattcggcatcaattctagcaaataaatccaagcaccagagcaccatcaccactacccaaacctttgtcaaagctctacttcatgtagctctcctcgtgccggcgagaatcatgtctttgaccccttcattaacgccacttcgtcttttgacagagacaatttgtttttcctttgaatcgctcttgaaagagtcgtcgataaactttgatctcacaagtaccataagcatctttgcttttggctcaaaactctcaaggaccctttgtcgattagccctatctatctttttatcatttttctggtaacttttggagtatgccccttattgttgtgctttaaactttggaactttttccctttatctttgtatttggcttctacattatggaatgaaaacaaacattgtccaaaaataaaataaaaaaaacaatgaggaaaaaaatcaaacaaaaataggagaatcatagtcatatttttggatttaaattcaaatctttttccatggtacataatctgcagcatttacagcaaaaatgaaacaaaatctgttagttttaaatttaaagatatgtttgcaccctataataatctcacataagttcttaaagattgaaaaacaaaaatggttgcatatgtcaagaacaactttttattggttcatatagtagttttacttctttttgttgtctcatcatatgcaagatttaatacgaaggttacaacagatgaaatatgtggcatgtgcgcacgcagagcagtcaatgcgtcattttgctatgagttcatgaaatcatccactcaagttgcaacattggatacttatgatctcgccaaatttttgatcaattatgattttcaaaacacctttgatctaataaagcatttccagtcactcacaaacagcacaaccgatcccagttctaagggttcttatgagctatgtttacatctttttaatcttatcaatcctcttgaaaccgcacttaaagctttggcaaccaatgactatgacactttaaacaggaatgttgatgctatgtctcaattcgcgatggaatgtgaaagcgagctgtcaagtgtcatcaagcctattccaaagctcttgaaaagggtttctatcgtcgaaaatgtatccgacattatttttgtaattgtggaatgttttttaagaaaagaagaaacttcatgtaaggaatcagtatcaaatctacaataataaattaataatcataatgttgtttggtatgatgttgccattaccgatttacaccgataattaattgttttagtgttaagaaaaatcgaaatccaccacaagagcataccaaatcacgaaaaagcttgtttgatagatcggattggaccggctttcgtatttgaaaaagtcatcgttcacctgtgaaaaattacgcaactccggcgaggactattttcaactatgggcctagccccaattagtccaattagtaaggagcttaaaatggttttctcaaagtacggggcaaaagtaaaagaataaaaaagtagtggaccttgagaaaagtcatcaccagctttccttcctatgccacacaaacgtgttcttctgaatatgagtcaaacacagagaagattaggagaacgtggaagaagaagcc

SEQ ID NO: 5926 - DNA, 3000 bp, Unknown
  misc_feature (1)..( 3000): cDNA_ID_1989663_gDNA_ID_1620833_Annot_ID_57910 3000 nt of promoter + ATG
caaactaagttttaatataaaaccgaaaatgtatcaaagaaaagatttgaagttttttgagattaacgtgtattaataatatacacacatggatgtatatatatgattaagaagatttggagtcatcctttagattcttcactctgtcttgttactgccgtggggttcatgtcagacccacaaggccacaacagtcttgactgtatgtttcttcttgtttttctctgtaatactattagtaaaaatatcttaaaaaggaataattctggtaaggtactatcagttacacttgaaatacatgtcaaagactaacaattattcatgtacttttctattcacatgttttactggaattaacaatagttcatcattttcaaaaattgtagaaataatgattattatgtcagtgtatgattgattcctttataatttctgttgttttgttattgtacagtctcatccgaatctaacaccccaagatcgaacagagatatgtcgatgtctcaactacaagaaactaacaatggagacgtgcaaacagctcgccagaaaccctaagatccctccagaaatcgccattgaagcactcaagtccagatgtgggaatcaagaacacacaacttcagatgttaaagttgcaaacaagagtttttcttgtagatattcagaagagaagaagaagcctgtagtattgcatctcgagataacagagaaattagccgagaggttgaagactaaaggaggatataatttgaaggttatggatagtttcagagaaggcttatgaggaaaatggtaaacgtcccaagtcatgattcagcagtcacatcttccaattcatctggcaatctcatttgcaccccaacagtgtcgagagtcttgtacaaatcatcagattcaaggggtttcttatcatcgaaagctatgaattcacaaagcttgcctttcacttcgatccaactaaatcctggcgatttcaccacctgttgatctttcatttgctttcttacccgagcgacttcatcccagttttgggattccgagtacaaattagccaagagagtgtatctcccactatgactaggttgcagcttgatcacacgggaggctgcgtatttacctaactcatagtctttgtgtaacaaacaagagccgaacagagctccccataccacatttgttggctccattggcattctttctatcaaagctttcgcctcttctagcaaaccttttcttccaaataaatcaaccatacacgcatagtgatccgcttttggctccatattgaaacgtcccttcatgctcaggaaaagccttcgaccctcttccacaagacctccatgagcgcaggcacttaagacagccatgaaagtaacttcatttggtgaaacatgactactcaacatggtataaaagagatcaaatgcatctctagcatatccgtgtgctgcaaatccattaatcatcgcggtccaagtatacacatttttctcatgaagtctctcaaaaacaagtatagcttcctctaaacacccgcacttgacataaagatcaatcaatgtagttccagctgtagtgtttatctcaatcgaattcttaatcatataacaatgcacccttcttcctcggtgaagtgccccgacatgagcgcacgccgaaagaacactgcttagagtcttctcattaggcgcaacatcactctttaacatctcctcgaaaaccaacatccctttatcgaagcaacggctttgcacatatccagcaatcaacgccgtccaagtaaccacgtttctgctaggcatttcatcgaacactttctgggcatcatcataacaactacatttcccatacatatctactagagaacttcctatgaacacatcgcatttcactctccctgtttctaagtaaagcccatgaacgcttctcccaaatcgaacatcttcaaccttccctgcagctttcaagacgctaacaacggtcatttcgttagccgcgactccagtcttcttcatctccacgaaatacaccattgcttccgaagcagaaccatttctcacaaacccatcaatcattgcagtccaagtaaccacgtccttatcttcagctccatcaaaaagacgacttgcaaaatcgaataacccagaactagaataacccgaaatcaacgaattcctgacaaaaggatccgaatccaacccgaatttaacgatatgagcatgaaactgaaacgggttcgagtctctcagtttgaaaaccgctttgagaagcggaggaaacgtgtggcggctagggatgacgccgtttcgccgcatatgacgataagcaagaaatgataaccgacggttgagagtaatcccgccggagaagtgaccaatgagcgaatcccatagttgaatgctcagagtttggagttgacataataaacgacgagcgtagcggaattgagttgcggcggtgcagcagcgacggagaagacgtgagagaaagagatcgcgacgagtatagaatatcggagaagttaggagtaagcaatggatctgcttgagatgaagaaagtgtaatggaagatcaagcaatgttttgagctcaatcatgtgaattgagaagtaagcaaaagagagagagagagggggtggttaatacttcaattcgaattttccagttttcagatttcagatttcaaaggaaccgaaccgaaccgacattaaaccaaaattcccattcaattgaatcgaagtgactctgaatatcagtcggtttagtttttatatattttttttaatagccgtagagggggagacgagggttcgatccacgtgtcaaacagtccagagaaaaaaacagaagtaagaagagaagaaaatgaacttcttcttctgcaatttttctaactttgttagcttctacagattttgctacgagccattggagaaactgttattgccctaaagatatgcgttatttttctccttcttcttcggatacgattcatag

SEQ ID NO: 5927 - DNA, 3000 bp, Unknown
  misc_feature (1)..( 3000): cDNA_ID_1989753_gDNA_ID_1620833_Annot_ID_57914 3000 nt of promoter + ATG
ttaagggatatgcggtacgcagttgctgcaactagggagttacttccgtcgttgatgaacgactactagttttctgtgtccaaatacttttctgaatcagttcatccgagatcttttttccttctgtaaaaataataatattttttcttctttttttgcagatttcttcttatatcacaagtattctctatggctagtctcttattatatgcatctattttgtctactgaagacataacttgcaacatttcttggagtttttggtcttgatcaagtatgttttttctgcctctctgtgattgaaactgtgttctttgaaaactggactcagattgattttagatgtgaatgactctaatcgaattagtactggttcttgttgatgtatctgactttcatttttaactttttatttcttacaggttcatccagttatcatctgtagctggatatgtgaagtgtcttcttgcgaacttatgtcttaactttgaaatactttgaataacgatgataatttggagtaatgatggtaatttgatcaaattgtgtttggctttttggtgtgtccatttgcagagatatattgctttttaataacgagaaaaatgttatttaataccctaattttcaaattataaccgttttatacgtcaactttatatatggtcattttaaacatgatgttatcgttgaccaccatttaaaccatgaatatttcgttgaccaggccaaaaaaaatagtcgttaacggattattcaactcccgttaacacctccgttaaccattctaaacgatgtcgttttcgttactataaatcatgttttacccttttataagcttttaaaatcccttgtaaatcattccaatgccacttacttatgcttaaaaaaacattgtaaaccatgctagccctttttaaaaatccttgtaaatcattttatgccacttacttatgctttaaaaacgatgataaatcatgttttacctttttataagcttttaaaatcccttgtaaatcattcaatgccacttacttatgctttaaaaacgattgtaaatcatgttttacccttttataagcttttaaaatcccttgtaaatcattcaatgccacttacttatgctttaaaaacgattgtaaatcatgttttacccttttataagcttttaaaatcccttgtaaatcattcaatgccacttacttatgcttaaaaaacgattgtaaaccatgctaaccttttttaaatcccttgtaaatcattttatgccacttacttatgctttaaaacgattgtaaatcatgttttacccttttataagttttcaaaatcccttgtaaatcattcaatgccacttacttatgcttaaaaaacgattgtaaatcttgtaaaactattgtaaaaagttttaaaatgatttacaaaggtttaaaaaggggttttaaagtatttacctatgtttttaaagactttataaagattttaagaggttttaaaatgatttacaagggtttttagcaattaccaaagattttaaaaaactttacaaggttttttaaaagagtttttaaaaaatttacaaggatttttaaaagcattttttttgctgggaaacaaaatttacgagaaaaaattttggcgggaaatttatttttggcgggatttttttttttttggcgggaaaaaaaggtttggaggtgttcttcaatgaataggggtgcttgatgaggcttgtattaaatggtagaagtccatggagaaatcgaagtgttcaaaatcggaggtgttcttcaatggaagctttactatggaaatgttttgtttcgttaaagatgaagaagaagaactttaagcgtatataagtatctgtgtttgtatagaatgacagagaaatctttgcaggtagagtggtcaaatgacctttgatttttctcaaatgataggggttcgaatcccaggtctgtcatttctttttaaagaaaaacgaaaacgacgtcgtttagaatggttaatggaggtgttaacgggagttgaataatccgttaacgactaatttttttggcctggtcaataaaatattcatggtttaaatggtgatcaacgataacttcatgtttaaaatgaccatatataaagttaacgtataaaactgtcataatttgaaagttgaggtattaaataacatttttcccttttaataactgtaaccaatatgtaacagaaatccatccaacccaatttgatcaatagcgtaaaaactcattattgttataaaattttaggtagtttacatcaaaataatatcattcattttttatactataaaaatagtatttagattaatatttaacaagaataagaataatttttatatatagatcatatcaatccacataataaaaagagaaaaactcaaatatgaaaaaaattcaagtaacaaaaatatattagaattacatttggttgattggaaaaaaaaaaattacgtgtaaaactatagtattatctgagaaacgaatacaaaaatttgcaacagtagcagcaaaacaaattcaaaacttgcggcaacgacaacagcaacaacaacaacgaaacaaacaataacatgcgaggcagtctcacggctagtggcagcaaacccaacagtttatctaaacgagaaccaaaatttactctcgttttttttttaatgttatcctttgatgaacaaaatgtattttccaaattttactttttttattttttaagtattatcccttaaaataatatatcttgcggaaaaggaatcggattaaataaattttaacggtagaaaataggataggaggagagagagaaggtcttttattggtttgaatgagattagtgaaggcagcttctcttctgatttcttcaaccaaacctccgtctagggttttttactcttcccatctccgccgcccttttttctctcacttccgtttttcttcctcttcgtcgacgtcttcctccgtcgcagtc

SEQ ID NO: 5928 - DNA, 3000 bp, Unknown
  misc_feature (1)..( 3000): cDNA_ID_1989659_gDNA_ID_1620833_Annot_ID_57915 3000 nt of promoter + ATG
attgcagtcttcagtatgttcatcttggatttgtatatatatacaaatgtagacatggcagtaacaccatgaacacaatcatatcagaactgcattgtttgaatttatgtatcggctggcaaataccatgatatagttattgttggttttgcatactaatttctgaagttgtcgttgacagtcacataaatatttttagatttcatatccatgaacaaggttaagcttttgattcacttccaatcatctatatgtatataaactctgtgcctctaacattttttctctggcaatagatttttgacactggacttatagaaggctcgtttgggacattcaatgtatgcaatgtacaaatatttgggggctttgttcttcacattggttatctctctaaagaaactggagaggtatctgtgggtgataaagtgatttgcaaggtaactctctgcatcaaacagtgtttgtctcattcaccatatttggtactatccaatttgtttccaccttcgttttcatgcgtataggttgactatgagaggcgtaaactcatcgctcctaatcatacttgcacacatatgttgaattatgccctgaaggtatcccttttctataatttaagtaacctaaactgtgattttctaattttttctattggatctgaaaatattcatgtcccatgaattcaggaagtgctcggggatcatattgatcagaagggatcaattgttcttcctgaaaaactgcgatttgatttttctcatggtacatttttgaataaagtcatttttattttgatgtggatggtcatcttaattgtctgatgggttccataatttcgagtaggcaagccggttgatcctgaagatttgagaaggatcgaatccatagtgaataaacagatcaaggatgaattagatgtgttttccaaggaagctgtgctttctgaagccaagcgcatcaaaggtctaagagcagtgtttggagaagtaagctgtccatcagttctgtagctatacctttttagtttggtttctaagaattgttaaagcgttctctcttactctttttaggtctaccccgatcccgtcagagtggtgtcaattgggaggaaggttgaggatctcttggctgatcctgaaaacaatgaatggtcattgctttcttccgagttttgtggaggtctgtttccattggcattagctattgggaccaagatattacgttctgaatagaatgttgagtatagggttattttgacaattccaggaacccacataacaaacacccgcgaagccaaagcatttgctcttctatcggaggagggaattgctaaaggtattcgtagggtaactgctgtgactactgaatgtgcttttgatgcattgaatgcggcgtccttacttgaaagagaagtagaggatgcctccagagcggagggaagtgcattggaaaaggttttctccctctctttgtcaaactattgacaaaatgaagacgatgtcgttacttggattcacgtaaaacttattgtgtttgtatttgcacattcacagaaagtttctgctttgaaaagccgagtagatgcagcaattatcccagcagctaaaaaggcagatattaggactaagattgcttcgcttcaggttataagctctttcagccttacagtcagcagctttgtctagatttccctgtaattttgtaatcaaagcaattctgaagtggcaattattgttttcctaacttcgcagaatgaagtaagaaaagctcagaagaaaatagcggaacaaaacctgaaaaaatctgtcaaattagcaacagaggcagctgagtccgcagcatcagatgggaagactttctgcataatccagctggatgtgggtcttgatgcagcagctgtgcgagaggccgtttcaaaagtcatggaaaagaaggtaatccgtattttcttacatcatcacttgtaccataacctgttcatagatagcaagaaagttaaattaacgtttccgtttgattaaccttgcagggtatgtcgataatggtgttcagcacagatgaaagcacaaacaaggcggttgtgtgtgcaggagtgccagaaaaatcagaccagtttaagccgttagacgtcactgaatggttgacaactgcattgggtcctctaaaaggaaggtgcgggaaagggaaaggtggtcttgcatcagggcaggtatgagtcctattctctttagtctacaatgtgatagtatcatctacaaagagatgttaaatcttcaacatgttgttttggttttagggaacggatgcttctcaagtgcaggcggctttggatatggcttcatcatttgcatcaatgaagctcaactgatttggtcgggaggttacataatctgtgaggtcagaataacctctacttaatttgctttcattgtacaccgttttacacatgttttaagaatctgttaaatttctctgttcttgtgatggaatttgtggtatcacactcttttagtcaaagttaccaatggctgttataatcccttgtgaaatgatcctttcccgtttgcgttgaaatggttatttaaaaaaaaaaaataggatttggtatggactggtcggctttagttaccaaaagcataaaactgaattgatttacctaagttcctttaaatttgttttggattgactgaaaatgaattgcacatttctgaaaacagtgatatatatgttactagtagataaaaaactaaatcctaaaatcctagactaaaatatagagaaataatttcaaaagacaaaaacgtttcaattcaataactcataagaaaataacgaaaaagtgtaattgggacagcaatagtaactcaagttggcagatacgagttagctcctgcctttattatatagctggctgaaaaataatcattacaaagtgggtaaggaagtctatctctatctctaaagcaagagaattcatagttgagagattctacagcc

SEQ ID NO: 5929 - DNA, 3000 bp, Unknown; identical to SEQ ID NO: 5926
  misc_feature (1)..( 3000): cDNA_ID_3078992_gDNA_ID_1620833_Annot_ID_169758 3000 nt of promoter + ATG

SEQ ID NO: 5930 - DNA, 3000 bp, Unknown
  misc_feature (1)..( 3000): cDNA_ID_1989667_gDNA_ID_1620833_Annot_ID_169752 3000 nt of promoter + ATG
taatactactaatattatactaccaaagtattggtcaataaaaaaaaatacatttgcatctaacatatattgactaaattaataattaaaaaagtattgactcatactacagtaaaatatttatataatgctatctattttgtaaagttactagcataagcttgtcattttttaaaatctgtcactactaattttactatgactaggtaatcacccgcgctacgctgcggtatttttaaattttttgtatcgtttaatttaaatataatttttaattatctaatcatttacttatataataagtaattattcttaatattaaaatatattttttctaacaacattctcaacaatgcattatacacacaattcctaaacaatgttcgtcttaaactaattaaatagaaggtaatattgggattctcgaaacctaagaatttgatgattaaacttcttacatactcttcaccctcggcgatttattatatagatatataacaatatgcaaactattcaaactattaattaatccatgactactatacactcataatttgagttaagattacagaaaaaaatcttttgagtatgagaaaatcaatcaaattattttattgaaaaacatttaataacaaaataaatttagtattagtacaattaaatatgtaaaattaaataataaatacatcattaatctataaattaaaagttgaagagcttacattaattattcagtggatacatggcaaatgttaaagtgatgatgtgtcaatcatatggagagagttggctaactttcatatatataattagtagattaaaaactcactaaagaatagaacaagttttcttgtaatgagttttcagagaaaaatcttattgctgtaattgacaaaccagtgcaaatggttgacgtaattgaagaaattaaaagagttgaataaacattcaatcaattttttactatttaagttgaaatagttgaaaaaatgattcaattgcactcctaacccatttaaataaaacccaaaaaaaactttatattagtaaatctcattaaaataaaattcttactacgttttggtaatatattcacatcttatcataaataaaaaatgttatataagatgacactaataaaaacaaatttggtatcagatcattatgtgtattgggagttatcaaaggatctcttcacccaaacgaaaagtttggcgcctccgagatttaacagatcaaaaatattaaactgccatccaagttttagattttgtggctaaagttgaggatgaagcaactatccatttaaaaaaaaaaaaaaagcaactatccattccactaccgagcgtacttcccaaaaagaagtagatatatggcaaggttctcaaggatgaacctaaaaggatggatgagtagttggacatacacaatatgtttttttttttgtggattaaccatgacatagttaactatgatacatttaaacatgaactaattaaggaaaattccgtgcaaggtttagttgccccataactaaaagccctccaaactcttataaagagcatgtccaacgttggtgaaaaaataaattctaagattcaaaggtgaaaacaacagctaactggcatatatatgtatgactgtttgtcttggaaataaaagaaattttgattttaaatgctataatcaatttatagacaaaattagctaaatgatgaatatggtcgttaaagattttggacccaaagtttgaatgtgcactgtttgatcctcattcactcttgcttaatagccatcaattcattttgtgaatataagcaaaaaagccacttgagctcttgagaagaagaagtcgtggttcggttaatcaggagacagccgagataaagaaagtcttcatgagatttaatgtgatggttaattacgtaatgaaagggtggctgataattgttcatggctgttgcatcatgtcatgatcacttgacatgtttattctaaagatttcttgttccatcacttttcatttagacttatcaagtacgtacgtagtgataaacttaatttgtaatatcttttctcatgttacaaactcggacttctgtcgtccatgagcctgatatatatttgatgaccaaggcttaggatgttgaactgatccaatcttcattctcggaggttttgctatgtgttcttcgtccagctcattgttaattacaccgagattgacataatgacatgattcaaaaatgggaacgttgttgttgttgttgtttctttttcaatttgcatatatatattacagagttacaaagatgagaaatatcttaaaacctattctattagagaacgtacggtgtgttcataatgacaatgaacatttttgtctacgtagatatatttactttgtttttttcttcattttcaattatctttgtaacgttctctctcaaattagctggaacaacgatctacaatgacgtgtatctaataatcaatcctaaatatatgaaccaaactaaactagaaatgaaatgtctccaaatagactatattatatatacgtactgaacgaaatcacaattagttcacagctaaatgcgactgttattatattaatacaagatcctattttagggttagactgtctttttcaacatatctcttagagtctttatgtaataaaaattacagagaaatgagcggaagttgtcagtaaaaaaacaaaagaaactgtcaaaaaaagacagtaagatctccactaaaactgggtttgaagaacatgaaaaaaataccaaaaccacttcacctattcataagctaagataaatctaaaacagctaatatcacaatcgattcctaataatagataacgaaaattcttatatttaaggagctcacaagctcttcagttttggatcataagctcactagttcttgtttgaataacaaagcaaaaggcaataatactaacaatcaataagtgaagaataaataataatg

SEQ ID NO: 5931 - DNA, 3000 bp, Unknown; identical to SEQ ID NO: 5925
  misc_feature (1)..( 3000): cDNA_ID_2993930_gDNA_ID_1620833_Annot_ID_169751 3000 nt of promoter + ATG

SEQ ID NO: 5932 - DNA, 3000 bp, Unknown
  misc_feature (1)..( 3000): cDNA_ID_3079008_gDNA_ID_1620833_Annot_ID_169745 3000 nt of promoter + ATG
agggcaccaagctcgctgtcgtctaaaagagcttaaaaccggaattactattcttcaatcatgtattgccccttgtctcatttcaatatcttggtttgtatttgttatgtcgttagaaaccatacctcacacatccttctgtttcagttgttcgtggagaaaagatgagaaaggaatacacggagttactgcagaggcatcgagcttctgctgctatacaaagccatgttaagagaaggattgctagccaacagtataaagccacagttgatgcatctgctgtaatacaatcaggtaaaatagggttgattaattctcatgattgaaacaaattaaacctcaaaatatatttttaaaaaatagaagtttcaagaaatgctgaaacctttttctgtagcaattcgtggagagctggttagaagatgtgcgggggatattggatggcttagttctggtggcaccaaggtcctctcaaagctttcattctcttcgtgcatttgactacatgatatatatgcatattgctagactcttaaaccaattctttatgtagagaaatgagtcagacgaggtgctagtgaaggcatcatatctttccgatcttcagcgtagggttcttagaaccgaagctgctcttcgtgagaaagaagaggagaacgacatcctccgacaaagagtccagcagtacgataaccggtggtctgaatatgaaacaaagatgaaatccatggaagaaatttggcaaaagcagatgaaatctttgcaatccagtctttccatcgcaaagaaaagcctagaggttgaggactcagcgagaaactcggatgcatcggtgaatgcaagcgatgcaacagatttagattcaggaggtagtcattaccaaatgggccatggcaggtcaagaagtgtaggcgtgggtttaagcgtgataagccggttagctgaggaatttggacaaagagctcaggtatttggtgacgacagaaagttcttgatggaagtgaaatctggtcaggtggaagcaaacttgaatccggaccgggagctacgaaggctgaaacagatgtttgagacatggaagaaagattatggagggagactaagggaaacgaaactgatacttagcaaacttgggagtgaagaaacaggtggttcagcggagaaggtgaagatgaattggtgggggaggttgaggagtactaggtattaatggttacttccttttcttgagacgcacgtctccttttctacacgtttgatgtaactacggtttttggctttgctgctagaagtgagaaggctccttgggactgaaagagtcatgtttttcatttgccacccaaatctattggcaaattcagtaaataatttttatattatacagtatatctatttgtcaaggattccaaagtccagtgaaccattgctgtatttgaatataaatagtcgttgcaaaaacaaatcaatatttatatttcttaaatagttaagttttttatcaagctaattaaaatggacatagcgagaaataactacaaggtggtaaactatgataataatataaatttccttacaagtttgtttgtttgtaaacatatggagttagaaagggaaaaaaaaattgtatagattttatacaagattgttttgagtttaaaaaatctttatcgtgtttggacaatgtgtattttaaaaactatttaactactagtttttttggccgatttcagtgatatctcgacttagactctacaaaaatttagataatttgatggataaaattacatatgataaatcatgcacttgtatcagatggtcagttggtggaatccctcttcaacaagtgatctttcttggaatgttgtcgtgggttaaaaaaaaactcaatccagcccaaacccgaaatgaacatgtctgagaaaaatcatttctattcttgcagctgagtaaactcttcacaatttaaatttcgaattacctttgcgatgcatcacttttttaagtggaactaagtttcggatcacctctcgaccaagtataaaccaaaccaacaccaatatatactttccgtaatatttggccctccgactagtgattttttcggatgtaatttgaacattggagattttttggtgagacaaattccattttgtcatttttagaggtcatcataacaatacttttccttctcaaattatccctaaccagaagccaaatgggaagacccaaacataaacattgaaatgaatcgagtgaggttcgctcttgaacgatcgtattgctaatgcctatccaagatcattgattcatttctaacatatcccgtacggtctcccacaaacaaccttcctcaaaagttcaacatcacatagatttcgaaatgtgtctttagacacaatttgtttaacaagacttttaaataattttttttaggagtttttaattatcaaaaaggtcttactcaaattcaacaacacatatatcgaaatgtgtttttttaaaaaaattaaaaagaagaaaaaatactataaagaaggtttaagtatttgtggaattttatttaggtgttatcaattgtcacattcaagtagacaaataaaattaccaagaaaagaattgcaaaaacattgaaaatgtgtagtatactccattaaagatttgtgtaatgaagtaatagataaaaattaaattgatgtttaatatgttgccaaaaaaatgattaaaaataaatatccaacgaatagagtttggggatggaggaagaccaaatcgggttcgggtcgagattgtttggttcgttgtgtttcccctttctctctctctccctctttcccccttacgtaaccctaagcggacggagcaatgctctgctagatctatctttctttcaattcttcaccagagatcgtcgagactcaccattgaaatcgaagaaacagcaccaatttccacttcaccaccgaaagagagagacagagaggataataaaaggccgccatg

SEQ ID NO: 5933 - DNA, 3000 bp, Unknown
  misc_feature (1)..( 3000): cDNA_ID_1989670_gDNA_ID_1620833_Annot_ID_169744 3000 nt of promoter + ATG
tctgtggtgatatccatggccagtttcatgatcttatgaaacttttccagaccggaggtcatgttcccgagaccaattacatatttatggtatagactctgactttgggcgtaggctcgtatgacatatcaatatgtaacacatagtttaattatctgtgggggattttctcagggggatttcgttgatagaggttacaacagtcttgaagttttcaccattcttttgcttcttaaagcaaggtaagattttccgtagaaattgtgcgttatatatgtcatggatcgtcatccttccgtttcacactgtatatcatagttctcttgagaatgctctttaagctgtaaacgcattgctctactggaaaatcgatttaacttgtattccaggaaatttatattctaacttactttgctgtgagcttaaaatcactcgtttccttgtatttcaatatgtagacatccagccaatatcactcttttgcgtggaaatcatgaaagtagacagctaactcaggtatgcattattctaatccatttatatctattgttgctgacttgctgtgctcttcacgcagttactggttgagaagtaattttcgctcaattgttataactagttttgaaagtttattttgtacatgtggcaatgccatgctagatataggcatagatgttaactaagatgcattttatgtgaaccctttgcaaccataagttttcttctcggaagctcttgatttatctctatcctacaccatatcctatatcttttaacatccactgtcaaggacgaagattgtagtgatattttgtgccctgcaggttcatttttatagttttcttaaattgtcgtaccaattttatatttgctaggtgtatggtttctatgacgaatgccaaaggaagtatggtaatgctaatgcttggagatattgcacggatgtttttgactatcttacactttcagctattatagatggcactgtaagtatttctcagcttctttggcattgtgttatgatgtgttcttgtataattttatgaatgcataagttagctgtataccatattaaaacgtattgcatcctcaatgtaggttctatgtgttcatggtggcctttcacctgatgtacggacaattgaccaggttaaaatgtgctattttaaattacttttggttttcaccatgcaagtgttatttatgattagattaaatctcatttactcatttagatgttattttgttctctagataagattgattgagcggaattgcgaaataccgcatgaaggacccttctgtgatcttatgtggagtgatcctgaagatattgaaacatgggctgtcagtccacgtggagctggttggcttttcgggtccagggttaccactgaggtatttatatttttttctggggttgaaatttgaataaggtgtgaaaagaaataaatgtatttcagttccctgatctgtggttttgcttcttgtgcagtttaaccatattaacaatcttgatctagtatgtcgcgctcaccagcttgtacaagaaggtctcaagtacatgttccaagataaaggtcttgtaactgtaagtgccttgcttccttatgatcattttggatagttggaagtataatctgcttggtgatgtttcttctctttattttttttgtaaaggtgtggtctgcgcctaattactgctaccgttgtgggaatgtggcttctatattgagtttcaatgacaacatggtgaggcatttgttttctcttttgttactgatctgccacaatatcttgtttcatgttcttcttacttttatgcactcgtcttcggattctacttttcctttttgattaaataagttactgcctttgatacttgtctctcgacccaaacatatacacatgagtgactcttgtgagatagagttatgatgtttaagccatttatttagtaacaattcacagttcgcgtggaatcagtctgtccatattgattgtgctctgtgtgttacttttcatatatagacctgtttctgggaagtgtttaggatctggtcctcactgacagtaatgatttgttaaaatatgcttaattaccaggaaagggaagtgaagttcttcacggagacagaagagaacaatcaaatgagagggccaaggacaggtgttccttatttcctgtgattcatgatgatgatcctacatcattattagtctcgtattgctcttatcaagttagccattatcatgattgccattggcttatgttctttcaaggtatatcttctgatgttgtttacacttccattgttttttttttcctttttccattttggaaacattttcttgtgaaagtgaatgtcactttggtaattttagtggttttgatgcactttaacctgaacctcttctggatgttattattatacgtgctttctttcttgttttgtttcatctttgttctgtaagcaagaccaatttttatcatctcagcttatttgcagtttagcacggtttgattaggttctgggttaatctcaggcttataaaattcatcaagctcaaaaatagtccactacaagaacatagaagaccattaatcaacattcaacagtaatttgtttctaatctaattatttggttttgttcaataatcctagcaaaaattcacgaaagagttaataattttgtaaccggaatcatagataggccggtttatccaaaccggatatgacctgtcctctattaacaaactggtcgcgagtctctaggcaactaaaacggacacgtaatatgataataaggcgtggactcgtatctctcggcactcactttctcgcgactcgtagtcgtcttctccacttcgatactcctctctcttgcctcgttcctcttgttcctcgccgccgctctattctacggctgtcttcttctttttcctcttcctctgaaaccggagctgcgtcagtgcggttgacatcaccgagagacatg

SEQ ID NO: 5934 - DNA, 3000 bp, Unknown
  misc_feature (1)..( 3000): cDNA_ID_1989671_gDNA_ID_1620833_Annot_ID_169743 3000 nt of promoter + ATG
agcatttttgaaaatgtatgaaaatgagtacaacaaaaggagcaattttgaaaattcctccactttaaactattttgttaattaaaaaattaactgaaagctaaaagaaaatttagactattttcatagttctcccaaagttaaatctaacaaaaaaagagttctgatgtttacacattaattaaattaaataataaacaagaaaggctcttcctcaatgtgaaatgaagaaacctccttggcttttattcttgtgggagcaatacagtaaaaatatctaaactaaaaaaactgaacatcaaaaaataaccaaatcttgaggtttctaactaattgtgaaggccatttgatggaattaaaaggcgttaacaccgaaaccaaacttgtaatccttcttcacatgatccacctggttcatttaatatcaaaaatcagtcattatcaaaaactagtcattaacaaatgcactaaaaaatgtatagtagcggattaaatcattttctttacctctgcagatagaagaaatctgagtccaataggcaattgttcttcaaggtaagcagcgacaacaccgttagaatcaacctttcctcttaatcgagactacaccaaaccacaaccaaacccataattagaacagcgctttgttgctgtttcaaaactcgaatgggaccaaaaggaatgaggtatgtacctgtctagtaatgaggtcatacccgacactagctgtaacatctcgtgacaaataattgtagatgaaatccgttgcaaatgacaactgattattgaaaaaataagaattagcttatattactctataggattaaagatgaattaagataaggctggattgtttaccttctctgaaaccttatgaacatagttcatgacagccacaccagtggaagcaatttgcccagaggcaacctgttggataataaaacatttaaagaaattcaaaaaaatgaaaaggatcatactcaagttagcttgaagattgttggaatattgtaaaccaacatagaaaagaagaatcgattttctgattgagttgccttattctaactaagaagaaacatttaccgttttgtcagtctcatatcgagctgcataaccaacacccgacatcagttgctgaccaagccagaaagcctcaccacccaaagacaggtgtggtgtcacatgctggaagaaaaagatatgattcagtgaaaagaaacgaatatctatttagcaactaacaaaagattaactaatgctgacaaaataaacaaaagcttgtccagggataaacggaaaagctacctaactatagacttaaccacagaattttagtagaacagtttaaaatggtaaagcatagtcactttacctgaatatagttagctgcataaacggaattgtttccaagctgaagctgagttctgtagtcagacccctaaataggtgtaaaccgtgaattgtcaaaaccaaataaaagctaaaaggaaaaacatactgaacagagaaaagccctcaccttgtaatcaatgacgaggtggccttgcgacttatcttcttcatctgtcagctggcagagaaaagaaacaatatggttatagatagaaagaaaacattatgcagctactacaacaaagaccagacacacaataatttctggttaccagagcattagccttgacggaaaaattgtcagttaaatcgaacttggctctcgcatttagtctaccgtccgtcgtgatccttccgataagatatagctgtttagaagtttgtaaatgttatatcttgctgatggaaaccattaatagtaccacagaatacaatcaataaacaacatacctttggatcgatgaaaccagcaccaaagtcataattggcagttggaattttgattatttcggatgatggagttggattaggaacctcagttggccccatcaatatgctgttggaagcatcaatacacaggcttggttaagaacacaaataagaatgatgtgccacaaattaacctaaaatctcattacctatggctgagaaaaaacttctggttaagcgacttgttatagtcgaggcggaaaccctcaaatagctctggctttaaagccactgcaaagtgaaatcaaaccagtcaaaacacatgatcttaaaatcacaggctaagttaatacattataaaaggttatggccacagatgtaaaggttacgaattggtagaatcagaagcataataacatatccataataccaaaacactcaattacgattgttggttcaaacgcagagatataaaagaccaagaaatcagcgacctaagacagagacagattgtgatctccaaaagaacagagaacgaatatataaagcagtagagagagagggtgatactgaactggtagcttcacggttgagttcctcatagaggacagggcaagggaggtttgagtaatccactttctcgtcaagtttggtctttgcatcgacttgcgcagtgttaatcggtggtgaaaagccctccatcgctgctgtttaccgtcaaggaagaacttttttgggtcgctaaaagagaaaactgcagaggaatcgaagacgaagagtctttcaagggtttttgggttttgactctgcgtgtgcgtcaagggttttgtaatcgtgtcaatcttagtttggcccggttttattttacttttttgaaacgggttggaaccgacctatttcgggtcatatactttaccggtttaccctcatgctcataattcactattttattttcttttggtggcgaaaaatcagtaattatattaattacaagtttattttcatatagtaaactaaaatttacaaaacaattaagaagatcatcaaatagtcaacaaatctccaaaacaagatttacttgttttggagatttgttgcatatttttctttatttggcaggcgaaagtgtttcactatggatcaataagtttgataacagagccatgtagatcagctcac

SEQ ID NO: 5935 - DNA, 3000 bp, Unknown; identical to SEQ ID NO: 5924
  misc_feature (1)..( 3000): cDNA_ID_3079013_gDNA_ID_1620833_Annot_ID_169740 3000 nt of promoter + ATG

SEQ ID NO: 5936 - DNA, 3000 bp, Unknown
  misc_feature (1)..( 3000): cDNA_ID_1989662_gDNA_ID_1620833_Annot_ID_57911 3000 nt of promoter + ATG
aatgaacttttactaatttagcgagcatatagtgtaagatgctttggtgcattgttctggttagataccagtatttcattttgtttactgtggagtctttaagctcctcgacgttttgcaatagtgggttccttcttccctcctattattttacccagcatcgtctcttacaggttcttgaccaaactgctgactgtggatttgcctcgattatttgtccgaccgaagaaaattgtcttggactttcagaaaggaaaagctgttggacctgttttagaagacctgaaatcaggagaaatgcaggaaggcaataaggattttgtcggggaactatctgttactcttgttgacgcccagaaacttcgatacatgttttttggtaagctatagttcctttacatgtcagtgtttccttcatagttggaaaagtggaatagacagacaatctattgctgaagtatcagcctctttgtgcaagttcagtcgactttcttgggaataaagtagctatactaattgagtctattggtgagatgttttgttttcctcggtaattggtaacaggtaaaacggatccatatgcaattctcagattaggggatcaagttatccgtagtaaaaggaacagtcaaactactgtcattggggctcctggtcagccaatttggaatcaggtgaactgctttggatggttcattcacaatctggtggtgaattatgattatttaaggattgaaatgtaaatagataagtgtgtattctttaactttgcaggactttcaattccttgtttcaaatcctagagagcaagtattacaaattgaggtcaatgatcgtcttgggtttgctgatatggctattggtactggagaggtaaataatatttccttgggtacatatttttttttgtaatctgtagaataataggcgttgagtacgtattctgtggatctctttaatgattgcttgaggaatgttgcttaatatttatgttactgtctgcatagccttattatttagttatatgtccaggttgatctcagatttctgcaagatacggttcctacagacagaattgtggttttgcgtggtggttggagtttgtttggaaagggatctgcgggtgagatactgctacggcttacatacaaatcatatgtggaggaggaagaagatgacaagaccaatgtcaaagccattgatacttctgacgatgaaatgtctgattcagaagaacttggctcatttgtgcggaagggaaagctttcgtcagatgatattgatcaagagtcatttatgaacgtgttgtctgcattgattgtgagtgaggagtttcaaggcatagtttcatctgaagctagagacggtataattgatggtggtgactcacttggggcaccagtaccttctaagccagatactagtaaggggtctgaaagaaacgcagatgtatcaaatttggatttgttagttgcaaattctggtagaggagctggcggtgatggaggtataccgaggctcaatctcttacgatgatttcctttctatgctttcttgacctgaaactgtaaaacctcctaatttcaggattagcattactgtggttcggtattatcacgggtatattggttcttgttgctatcaacatggaaggctcaagtttcttcaacccgtagtatagtactatacatctcgctggagatttctgttgcaagtaagtctcttaatatatacctcgagaacttgaaatttcttcccctgatgtgattggacagacagattctctttttgtcagttgttttccttatattagaacgtggaacaacactggtttgttcatatagtcaagaaccaaacttgaacttcttttttcctagaataattatgctacttgaaacattaaaattgtagattctgttactctttctgctgcttgtagtgtaccgaaagtcaaaactggacatcaggctttgtatttgataaaattatgtgtgaattgaaaatgagtcagttgattcttctaccttgtgtgacatagttcagtccagatattttcatgtcaaccttttgcctaccgtgtgtgataagcttatcaaggcctctttattttgtggcaggtctggtggtcatctcttctcaaccttagatatggcttataacgaggtctcagttttgtaatttaattttgtatgtaaatagccattagaagagggactcttactaaaggcaggaaggtttggatctattctgtccaagctctcactgttgtgttactctttacacttgtggttgatatacagtacataaaaaaagatagaaacttttgtatattttgaccaaaaaaaaaagagaaaattctgacttttcggaaataaaatataatcatcgattgtttcaataggattggtagtaggagcagaacttggttcgtggaaccatccttcatttccattcccttatggtaagattgtggtatttcatgattctcaaataaagtttgacaaagatagactgatcgaaaaggtggagcctcttgttaacatgggacagattagttgtgtcgccgctgaattccatgatctcactgatggcagactcaataatggttatggtattgaatgaagctctcacgtccatgttctgttgaggcttacaagactgttctagttggtggggaagttgtccgaaccggaacataatccaaaccgaactgaattaaatttttaaaattaaaccgaactgtccgaccactacaaagttttttcgaatttgcacattaaattaattaatttttgtggcattttgcgatcagttaacgagtggatatgaggtagcaaacgtagaaaggactcgagaagtcatggcttctgcttaatctcctcttccttaaaaaccagaagatcctttgttccacgtttctcgtttgtagcttcttctctctcagaattcaattcgaattttgacaagtcttgacgaagaagaagaaacagagctgcttca

SEQ ID NO: 5937 - DNA, 3000 bp, Unknown
  misc_feature (1)..( 3000): cDNA_ID_3078975_gDNA_ID_1620833_Annot_ID_169766 3000 nt of promoter + ATG
atttttatcagtagcatcatttttggtactaaatatttggaactaaattaacatatagaaaaattagtgagccatttagttgtttaataagaaaattggacattttcaggcttcatcctctatttgaatttcaatggatattttgagagaaatctctggttttaattttaatttttacagtcgtagagctaatgaacaacaaaaagatcaactttggctgctgcaactggacaagagacgctatgaaatggcgacaacgatttgaggcagcagatgtcacatgggtgtcaagaacaaacaatggaccagcggatcttcttgcaaaacatcggctaccagataattgttcgtttcaatatcactattatgttccacctttcattgtatcagccttacattgtaatcactcttgacttgattaattgaaaaaagtcgataaaaaaaaaaatctctggttttaatccaaacatctaagaggtcacacactagagtcacatgcagtgaactgtcataattttatcacattattgtgttctccatcatgtaaaaaggagtggttcttttgtacgtgttatttggttgtatgttctcggtcaaaagcccaattgtgggatggcccattaatgataaagccccttttaattttaaaaaaacaaacaaagccggcctgaaataataatcgggtcccgggttgactggtccgaccgaccggttcggtgagatattaatgaatgtttttcttcactctcccgatttcaatttttcgggatcgagtccgttccgacaaattaatttaacagtcaatgccggcaaaaaaaaaaaaaaattaacagtcaattggcggcgaagatgacgactcagtcgcagttcttagtgaacctctcttacggaggcctcgcctcccaaaggttcatcttcctttcctctataccccttctatcgctttcttctgttgtgttgctttcttctgaatgattttttttttgtcgatttgtttttgtagtaatctcagagcgaataatcgtgtttcaccttcttcttgtcaaattacacgaacaaatcgctcatgggcattaccagtttcctttaaagttgagaaatttcaactccaacgaggaaggaggagaagaggatcaccatgttttggggagagcgaagggttggtcaaaaatgggattggtgatgctgatgggattataattgttgatcacggttctcgtcgccgtgaatccaatcttatgcttggtaatagctttgtttctcttccttctccttcttcattttctttgttgtccttactttattgtatagtatacttcctttacggctttaccttgtgcgagtttatgtaattgtgttgttgtttctgtatttcagaggagtttgtgaaaatgttcaaagaaaaaactggttacccaattgtagagcctgctcatatggtaactctttctaatgttctcacctttatgcatagtgagaaccatacccatgagtttgatacagtctgatttccgtttcttggtcatcttttgcatttagcttaatatgttctatatcaggaaattagatgactttcaagctctgcttgctgtttgctgatttttacactttacatcaggaattggctgagccatctataaaagatgcattcagtttgtgtgtacaacaaggggcgaaacgtgtagttgtgagcccgttttttctatttcctggaagacattggcatacggtatggctttgttcatctcaatttgttttgttttcttgaagcttctagcttttcttatttatgggattattggaggatgtacattaatggcctagtgagatcatgacccttatttgattcaggacattccctcgttgacggctgatgctgcaaaggagttctctggcatctcatacctcataactgcacctctcggcccccataatctcctcctggtaagttataaagcatattttccccccaaaacgagcgagcactttaaacctaagggatgtgagagcatcctcatgcattagtgaatgccacttttttcccttgaacttccaatgagagcatcctcatgcattagggatcttctgctgtttaatcttcacaagagatctgttcttcttttggctcttgatctttcagtaatctactaatatttctttctgcaggacgttgtaaatgacagaatccaacattgcttgagccatgttgaaggtgatgctgacgagtgtcttgtttgtgctggaacaaataagtgcaagctctacaatagttcttaggtgtacatgtaagaacgtttttgtatatctgctcatcttctctaaccttcggatgcgggaaaaaaaggaggcatagtatattgttcatactcatcatttagtacgcgtcctatgtttcaacaagggagttttgagatttatgttcttttcttcttattgcagaccaatttgaaagactacgataatataataaaagctgtctgttaaatgttgtctctccctcttatcaacaaattaagaaattgaaatttgatgtatcgtatatcagcaatgtttcatggttataaaaaaaatagaagtttctctcgatgctttttctggcctcctttttcttttcttattgggtttcgtgcattgcatttgttgaaccacaaggcagagaccatttttccttattgtaacttctgcaggtaaagataagagggaaaacgtgtggttgtaggagatagcaaagacttttgaatgtctcccaccaaattctgatgaatgaatatgtggatgtggtatttcatggaccagcacaaaagagcatttcaagaagtcgtttggtagctgtaccatctaattatgttcacatgatgctgagagttgaataattcagaaagggacaaagagtgttatgattgcgttgacttggagtcatgtttcatgaaggtagtgcgtagttgactcttttctagtgtaggaggtagagatttgggagagtcactagaacacgaaatg

SEQ ID NO: 5938 - DNA, 3000 bp, Unknown; identical to SEQ ID NO: 5927
  misc_feature (1)..( 3000): cDNA_ID_3078983_gDNA_ID_1620833_Annot_ID_169764 3000 nt of promoter + ATG

SEQ ID NO: 5939 - DNA, 3000 bp, Unknown; identical to SEQ ID NO: 5930
  misc_feature (1)..( 3000): cDNA_ID_1989667_gDNA_ID_1620833_Annot_ID_57906 3000 nt of promoter + ATG

SEQ ID NO: 5940 - DNA, 3000 bp, Unknown; identical to SEQ ID NO: 5932
  misc_feature (1)..( 3000): cDNA_ID_2993114_gDNA_ID_1620833_Annot_ID_57902 3000 nt of promoter + ATG

SEQ ID NO: 5941 - DNA, 3000 bp, Unknown; identical to SEQ ID NO: 5934
  misc_feature (1)..( 3000): cDNA_ID_1989671_gDNA_ID_1620833_Annot_ID_57900 3000 nt of promoter + ATG

SEQ ID NO: 5942 - DNA, 3000 bp, Unknown; identical to SEQ ID NO: 5933
  misc_feature (1)..( 3000): cDNA_ID_1989670_gDNA_ID_1620833_Annot_ID_57901 3000 nt of promoter + ATG

SEQ ID NO: 5943 - DNA, 3000 bp, Unknown
  misc_feature (1)..( 3000): cDNA_ID_4265714_gDNA_ID_1620834_Annot_ID_57919 3000 nt of promoter + ATG
aaaaaatgttcctgagatgtgtttcagagctcaatctctatctgtacaacttttcctaacctcgccgcaaatttctatttacaatcggagactgtaacctatccccaggattagaaagaccaaaaatttctaaaaaagacaaaacaaaaattaggattcaacgagaacgaaagaggaaagatttcagaagccaaatctcaaagcaagagacgacggcattttttgcgtctgtggaaccacgtcttcgatccaaaacgatcaccaaaaccatgcggatctaactctaacaacaacatcttcgaaaacagaaccgattaatcgaccttaccgaagaaacgatcatcctcgccggtaagcgataaagaaaaatctaaccgcgaaactcgtttccttcgccggagatatccaataagcaccaatacaagaccgatgttagaagagagagagagagctcaaagagagtaatcgcgacgagagcacacgaaaatgagaccttatacagttatactgttacgagcgagtctagggttccggtttttttccccctgtaaatataccaaattgagataccggtatagattataaaccggcttgcattttccggttcgattagctgatttctctatgtaacaaaatgccatttacagttttcaaatttaccggttaaaattgacctaaccgaaacaaataaagtggaaatgttttagtttttgattcaactaagtgtatcatcaatggattttatattgtttccatattgtgcaaaatgtaatcagaaaatgatcacgatgtgcaaattggtttgcttaatttaagattgaattacagatttttttttatcgaatattaaaggatttattaaggaaataaggaagatctggtaaaaatcagatgctggcaggtgacacgtgtcactcatgactaaggtcttaaactcttacggataaagaaagcgacaaactgggagcactcttagaagacgaagaagatcgacggcagagatagaaaaaagctaaaaggtcgtcatcgaaaacaacggctaagatcttgttctcggatcagacccaacagaggagagagaaaatggatccgcttttgtgatttggataagatgacgtggcgtccatatccttgggtcgttgggcagagaagagagcagaaggcagtgtgagaggcacgtgatctgtcacgtgatttttgattctttttcactgttacacttccactatcgttcgagctatatttttttttatgaaaaaagaatctaaagatttatcagagttcctcctagagatgctaaatttataggaacagtggtggtccttggacaatagtatgatactaccaaacaccaacagaaatcatttttctgtcgttgtatcatttactgacataacttgattacaaaaatatagtattaattagctttgggagtttcacatattttagtatcaaatcaaatatacaacagaaatcaatactatagtatttggaaatgcccactacctaaacatatactacatttctttttcggtccacgcttacttattacatcgttaatccttatcttcaacagattagatgttaaagtgagtagacaagcttagactgattccaaccatgtgatttgattccaaaaagaacattatagctgtgatgggcttgagtgacgaacaacactgttggttctgtatcaactggtgatgaccattatttcagcccacaacttggagataaaagaaccaaatcataagcagtttccacagactaaagcaccaacaaaaactatggaaagcttttatcgagcaaaagatcacgagtcacaaacataacaaaaaagtacacgaatcatgaaatcaaatttctcaagttccctatcaaaacgctttaaaatacagaaaagggatcccttctcatttattgtgtcgttctctcccaaaccccaaaacactattacccaaatttagagagaacacacaacggttagttgaggtattcagagtttgaatcaattctaattcaagtcttttatttgaagtataagcttattgggctggtttttcacaatgactgtatatttgacccaatccgcccaatgtgacgaaaaggaggacccataactagtggtgtcctttactttctttttcttttccaaaaacgttaagatcataaactccatacctatatacattaatatgaactatgaagtgtcgtctactttgtatgaatgttgctctcatagtctcatctcattatttatttttgtcctttaaaatgacaaaaagatagtgacatttattatttattttttgtttccgtcgcttgtaatatatttatttgattaataaaatgggacgaaatcacaaatatatattagaagaacaaagaacaatagatacaaataatagtaacattatattttactcataagaatatacttcatgtgtggcacatgtctcatgtagtccatacattcgtgtttttttttgttgttgcatatttgatatcttaaacactaaaatttacacatgattcatgaatgtcaaagattcatttctccctagtgcttctttctctaccatcaaaagaaaattcatgactaataatccatacaaataatagtaacattttactcataagaatatacttcatgtgtggcacatgtctcatgtactccatacatacgtgttttttttttttttttgcatatttgatatcttaaacactaaattcacactagattcatgaacgtcaaagattcatttctccctggtgctttctctaccatcaaaagaaaattcatgactagagagatatatacataatttggaaattggaatgacaaatgaaaaacaaacaataaatgaatactttcgtcccaatatttattaggttataaataaattacttgtgacttgtgactaaaggtgtcaacaatcattcttctatccaatcaatatcatcaaactcttcactttactctctctctcactcataatg

SEQ ID NO: 5944 - DNA, 3000 bp, Unknown
  misc_feature (1)..( 3000): cDNA_ID_2990797_gDNA_ID_1620834_Annot_ID_57928 3000 nt of promoter + ATG
tgattttaaaatataaattagcaccaaaataattaatttaaaaaaaaaatatagcgactgtttataacgacaatcaaacgaacaacacatcgacaattattagcgattgtcgctgtaattggtcgttgaatctagcgacagacaaacgaacaatgtatgttgtcgattgttgctgtcgctggatccagcgacagagaaacgaacagggcatatgccttcgaaaatatctcatgttagggttaggccatgcaaatatattggacacttattttattttaatatgtggtctgaacttatttctttttgaacaaaaacaagaatattgttgtttaaaatttccatgaaatgattaagcaatacatatacaccacagaaaacaaactcagcttcttcttagctaagcaggcttaaggggcggctggacttatctataataaaaatttgagtatctaaacgaataaattggagatattcttttagtgttatcctaattatagttataaaacaattataaccttagaaagtttcttggaaatttaatggtaatttcattaccgtaaatagtttttctttcttcttcacgttttttttttttttttgttaaacttcttttctttctctataaaaactaaaaagcaaacttctcctttttggtacacttgccaaatgctctcaagctcaaattagcccaataaagagagaaaaacaaaacaataaaaatattaaaaatcatgaacacgatctttaaaaaattatcctgttttaagaaaaaggttaaatctttacgaatattcgaatccaggtcactctcttcttcgtcttcttcctcattcactcctcaaaagttcgacgtttttctaagcttcagaggcaaagatactcgcaagaacttcgtcagttttctctacaaggcgctagtatcaaaagggattcgaactttcaaagacgacgaggaattggagagaggccgtccgattccgccggagcttcgccaagcaatcaaagggtcgagaatcgccgtggtcgtggtctctgtaacttaccctgcctcgtcctggtgtctcgaagaactcagggagattctgaaacttgagaagctgggtttgctcactgtaatacccattttctatgagattaatccttcagacgtgaggagacagagcggagtagtctcaaaacagttcaagaagcatgagaagagacagagcagagaaagagtcaaatcgtggagggaagcgttgaccaaattggctagtctctccggcgagtgttcaaagaattggtataaatctctgaaactttcttaaagattgatgaatcgggtcgatagtttcagattgaaatctgttgaatagtttctcaaagtttcgattttttctctgtttctcaaatttaaggtctttgtctctgtttctgttttagggaagatctgtcgaatcgtttctcaaagtttcgatttttatctctgtttctcaaagttaggatcattgtttctgtttctcaaagttagggtcttcgtctctgtttctcaaaattaggatcattgtctctgtttctcaaagttagggtcttcgtctctgtttctcaaggttaggtctttttgtctctgtttctcaaggttaggtctttttgtctctgtttctcaaggttaggatcattgtctctgtttcttaaggttagggtctttgtgtctctgtttctcaagcttaggatctttgtctctgtttctgtttcagggaagatgactcgaagctggtcgatggaattactgagaagatatcaacaaagttgttctcggaaaaaccaaggaatgataatatcctaattggtatcgaccaacacatgggggaattgtatccactatttaacctgaattcgaatgaagatgttcaagtcattgggatttggggaagaggaagtaatggtagatcagcactagcaagccacgtttaccaaaacatcaaacatcactttgaagctcattgttttctcgaagacgtgagacggatttcgctacatttccgtgactctcatttacaagatgagcttctttcaaatatgcaaggagaaggtttgacaacaaagaactgtcataggtgtcttaagactatcaaagcaaggctaaggaacaagaaggttcttcttgtggcgaacgatgtagacaaacttgaacaatttgatgcacttgctgaagaatttagctggtttggtcctggaagcagaatcatcataaccacacaagatagacaattgcttatttcatcagtagtgaggagtgtctacgaagttaagctcttgagatgttacgcagttcgtgagctctttaggtcaaatgccttcaaagaaagagaaagagacgatcctgttgggttcgaccagtctacatatcgagccatgtatatatcaggtcatgtgtttttgaccttgagatatattttcactttgttgtgtgatagaggtcaacttagagaaaggataaatgcaatagtacatagtctttagattcattaatccttttagatacaaggtgttgtatttaggtcgaataagttggttagattcaggaatattaacttaatgtgtttgtttgttctatagtgaatgttacgccatttttttacatatggatgtgccacttgtgtatggatttgtgtactatccatttggtaaactattttattcttaagacggttcacaacaaattcatttaaacttgtaattgttttataaattacctatatcaatctcgtccgtcagttgacttagttgtaaccaccagaaaagtaagatgataatttatgtttatccatgttcattttcttattttggcggctcatcttctctttctgagtagtttagtgaaacagaagctgacaaacaaaaaatgaaaatgccaggaaacacacactagagcagaagactcctagttcaacttctcttgtgttaatgtgcctataaatatcctttgagatattcatagagtatcagaaataaaaaaaa

SEQ ID NO: 5945 - DNA, 3000 bp, Unknown
  misc_feature (1)..( 3000): cDNA_ID_1989733_gDNA_ID_1620834_Annot_ID_57931 3000 nt of promoter + ATG
gatttctcagggtcgccactcagcgcatctacacgacgagtttctgagaaatattaaaagagaagactctaacaaacaatgtcttaagaatcaaaaggttctgcttgtggcagacaacgttactaaggttaaacagttagaagctcttgcaggggatttcagcagttttggtcctgggagtgttgttattatcactacagacaacaaggggttgttgaattcttatggtataacagatgtctacgaagttgagcatttgaagttttgtggaatcttacgatcattgggctttaaaaagagagctgctgcgttccagcgggctttgtgtagagcaaagagttttgccacggaatgtttttgttgtcaaagtagtagtatatctggttatgggaaagtgacagatttagtttaattaagttgaatcccttattagtcatatgcattaagttaagtaaacttaataagttgtgtggcttagaaataatattgttttgtctatttttggagtgggttgctcttggggtgtagaaaaatgtcactcttcattggattaagtaatatacatttttttgttccttagtttttaagacatttttttacatctggatgtgccagttgtttgtaatatactgttctttccttatagaaataaatattacacaattttttaaaaaagatttatgtatttgggagggttttttgatgtttggacatgcccaataaaattaaaaattaatacaggagacacaaagtcgctaactttccaaagttggaatctacatatgtctaaaacagagaagaaaagcttttaaactttttacatgacgatcctccaataatagtaatacactactacagttcaaagccactgacaagtttctcgcttttttcccttaatgagaaactcttttaacctgcttttctgatttatgctctttgggtacgtggaagatttcaatcacagactaacgtaattaaatcatttattggaaactgtgagtcaagctgaataaacttgatgcaaacgaatagatatgaaagaaattgggttgatcaacaaaaaaacaagccgacaaaaactgaatctcatgatatgttttcgtccgtcagttttaaccgttcgtttgatcggataatcaaaaccagtaaatgccaataatacacaccagaaaagtaagatgataatttttgttcgttagtagtattttattattatcatgctcatcattttcttactttggcggcccatcttttctcttcccctctttctgagtagtttagtaaaacagaacctgacagaaaaaaatagaaaatgccaggaaacacacacttagcaggaagactatgggagtctctaaccaatgcacatgctttatttagttcaactactctctagtggtctataaatatcgttgagttctttatttctattactcatcatagttctcaatagagagaatcaaaaatcaaaatgtcttctcctactgcgactaagtacgacgtctttctgagtttcagaggactcgacactcgtcgcaacttcatcagttttctctacaaagaactcgttcgaagaaaaattcgaactttcaaagacgacaaggagctcgagaatggccggaggatttctccggagctcaaacgcgccatcgaggagtcgaaattcgccgtcgttgtggtctctgtgaactacgctgcgtctccttggtgtctcgatgagcttgtgaagattatggatttcgaaaacaagggttccatcaccgtgatgcctatcttctacggcgtggatccttgtcatttgaggaggcagatcggagatgtcgctgaacagtttaagaagcacgaggctagagaagaagatcatgagaaagtagcttcgtggagacgagcattgaccagtttagcgagtatctccggcgaatgttcattgaaatggtgaaatttcgtagcgttggttagaaagattggatttttatttgatatgtctcgttactaaagtttcgatttttattttgttttctctctgtagggaagatgaagcgaatctggtggacgaaattgctgacaagatatcaaaaaatctgatgactgttacaacaataagcaatgggagggacctagttgggattgatacacacatgaaggctcttaacaaaaaattggatttgaattccaacaaaagtttgagagtggttgggatttgggcaagaggatacaatggtagatcagctttagctaaatatgtttatcaagacatctgtcattggttgaaggttggttggttgaaggtttatcaagatatcaagacagcttccaaactttatgttttaactcgttggttgaaggttgcacatttgcttcatagatcacatcactcttttaaaactgagtagccagccaatcaataacccgaatttcactgagaaatccccacatttgttatgtttccatactacaaaatcatctattgacaccactagttagctgtgatcttataaagatgagtaagccaaccaaaccaataacccaaattggaaaatgtgagtcaagccgaataaacttgatgtaataacctattcgttctaacttgaaattgttattaaaatcatccttatcaattagcctttctcgtccgtcaattgacttagttctaaccattcgtttgatcgataatcaaacaaacagttgaatcttcttcaaccaattaaattagactacgagtaactaaatgccaatacacgagaaaactagactaagaggagaatttgtgttcgttaatatgttatccatactcattatcttattttggcggcccatctattctcttccctctttctgagtagtttagtgaaacagaagctgacaagaaaaaatagaaaatgccaggaaacacacagttagcagtaggaagactcttataggtcaacttctgtagtggtagtgcctataaatatccttgagttttttatttctatcactcattgagaatcaaaaatcaaa

SEQ ID NO: 5946 - DNA, 3000 bp, Unknown
  misc_feature (1)..( 3000): cDNA_ID_1988891_gDNA_ID_1620834_Annot_ID_57929 3000 nt of promoter + ATG
ggcaagcgttggccgctttggcagatatctccggcgattgttcagggtgaaatttcttaacttggtgataaagattgaattgaattttaaccaagtcgccttggtccagtggtaaaaggaagataattcccgccacctggtttgatggtttccccggacactaagattagtcttccggtttaggaaaaaaaatagattgaatttttattgttagatatgatttgaagagatgctaagtttcgattattttttattttttttgtctatgtagggaagatgactcgaagctggtggacgtaatcgctgacaagatatcaaaagagctgatgatagttacaagaataagcaatgggaggaacctagttgggattgataaacacatgaacgaacttaaccgattgatggatttgaattccaacaaaggtaagagaatggttgggatttgggcaagaggaggaagttgtagatcggctctagctaaatatgtttatcagacatcctgtcaacactttgatagccattgttttcttggaaacgtgaaacggatttgtcagggtaactactttgaaagccatctacacaaagagtttctggataatattcaaggagaaaactctagcaaacaaagtctcaagaagcaaaaggttctgcttgtggcagacgacgtcgataagcttgaacagttagatgctcttgcaggggatttcagcggttttggtccggggagtgttgttatcatcactacaaaagataagcagttgttgatttcttatggtatacagcttgtctacgaagctgagtttttgacattccagaaattttgtcgtagcttccgatcattggcctttaaaaagagagacgacatttctgctgcgttcgagtgggctttgtatatataaagcaatgaattttgccacggaatgttttagctctcaaagtagaagatctggttatgagaaagtgttggaatcagtttaataagttagatcccttgagtcatatgcattaagttaactaaacttaataagttgtgtggctttcaaataaggttgttttgtctatttttggagtgggttctcttggggtgtataaaaatgtcactcttcattggattaaataatatacaaattttttttgttataatcaaatttgtgtattttagttataacctaaatgttgtatgtctctttctagacttaagaactaaagtctatgttttccttaaaaacaaagtttgtataatttcttgggattcccatgaccatttgttctttgaatacccgaattctcaaaggcagtttggttgtccctcgcatcacatgttttccatagccctcttctgcacttgctaaagaagttaattggtttggtcttggaagcagaatcttcataacaacacaagacatgcaattgcttatttcatcaatagtggggagcgtctacgaagttgagcttttgagatgttacaaagttcgacagctatttaggttagatgccttcaaacaaagagaggatcatgttggttttgagcagtctacagagtttttaagaatgttagagcaccctaaatgggggtttctaaacaagtttcttaacaaagaataaaaaatttatatgatttaaatattacataagtctcttaaatttgatgaaacttaggcaaattgtctcttagttaagagataattggtcttggtttcaccaaatttaagagacctataattaaaaatattatttatctatacttacactttaattttgtttaagagacttaggcttagagactaccattgaggatgctcttaaacaaccatttttaacatctggatgtactagttgtttgtaatactgttctttccttataagaaataaagaatacaccatttgaaacctgaaagatggccaagcttgaggcctattaaccactccaactagaaccacgtcctccacaacacagacaactctgcggctaaccatactctccaccgcccagacaacgcaaagaaaatgggcttccaatttagttttaatgtttgtgaatgccggatgactatgcagcaaaacatgtcctgattcctctcttagaactcagtagacaactgccacaaagtttcttttagaccaggagaagccaatattacactgagccctttgacttgtaccagaaaacacataagtgacataaccagtagggctagtccctgtttcaagagaatttctttcagactacacttcctacgcagcaaaccaatcatccacatcctctctcactttctttatggtttccaaagcagagaatgtttttccttcaaaaaacatgaggtttctatttttccaaattctccaaataatccatgggaaggggcatgataatgtgacatgcctcaaatttgtctagagaaaatagactctccatcaagaccacaagttggcatctgcagtccattttcacacccctatgcgtcagaagatccataacatgtacaactccacttagaatcttccaaagaaaaacattaatttttggttttagtcttgagcttccaaacttaatgttttaactcgttggttgaaagttgcacatttgcttaatcatccttatcaattagcctttctcgtccgtcaattgacttagttctaaccattcgtttgatcgataatcaaacaaacatttgaatcttcttcaaccaattaaattagactacgagtaactaaatgccaatacacgagaaaagtaagaggagaatttgtgttcgttaatatgttatccatactcattatcttactttggcggcccatctattctcttccctctttctgagtagtttagtgaaacagaagctgacaagaaaaaatagaaaatgccaggaaacacacagttagcagtaggaagactctttgttctaggatgactcttataggtcaactcctgtagtggtagtgcctataaatatccttgagttctttatttctatcactcattgagaatcaaaaatcaaa

SEQ ID NO: 5947 - DNA, 3000 bp, Unknown
  misc_feature (1)..( 3000): cDNA_ID_1989682_gDNA_ID_1620834_Annot_ID_57946 3000 nt of promoter + ATG
caatttaggtagaatatcaaagatctcctcaatttgctgtataatggtcatctaatttccaacttatcaacttccttgttaacaatttaggtagaatatctaagatcttctttctattattggcgtcaatcagatcgattataatctgtcaatatccttcaaggtgtcaatcaagttctattttgtttccctctttcctctctcctcttgcccttgtctctttataacatgcgagctccatttgtacatttttcttgattttcaagtctcagatggagaatcttgggttgttccaaattcttttgctattctgtctctttgtctcggtccgcatagtttctgtttcttgtttaaattcagatgggttaactttactctcgcttcggaagcatttggacaaagtaccaccagaattaacttcgacatggaagactaacgcatctgaagccactccatgtaactggtttggtattatctgtgatgattctaagaaggttacgtctctcaacttcaccggttcaggtgtttcaggccaattgggtcctgaaatagggcaactcaaaagcttagagatattggatatgagttctaacaatttctctgggattataccttccagtttagggaactgtagctcacttgtgtacattgatttgtctgaaaatagtttctctggtaaggtccccgatactctcggtagcttgaagagcttggccgatttgtatctttacagcaactctcttactggggaattgcctaaatccttgtttcgcattccggtgttgaattatctgcatgttgagcataacaacctaaccgggttaatccctcaaaatgttggtgaagctaaggaacttcttcatctgcgtttgtttgacaatcagtttactggtacaatccctgagtctattggaaactgcagcaagctggagattctgtatctgcacaagaataagttagttggttcattgcctgcaagtctcaatcttttggagagtctcactgatctgtttgttgcaaacaacagcctaagaggaacagttcagtttggctcaaccaaatgcaggaatctggtgactttagatttgtcatacaatgaattcgaaggtggtgtccctcctgaactgggaaattgcagtagccttgacgctttagtcattgtgagtggtaacttgtcaggtacaatcccttcctcattgggtatgttgaagaatctcacaattcttaacctttccgagaatcgtctttctgggagtatccccgcggagctcgggaactgcagtagcttgaacttgttgaagctgaacgataaccagcttgtaggtggaataccaagtgcattaggtaagctgaggaagctagaaagtctggagcttttcgaaaaccggttttcgggcgagattcctatcgagatatggaagattcagagtcttacgcagttgctagtttatcggaacaatctcacaggaaaattaccagaggaaataaccaagctcaagaatctcaagatcgttactctcttcaacaatagcttttatggagtgataccacccaatttaggtctgaacagcaacttggagattatcgatttcattggtaacaattttacaggtgagataccacgaaatctctgccatggaaagatgttgacagtgtttaacttaggatctaaccggcttcacggcaaaataccggcatccgttagtcagtgcaagactctaagcagattcatcctcagagaaaacaacctttcaggctttcttcctaagttttcgaagaatcaagatctttcgtttctcgacctcaatagcaacagcttcgaaggaccaatccctcgtagtctcggaagctgtaggaatctcacgaccatcaatctgtctcggaacaagctcacgaggaatattcctagagaacttgagaatctacaaaaccttagtcacctgaatcttgggtctaacttattaaacggtacggttccttcaaagtttagtaactggaaagagttgaccactttggttctctccggaaaccggttttcaggattcgttccgcccgatcgccactcttagagagaaggaaaacaaccatgtattccagtgacatcatatcaaacatttttactatacaacatactctcttttttttctttgcttaaatcgttgtataccttttcaccattcttattgccgcttagtacatttttaattgataacacaaaagtttcggttgataagatccaaattcataatatacaaaattcttatttaacattcaataagaaaaaacaaaatttgctaatgctacgatgttacccactcggaagcttaccatagtctgttagtcatagtttgaaagtcaatttggtcagctgtagcttacggttaggctgttcttatcaaataacaaaaagaatgtcaaacacgtattttatcgtattcaatttagggcacgttgataacgtttccaaaacaattattcaatagttggtaatgaaaattaatgaaagacccaaacctaatgaatgttaaccactaattgaccattcaccaaccaattatttaatgaaatatctttgttagtttcgttatttagtattgttaacggtttcttactctttttgactacatcagacggacgtaaaacgacatcgttgtcgaatattcaaaagattcacaatttgacaaagagaaacagagacgacttgtttctaaaaaaaccacgtgtgtctgaaaacggaaaaaaagaagactgaatgagaaacggcgtgtaaaaagaaaacgcgttgaaggttaggctctcacaatcgttggtatacagagagaccaaacatctcgtcataaaaaacggcaagaatcatcagttactttatacccatcaatcaagtcttgtcctttttctccttctctctctcatacgagcttctttcctgctgatgaggcttgagctttaaattttcaatcttgattgagattctgcatgtttctcgatctttaaactcag

SEQ ID NO: 5948 - DNA, 3000 bp, Unknown
  misc_feature (1)..( 3000): cDNA_ID_1989685_gDNA_ID_1620834_Annot_ID_57943 3000 nt of promoter + ATG
tgatattctacctaaattgtaaatattcctaaaatagtttctttgtcatttcctatgatttttcatagtctgcgtttgtgtttgggtggagcagacactatcataattggactgagttatatatagaaaacatattgaaactatccttaatcattcccattaacatctcccaaactctctctaccaactttgcacatatacaagtgtaaatatctcaatcttgagagacttaacaaacttaccaaaagtgtgaatccatgacttggccatcgttcagttacgccaattagatgatgcctcgagctccacatcctcttcccaccaagttgccgactgcaacaccatcagtttcggaccagtttaagcttctatgcgcatatacaagaaagagacaaaaacaatctagacaatgtgctaaaccttgtatcccctgcgcaggaactcgagtgagcttcctttctcttcttgtagtcccagaacctgtaacagctcttccttcgtctgtttgcatccacatcaataaaagcttgttacttttttcccagagattggataaaaaagactatattcaaaaggttaaacgcttttagcgcacatacttcacccagcgtgaaacgagtagggctttctgcaacacacgcaaatgaaccatcagtttgcttaagcatcacctgccatggccctgcattttttttccatatcagatatggatagagaaaacactctctcatgttcaggacactggaattgagaatgattatgcaaatctgatagagagactgagacaagcatcacatcatgcttagtgatcaaggaagtcacaatacaaataggtacagctatgatatatattgttttagtcttgtaaagaatagtctagcatttaccaggatattgtcgaaaaagtgctccgttgtagttcaacacaaatggtgccactgccactgtcttagccaagcaacacaaacaactattatgctgcttcatttctgtaagcagccaagaaaggtccgctaagaaaatatcatcctaattgtatagtacctttgaatactctctggttcggatataaaagacgggaataaattgagaaagaaaccggtagtgcagatctttagggggaaagccaagaagccctaggtcagcactgcactaaaattcaattgtcaccacaagtgaggaaaccgagagagattgagttacgcaaaaaactgagatctcaatagtgataataccgcaaagtatctagctcaagattgaacagaagagctggggttgaactggcaaaggtttcctgcaagtatagaccaacaacttacagaactatatagaaggcacaaagaaaatttaaaaatgaccatagacagtgaatatatctaaaccaagttccatgtaacgataagaaaagataaaaggattcaataccacaaacttctctatgaaagagagttcccgagtgctgcaattgataaatatataaagggtcggtggctccttgggctcccaagttcctgtaggaacacataatcctcatgactaaaatgcaataatccatctgttaaaataagtaaaaaggacagttttagctataccttcgttttcatcttcaaaatcaaagtccagggtactccttatggacctaaagaaattggtgacagaagtaccaggtatatcatctagagagccaatacttatgccatcaacctgatgagacactcacaaataagccgttgttaagatccaagtgttcaatatcttattcctaacatgtgcaaaaacttgcagcaaagtggaagttctatttgtaccgaatcaaatgccgctttgaagcgttgcgaagccctgcgcttctcaggcttgtcaggaaaaacctggaacatgtttgatcattcataggtcagaagaaccaaataaaaaggatgagtaatatatagagtaatgaaggagaaagattacaatgcatgctctggtctcgattttctcctgaagtttgcgaacaacagtcacggccagttgtatattagcatcaataaagtcgtctgaagaaccctatacaatgtttgcaaaaccaacacagttaaaatttcgctaaaaaactaagtcacaatggtaacaagttaaaaaaagcttaccttgtaagaagaaatgctactgggtaaaggtctacacatgaacaaaaagagccaaagaagccattaaaatcacgaacccagagcacaaaattcagataattgagatagagtaagagcagggagattacggaaaatcgatttccaaacgagattttgaatcctggagagcgaaagctagagaattggcggcgtcagtggctagaacctcgtatgatttgggcttatacaagggaacacctctcctaggatcggaattagaagaagtagatgagattgcgccgccgctgtttgcggtggctccgcatctgattctgctggttagaatcgaaggagaagagaagagcgccggtaacatcgcaatcgccatagccatttttgctctctctctctctctgtgtttagacggtagtgataacactggctacagtctaatctgcacaacctcatgacacgtggctaaatcctgttatcttcccttaaccggattgaaccggaatttgattggcagttatcaaatcggtacttttacaacaagacgacgacgttaaagggtccagagacggttgctaacggcgtcaaatatattgcatgctattatccactgcggtagagctcaggactacttctcttgacaaccgctgatctcaacttggtctaaacctcatcgacggctgtgattacttttatatcagagttccagagctgagaaactctctctataacagaatccaagcgccatttaatttgagtcttcttttttaactacttttactctgtttctctctctaactgagaaacttctcactttcccgagaaaatttaattttctatcagctccgagaaaatcttcaacagaagaacgagaatg

SEQ ID NO: 5949 - DNA, 3000 bp, Unknown
  misc_feature (1)..( 3000): cDNA_ID_3079076_gDNA_ID_1620834_Annot_ID_57942 3000 nt of promoter + ATG
ctcttgacaaccgctgatctcaacttggtctaaacctcatcgacggctgtgattacttttatatcagagttccagagctgagaaactctctctataacagaatccaagcgccatttaatttgagtcttcttttttaactacttttactctgtttctctctctaactgagaaacttctcactttcccgagaaaatttaattttctatcagctccgagaaaatcttcaacagaagaacgagaatgacgaaacggattgattcttctcttctctacacggcgctcgtagtgcttcttcttcttggagtagttcatcgctctaatgcaaggccacgcgttaatcgacgtaagtttccgagaaaatttctgtagaatctcatgttaatgcttgaaacatcataatctttggcgacgaagaagtttttgatgaggtttctttgatttccttgtatcgcttttgagtaatagcaagaaaacgatgatcgatgtttagcttatccctaatttgattttgagattcttctctttcattgttgtttcttactgttggaaccttcgttgcagctcccggtttcatgcgattcatatcgaacgcaactgattttgcgtcggaggattactacgattacataatcgtcggaggaggaacggcgggatgtccactagccgccacactttcgcaatctttccgagttcttctgctagaacgcggtggcgttccctacaacagacctaacgtgatgtcacacgacggtttcttgaccactctcactgacgtcaacaatttcgactcgccggctcagtctttcatctctgaggaaggagttcctaacgcgagaggtcgtgttcttggaggaagtagtgcgatcaatgctggattctatagccgtgctgataaacagttctttgagaattcgggtcttgtttgggatctgagtagtgtgaatcagtcttatgagtgggttgagagagcgattgtgtttagacctcagctcaggacttggcaaactgcaattagggatgcgttgcttgaagttggtgtccatccgtttaatggcttcaccttggagcataaagtggggactaagatcggaggttccacgtttgatcgtactgggaggagacacagctctgcagatcttctcagatatgcaaggagttccaacattagagttgcagtttacgcaactgtagagagagtattgcttgcttcatctcctagtgtctcaggttccaacgtttctgcgattggagtggtttaccgtgatcagctgggacgtttccatcacgcattgatacgggacagaggagaggtgatactgtctgctggtgcactcggtagcccacagttgctttttcttagtgggattggtccaaggagttatctttcaacttgggggatccctgtggctcttgaccagcctcatgtgggggattttgtgtatgataacccgaggaatggtatctccattgttcctccggttccaatggagaactcactgatacaagtcgtgggtgttactgaggatggggcttttctggaggctgcttcgaatgtgattccgtttgcatcgcctttacattctgtgttcatcagagctccagcttctcctttgtacgtccctgtgacaactataatggaaaagatcctaggtccagtgtctattggtttactaaggttggcgtcaacggatgtgaggattaacccagttgttagattcaactacttcagtgatccacaggatctagagagatgtgtcaatgggactaggaagattggagaaatactcaggagccgagctatgcaggactttatgataagggaatggtttgggaaccgtaggttcaggtttgttggagctccattgcctgtggaccaatcaaatgatcttgtgatggcagatttctgcagacgaactgtgagcacaatctggcactaccatggaggcgctgttgtaggaaaagtagtggactctgatctcaaagtcattggtgttaattctcttagactcgtggatggatcaaccttcaatatctctccagggactaatcctcaggctaccttgatgatgcttggaaggtaagaagaaaccatcaaagtgtatactcttcgaaactgtatcagtcctttttgaccagacttaaaaacaaatttcattggctttaattgcaggtacatggggctgaagatgctgagagagaggatgagatagaaatgatttccgcaagatgggctctttcgcattttctggattagtttgctgattctttttctgttatacgttcacctgtagctctctatcagatggttctacagttagtttgttcattttttctttctatcattggactcctcggttaattcatgtaataacggagtacaggagttcgtctatagttcatgtaaaaaaacaggattgagatataatgataaatggcctgatcttactttcagagtaaccattatggcaaatttcaaaccttcctgtgtcagaaagcagaggacatgttcatatagcatagtacatactagagcaaacttaaatattgataatgtgaaaacaggaggtaatataatattcctctcatcttctttttggcactatgatgaacacttttggaatttgttccacgtaaatgtttcttcttgaagttttctggaatctcctagttctttatgtaaagaaagataagacaattaaacacatatctatcgtcctcttacattgctgtcctggaatccaataccttcccatgaagcatgcacgtctttttatatgcgtgttgcaaaagctaaactctcaattcttgttcttcattgatctgcaacctgttttagttccaaaaagcttcagctacatcgaagaacgagtttgattctccatagatggtatcagattaatagcagcttcctctttgttgtaaaactttggtttcttagcatcttcccttccattgtgtttacaaaagttagctgtcatttaaacagcaggacgactcatg

SEQ ID NO: 5950 - DNA, 3000 bp, Unknown
  misc_feature (1)..( 3000): cDNA_ID_1989687_gDNA_ID_1620834_Annot_ID_57940 3000 nt of promoter + ATG
gcactatgatgaacacttttggaatttgttccacgtaaatgtttcttcttgaagttttctggaatctcctagttctttatgtaaagaaagataagacaattaaacacatatctatcgtcctcttacattgctgtcctggaatccaataccttcccatgaagcatgcacgtctttttatatgcgtgttgcaaaagctaaactctcaattcttgttcttcattgatctgcaacctgttttagttccaaaaagcttcagctacatcgaagaacgagtttgattctccatagatggtatcagattaatagcagcttcctctttgttgtaaaactttggtttcttagcatcttcccttccattgtgtttacaaaagttagctgtcatttaaacagcaggacgactcatggatcaacaacaacaaggtgataagaatctgacagtgttcgtaggaccctggggaggaaatggaggaaccacttgggatgatgggatttatgatggtgtccgtgagatcagacttgtttatgaccattgcattgactccatctcggtgatctacgataagaatggtaaacccgcaaagtcagagaagcatggaggtgtgggaggcaacaaaacatcagaggtatgttcctctatcactctggattatgtctctctttaacttcctccctcagattttggtttcttttacatgaaccgaatttctgcagataaagctgcaatacccagaggagtatctgactggcgtgagtggctactactgtccaatggttaacagtggcactcctgtaatcagatcaatgaccttcaagagcaataaacaagtgtatggaccttatggagttgaacagggaacacccttcactttctcagtcaatgggggacgcattgttggtatgaacggtaggagtggctggtaccttgactccatcggcttccatctatcacgccctaaatcaaccaagatgatcaacaagctccgaaagaagattcactggctcacaaggatagtagcatgatttaagccctttgcatagaatgtaaaactatactctacaaataaggatgttagatgtatcttagtccatgagaccaaaagtgactgagcaaaacactctttaatgaacaactcaaaaggaaagcatatcattcaaatggtaaaaactaaaaacacacgaaggttttttatataaagttataaacaaagcatatttcaaagtgagcaatatacacaaatacgcccgtgtttgcggataatagaagcaacaattcgataaggatcgcatgcaaagtggcaggtaatccaagcatgaatgttggttagcgcatttatcctctggctttaagctccgcaagcctcctcgacaaatcatcctcatcgactttctcctcagtcttagtaggaatggcatgaccagcaggctgaggaagccccacagagacttccaaaccatagtcatctgccacctgctgcataaggctgttgacttcgccttctggagtggacaatgaagttgaaccagccatagcattctccatgaactcagcttggacctccatgttcacaaactgcttctcgaatgaatccattgtctctgacatcttctgtagattccctggtgaaggatacagaaaacagataagaaccaatattgtaaacagccccaagaaatcaaattacatttgtgctcaaatgaactaaagatgaaacctttcatatatttccatataaacaaaaccttcctgatctataatcagaatcatccttcaagtttacattacctctcttaactcttttaacttttttttttttggacaaatctcttaactcttaactaatacaacataaaccatggtgatcatacatatccaacctatcgaagataattcgtataattcacagacgatgaaatacctgtggcaagagaagactcaagggatttgacgatattggtcatggatttggtgatggtggtcatcttagcctgagtatcaagacgagcaacaacagcgtcaaggcgagaagcgagacggagatagttcatctgctcgctacgcttacgaatggcgttctcagcgtagatccgagcaccatccatattacccttctcgatagccttcttcaccttcaatttctctgctttctcttccttctcacacttccttgattgcctttgcagagactttgacgtaaatttcaaatcgaatatctgattcatcagcttatctgtgttacccatgttggatcaattcctctagatcaattcgcttggatctatcggtagaaaaattctcaaaaacagagactttagggtttctctgtatttggggaaaatatctcgacgcgttgatgtttgaagaagaggggaggaaggaagctaagtcaaaatcggaattgaccggttcaatcgaaatgtcggtcattacccggtttgatttatatatcatggtgataataaacagtcacacacacaaggcacgcgtgtcaaaagtgactcagcaccgtccgatgtgtcactcttttttacacgatggatcaatcatcatctgcgtgccaactcatagcaaaattaaagtattttggattgttttgcatgtaatttctttccaaaattcaatctaagtttcaaattcaaaccccaaatgcttttgtcttgtctcttccatttcccagaaacgtttttttgaagtaatggaagattcaaattcgtgagagatacgtagtaaattaggtccttttcgtggaatgttggaatcgaattcttgatttttgcagtgttctgacttaaaaccctgatccccttttgtggcccagaaaccggaaaattagattaattacagaggagaaaagtagttcagaggaaaaaaagtgaataaaggtggattctttggtgaatacacatttgggcattttgagtcagatcttagaaaaaggaagctttccagctactgagaagaaatctcaaaattctgcttgtgtgatagggtttttggaaatg

SEQ ID NO: 5951 - DNA, 3000 bp, Unknown
  misc_feature (1)..( 3000): cDNA_ID_2109538_gDNA_ID_1620834_Annot_ID_57939 3000 nt of promoter + ATG
tgtttcataatctagatgaatacaaatctctataatatcaataacatatatttaccatatcttcaatatcttctagatccttctatgtatacgagtacacaattttcaatacatataaatatatgaatgtgattagtgtttattattgttctacgttgttatccatcctaaaccgatcgaattactaatttaacttctaatgttgtcgtaatgatataaacttaagtatattaatacagttcaaatttcaaatatatgtatgtttacgcgtgatatacttaatagaaattcgcgtgatttcagatttgctaagcacacacttcaaaatgtcgtatacgttagatgtttaactattacagtattaattcccaattattattagatcctagaatattggatcgttttcgacaaaaaaaaaaaaaaatgaagaatattggaccgcacgatacttgggaacttggcatgcagctttagtaagtgcgattaggattttaatgggacatagatggcgtggcatgtcacaaatagaaaaggacgaatttactttttaaaactgtttcacaatcacaaatcagcgagtgtcgcttttgcatacgaaccgcatataaaataatcgtgtactaaaatgagaatttctatcaaactttggattcttcattttttgtgctaatataatcaacggacacaaggaatatcacgagcttatattctaatgacgattctcggatcatgtcagtgttgttaggctaccgaataagtgtatgtgtcaaactataatttgtaaaacatgttgtagtgtttggaataacatttaactttcagaaatcgatgaatcatcatatgatacgtgagaagaaagtatggaaaaaaaaaaaagtgtggctagacatgagacccttccataaaactcataattctaaacagtttacgaaaatagcttgtaatttggtcataacacaacacttgatttaacgtgaataatatatgacgaaatagaagggaatgtttgctcaataaataaaaatgcatggttatcaatgttcaaagcaaatgcgaatatcacgtttgctaagtttcgaaagctgacgcgtcatgtatatcacatactattgttattatgattacaaggcaacgtgtttcttatagatctttatttggtggcagcttatggttttgccattgctctagtgtcacggatccaactttatctatttattgacaactgtttttctctacaacatttgttgattattgacacgcacctatttgtttttcttattttacattaattgtttttttcttaactcaccatagctattcgaagtgctcattaagtattcaaatacgttacaaaagctttttgctcttaatcaaaatttgtgtaaatgaaattagtcaaatttttagagctaaatatatataattcagtcttaaaccgtggaccgtctgtcagttttttttggtaaaatatgatcttctggttttcttatagtacaattaattggaaaaatgagtgttgaaatcaaatggatgaaagtaaacaatgaaagcctgtagccaccgaaaaaggctgctacttaattaggatattcttcttattattgttaatctctgtccctcacgattccttgcaagtgccttcctatcaagttccaataatcatatcacataaaataaagaaatctcaaaatagcataatgttataagagttcatttttgccaaagaattaactacaatgttaagattttaaaagaaaaccaacaaaaactatgtatatatacaataacaatcaattttaaaaaagtttctagaatatatattactaaaactataactatattggtttgaattatctaaaattccattctcttttaaatcgtagatcaaatttttatctgatatagtactgctttttagttattttctttgatatttatttatttgaagtaaggatatatttgggtaacggaatattcttctcttattcccgcgttacctcctcctcatcttttttattaaacccaccaggaaacttctaaaaaggcaagaaatcaccccagagccctcacaaccgttggatctctctacaagactcaagtttgacccgtaaacgtcatcaaatccaacggttctcagaataaaatcaaaagtattctaatttgttcttcttttttttgttaccttgaaggtaatattccattggcatctccgataaaatcccccattgtttctctccattcattagtataaatacctaaccacatttctattctcctcaattcacaaaccaacaagaactcaaagagagatccatcaattagaatcactaatttctttagaaatttcctgagtcatggcttacaatagcaatagcaataacaacaacaacaacattgtcgttgttttcgacttcgacaagaccatcatcgacgttgatagcgataattgggtaatcgatgaacttggcttcactgatttgttcaatcaacttctccccaccatgccttggaacacactcatggtttgttctaccttcttctctcatctgttttctcattttccttttgaaatttcgaataacttttcggttttgtattcgattattatcttgcaatttcaatcctttataaaagcttttgttatcttgcaattttgttatcgaataaaaccctaaatggaattgtataaaataacaggaccgtatgatgaaggagcttcatgatcaaggcaaaaccattgaggagatcaaacaagtcttgagaacaatcccaattcatccacgtgtcgtccctgccatcaaatctgcacatgatttagggtaataatcttcattattattctttctagtttttgtttgtaactatcaaattttacatgtctaacaatattttttttctattaaaatatgtctaatgttagacaaaacccaccatttctgatccgatatttacgggttcggtttcaggtgtgagcttaggatagtgagcgatgcaaacatg

SEQ ID NO: 5952 - DNA, 3000 bp, Unknown
  misc_feature (1)..( 3000): cDNA_ID_1989689_gDNA_ID_1620834_Annot_ID_57937 3000 nt of promoter + ATG
tgatcattgagaggattcaacaatctttagctaaagaagggaagaagaaaatgatctatctaggagatggagctggcgattactgtccaagtttgaaactaaacactgaagattacgtgatgccacgtaagaatttccctgtatgggatctaattagtcaaaatccaatgctgattaaagcagcgattagagaatggaccgatggccaaagcatggagatgatattgataggaacgatcgaggagattagattggaggaagagaaggagaagatgttgactagtgcggagaataattgcaagatgcagaccatctctatcgggattaataatgttcatcatgaaccaatattgcctcgtgctcttcgtgtgtctcagtctagttagacgtttttgaaatagtggaggaagaagatttacaactgtggtgtttcttcttcctcatatatgcataatttgtagtacgtacgattccaaaaagattgaatttatcctaaattaatattgtatgacgatgaaattgcaagaagattgcgatctttgtttttattagttcttcattggttgataattcgaagaaaaagaagaattatggagttttgtttgataattatataatttcttgaagaatgaacctcgtctaatattacgctgttttgtcattcatttttcacgtgtgttttgtcaccctagaaagtagttaacaaatctatcataatttataagttcataaatcgcaattaacaattggttttcttgatgttccaaatccaaatttatagaagccacgtgagccatgcggtcccaaatatccaaatacagacagattcgtatttcgaatcatctgacacgaatattcttcatggtgttgcaatgacgatacgtgtattcgttttcttcatggtttcaagaaattttgtaacaaatgctgaaagatgatgcaccaagtttctatcaaaaaaattggactgacttttatttttgacagccagcatttttctactgatctatatataatttaactagatatacatagattattttatattcgaatgtttacttttactttacatataattgaactcatactgtaaatatcaataacacttccatctaacttaagtgacttctaattttcaaaattaagaaaaatccaagcatgaaatttttcatgaaacgtgaaagtatagagaaaagagtaataatcaattaacttcagtgccgatagtatataaatttgggatagctgccgaaagcaaacaaatatatatagttgggtcggatcatttcagggatttccttatataataattactaagcccattatagcccatagttttatatacacacctcacattccacacaaacacatccgttgaacaaataatcggcccatttatggcccattatatacaccacacatgacattttcaacacaaacactttcaggtcggagaagccgtggaaatgacggcgagattctgtagattcgacttaacgaccgtatccacaaacatccttgtatcttcttccgtgttaccttgtggtatatcaacaatgtaagactccaataccacactatacactctcttcttcttatccttttccaagacgacgaactcgttgaccgatgtaaccgaccggtaattatttaaccggtgttctcctccaagaacacgaaaactcaagattcgtttctcttcgtcaagaacttcgagtatctcaacgcttgttgacgctggaagaccagagaccacgctaacttcccttatagtcccaactttaatctctttgatgccgttaccgttaactctgatggtgcaactcttgatgaagtgtttgtatttgtttggattggcgaagtcgcggacgaatctccatatggcatgtgccggtgcgtctacacggtgtgctatgagtgatgtgcacgtgtttggcgatcttgggaacgtgtggtgtgttcggatgatggagtctagtgttgagaactcgtcctttgttaatccgtatggtgttgacgatgatgttgttgttgttgatgatgatgatggatcatggattggagcaagattcatggttttgggtgtactttaattttgagaagaaaattgtgtacgaaactaggactaattctcttgacatacgtatatatatagatatataatgtgttatgactaatatttggagttgggctgcacgaaaatgcctttgtcatttggctttttagaaaattgggtgtacaagtgtgaacgtgacatcaaatctcattattgtatgactcattggatccttcagaagctacctatagatcaactttttggataaacaatacgaaaatgaagcatcaaaatggaatctaaactaaatttgttaaattgaatatgatatgcaagacgtagaagaaagatcaacgcccctattaagggtgtatatggtggaagaagagttgtttctgatttagactttcgtatgggcattggtttgtatgcaagttgcgtgtattacaaagaaaaaacaaatcaagattagtgtaactttgagttgagcccatgtccaatacactacacacaatatgtaaattttattttgttgactttagtccatactctaatcaacacgtgatgtgcacgtgataacgaagtagtgatgttgtcgtcaaatccgagccgtttacttttccggccatgggggcttgaatttgccggtacgatagcgatagcttcttaaaccaatttgatagtttttggtagcttgtccttttcaaatctgggcttgttaaggaacatcaagttaggaaattgattggtatacttcaacttcttcttgttgcagtctgtctctgatgtggtgattgtatccgtcaggtttctatgatacagtatgcaaacccggcattagttcaccggaaccgatgtctcccggtttaggagttgaattttgctaaaaccggctaaaaagtgcgcaatttggccaagcgtactattgcagaagagggacgatg

SEQ ID NO: 5953 - DNA, 3000 bp, Unknown
  misc_feature (1)..( 3000): cDNA_ID_3079088_gDNA_ID_1620834_Annot_ID_57935 3000 nt of promoter + ATG
gtcattcgattgggggatgaacctgataacatcgagaagacactaactgtagctctgctggatccaacaaagaatgatacttctaagaaaagcatcacaacatctgatccactggcttcaagcacttgggatgaggtgtgtataactctgctgcgatgtgtttcaacttcagttgattctcgatcttaacagatatgaactcattacttttataggttccatcatcaagaactttgatcacaccggtgcaatgtaaatctatatggagacagttcaagacagaaacagagtatacagtgactcaagccatatccgcacaggcatgattactttcctcataagttagctcttcactctgcttatatgaatacttatataaagtgtttatactaattcaggaggcgaacaggcgtggaaataactggttacctcctccatgggcaattcttgcattgatcgtccttggattcaacgaattcatgactcttttaaggtccatcaaagcttagtattcactgcttcatatccaatgatgatatgtaacattctgatttctttacctttttgatgtaacagaaaccctctctatcttggtgtcatgtttgtcgctttccttctggcaaaagcactgtggacgcaattggatatccctggcgaattccgcaatggtgcagtaagtgtttgccaaccttctcaaatcccattaaagtagtagtagcgtttcaagaatcatggactcgagaaaacttcaagactcaagaattcttgataataatactcatatgatctatactacctgtggtttcttcagcttccagggctcatatcgatatccgcaaagtttgttcccacagtaatgaaccttatcaagaaccttgcagcgcaaggcgaagaccctcctgcagctaatccagagaaccgtcgttcgagcaacaacacttcttcatcagaaaatccaccagatcacaaaagctcctcaaaagaggactaaagaggagagaaacaaagaatcttcttactctccaaaggtttgatctccagttcttgacgtttttttctccttattccctcactcatgagtccaaaacgctgcgtttatagggaccttttgctctgttttattagaacttctcattatacacacgagtgaattagaacttgaaaacgttgtggcatcatttgaatatttttccttcaaataaacaaaaaaaaaaagatgaagatgaaaaccaataataaatatatgtacgttctataataactcgtttcatgaaagtggaagcatgggatgagatgccaatcccatgaaaagtgagcaaaaattaatatttacattaactgctgagtgggtaaagtttaataaccattttctaaaaataacttttattcagaatccaactcatggattggtgtgtgtatttattatcatcatttctatacacatatccacccccaataactctgtcaattatacacctcaaaatcactgtaagttataaaaaaatgaatttctacaattaatcaaagaccgtccaaagccttcgtggctaattggtgttaaactattcacatttttagtcaagtatttttgcatattatatgagattaattttgccacacaagatcgttaataaactcgacatgatgattctgtttatgtggcttctattaactaggaaatgaaacaatgtagttatagttgtgactgatatgaagtcagagaaaatggctacgtaatcttatatgaccagaccaacgtacgtgatgcgatgtgacatttttcattcaacactaaagttaaaaccttgattgtttttgtattacatttggcaactaatccaatatgttttgttagttgttagtactaagtactgactgatgatcacattcacgctcaaccaaataaaacggatgatattgtttttggttaggtgaaagaacaattaaattagttgccaaaaacataacccgtgaagatttatgttagtaaccaacctacagtcataattaataagtttatgactaatagtaattaaatgacttgccaaaaacatggctctgtatagtatagtttttagattttggttaggtgaagatgattaattgatacactatgaatctatgaagacttgatccaacggctaccagatctccgacttcaactgttttcatatcgccattaatgatacagacaagctgtactactatcctttttatctctttattgttttatatgattttacagtaatactattactaagtactaacaaattgtttttctttgcagctggtcccaaaagtcaaaatcatgggacaaaaaaacgagttattattcttattatcatcaccaaggtaaaaaaatgtgaaaggaaatccttttaaggcttagtttcaatataaatacaaagatgttatttgatagtgattgttctttgtaacgaagtacttatcattaatttcaatttgcaacaaacaattctgtaacaataagtctaatgtgaggaaagttactagctggtaaaataaattagtaggtaactattttttatgagtaaatgagggaactattaattgagtaagatgattcatatgtccttttcatttgctatattcgacagaatgggacacacctaaaatcaaatttacgttttagtgtagaccaccccaacatctctttattacacaacttgtgtttttttttactatatgatttttttaccgaatgttgttgtctaaccaaaattcaatgtaccgtataagactataagttatacaactcgtagaaatggttacatatatgtaacaatatatagagacacatgtgggtgtaattaatatagttgctctgttggatcgttagtgttatttataggagaagaaaacacacaaaacaagaccattcatcaaaagccacataagaagttgatgcagaagcaataataacaaaacaaaaaaacattaaaaaaaaaagctcttcagttttggtttctgcagtctcca

SEQ ID NO: 5954 - DNA, 3000 bp, Unknown
  misc_feature (1)..( 3000): cDNA_ID_1989691_gDNA_ID_1620834_Annot_ID_57934 3000 nt of promoter + ATG
aaggaaattgtgaaaaaaagaagttaatttggttttgaaatatgaatgtttttgttttttttttggagtattttgtttgtaattttgaatagactaactaatacaatatacaatttttcttttaaagttttgggtttgatgtttccatatgcacaacaaacttatacctaactaaagttcatagctcaaagttggaatctaaaatgactaacaacaagataaaacagagaaagggaagcttttgaagaggaagatcccaaaaacgtgaaagctgtcttcttctgctttctctcactgacactgtagaatttttctgtctgagaaagacaaaagaatgggtacaatttctctatctgtctgccagtatccttcgtccgatttatgctttttgataccttgtttgcttctttctcaggcttttacgtctcatggacccgttttcatgactttttttatgggaacaacaaagtgggctaaagcctatagatggtaactgaaattaaacaaagaaaaacaaaacaatcagaaaaggcccagcccaaatagggagaaggaggcccaaacagaaaagaaaaacggagcacaaaatggttttaccggcggcaagaaaaccggcaaagtctctcggccggaagcctaatctaaaatattgcactgcattgtgtcatttcattgagttgactttgatattttcttggttacaagctgacaaaaataacaaataagaaaatgcgaggaaatttaacctgtctctgaagcatgaagaaggagtctctgtaaaatcctcccacacggttacacgtccacggctattaatcccacttattccatttctctttagaatcaatgaaatgtcagattcttcaaacaccctcccaaagtttgatgtttttctgagcttcagaggactcgacactcgccgcagcttcatcagtttcctctacaaagaactgattcgaagaaacattcgaacctttaaagacgataaggagttgaagaatggccggaggattacgccggagctaatacgcgccattgaagggtcgagattcgcagtcgttgtggtctccgtgaattacgctgcgtctcgttggtgtctcgaagagctcgtgaagattatggatttcgaaaacatgggctcgctcaaggtcatgcctatcttctacggcgtggatccgtgtcatgtgaggagacagatcggagaagtcgctgaacagtttaagaagcatgagggtagagaagatcatgagaaagtgctttcatggaggcaagcgttgactaatttggcgagtatctccggcgattgttcatggaaatggtaaaaatttcctaactttgataataaaggtcgaatttttattgttaatttgagtgaatggattgtaaagtttcgatttttactttgcagggaagatgactcgaagatggtcgaagaaattactgacaggatatcaaaagagctgatgattgatacaacaagaagcaatgggagtgaccttgaagggattgatgcacacatgaaagctcttcaccgtttattgaatttaaattctaagaaaagtgtgagagtgattgggatttgggcaagaggaggcaatggtagatcagctttagctaaatttgtttatcagaacatctgtcaacacttcgaaagccattgtttcttggaaagtgtgaaaaggatttctcaggatcgccacctgtctcacttacacgaagagtttatgatacggattcaaggagaatgcttgagtaaattaaggctcaagaaccaaaaggttctgctcgtggctgatgatgtgaataagcttgaacagttagatgctcttgcagaggactttaactgctttggtcctgggagtatagttattatcactacacaagacaggcagctgcttatctctgctggcataaaacttgtttatgaagtagagcttctcagattccagaaagttcgtggactcttcagacaattagccttcaaagagaaagacatttctgctgcgttcgaggtgtctttgtatagggcaacgaatgttgccatggaatggttaggttgtatatgtggtagatcaggttaggggaaagtgttagtgttagaatcactttataaagctgatcccttttttcatgtacattaagttaagaatgactaaacttagtaagatgtgattgtggcttagaagtaggaatgttttgtctatttttggagtgtgttgctggtgtatagaagaatattattctttgattggattaaatgatatacaaattctatttcaagtttgtgttttgatatttccatgtgcccaacaaatttgtagaggagatctaaatttcctaacttgcattccttgcttttgccttttccaaggaaaaagaataataactcaaagttggaacctaaaatgactgacatggaaaaacagagaaagggaagcttttgaagagtgagatcctaaaagcgtgaaagctctgatcttctttttctcactttcactttgagaattttctgtctgagaaagacaaagaatgggtactattttctctccctgtgtggctttttccttttatcagatttatggcatttgattgattcctgatagttggttggttctttgttgtttcgctagcaatgtagatccatatatacgagtacctttttctctgctttcttcagaaagaatgtcattgttattggtttcagaaagtaatgcctctgcatgcgtaaacaatactaagaccaagtcgtttctctcgtttcatttcaaaattgtttgctttggttgttgaataaaatatctcaattaggagacagtgattgtgtttaaagggcttctgtgacgagctacataatccatattagatgcagataaaagcgagggatgttgttctgtacagctcatcgacggagatggtatatacaatgtctctcgcatcgatcatttcattaaagatgtgaaacttgcagactgtggcctttcttatgctgttgtctctatt

SEQ ID NO: 5955 - DNA, 3000 bp, Unknown
  misc_feature (1)..( 3000): cDNA_ID_1989677_gDNA_ID_1620834_Annot_ID_169813 3000 nt of promoter + ATG
taggatttttcaaaaagaagaaaaagagacttaacaatcttttccaaggaagtctccaatgaatacatcatcgatcatgccgcttcgtgccccaacggctatgttaacattatccgattccgcgccaagcctatagagataatccttcccttctgaatctttaacttcccatgacgattgctccgacaacttcttccgcggctttgcgccaccatcgtcattagccactttgccgccgtcattagaggagggtttcgagcaaacgattgaagagagttttctggtattgattaaagtagcattgaacgaggaagaagaagaagaagaagattgtaaaggtggaaacttgaaacgcagagatatgtttgcaagcgccattaacccaccaaatcacttcacaattaaagcttctacctttttccctcaatttaataaaaaaagatttatacttttctcccaaagataggattttgaagaagaagagccatttgttctcgtctgatagtggctaattctgtggttcttgaagtcaaaagatagttttggccccacttgttactacttgcatgtttgtatctgtctgaaactatagcaattccaatttgtaagaatggatataagttttttgtttggtggattttggatcaaagctttagttagtcattagaaggtacattatgaataaggcagcagttaatctacatgcattggtagtttggtacgtaactcattttgtaatcatcattaattattcattatcattggttatatgacaatatatttccacttaattacacatatattttatggtttcccattagaacaatagacaataatatagagacttcgagtcttcgacgagatcgagatgagaagagagtcactcgagactaatggatcaagagaaccaattaacgagctcgtccgcgtggctgccagctggaggaggaggcacatcttgcatcactttctcttgtccctttggatagtatattcccgtaccttcatgtggcacccaactactcgccggcgacgacgtttctccggcgccgtagaagcctctcatcgtcttcacctcctctccggagctagagccctcagtcttcaccgtatccctcactatatcatgcgaggcactcttcttgtgaattgatttcctaagcatcggcctatatatatgcaaattgcatgtgttaatgatatataacatgatacataattaaacgatcataacaaccaaaagtgtatgatctaagaatcaatatgaatagagagaaaattagcatggtttatgcgtaaagattgacatgcacgaaacaaataatgcatatgctcaacactaaatttaaggtaaacttacttgacgaacatggtgttcatggtttgtgccccacgagaagagaaggtagaagtcgccatgtaaatctctatggtctattgattacaatgtgtatgaagaatctgatgtaggtaaatatatttatattatgtgtttgttgagagagttgcatatatatacatgagacatcataaaatgtgaatggaatttcaacaaaattaaaataagataaagaatttgggatggaaagaatgatggagagggatcatccagatgcacactccccgaggtagatttatcgtcagacccatgcctcttttgtgccattcccctccacgtggcataatccacgtcttcttattttggatcattcttcttcaaaacgtatgcgtacacatgatcatgttttggtcacttgtggcgtgcatgattcatgacccattcggactactttatttctattgggcctactaaattttataagcccgttaactttagataggtagcccaataaaagcccggaatctatatgtaactttgggctggtattggattctagtttaaaaagaattttgatgatttaaaatcatataaagtaaataaatgaagagaaattggtagagagtattatataattttgttaattagtttttttcgtaattttgtaaagtttcacgaataatttctctattttgacgatatttttatgacgaaaatgtataaaattataaattaataatataataatttagtttattaataataaaaaaaattatgttgttttagttgaataacccaaagttttttttttcaacaactttatcaaattctaaatccaataacctagagttataaagattttttacaaatcacaaactaataacaccaaactcttaattaacttttattattgaataacaatagattctagtaacatttaaagtcattaaatcactatttaaatcacaaaccaataacactacttttttctttttttctttttttaattctctaaattgaatttttattatggatctggttgtaatcctaaattagaatccttttctcaaaaaataaaaaataaaaaaataaaaaaaaatcttaaataagctctttagtatttatttattgttgtatgatgattatgttgaggcctttttctcgtttcttcctctgttgtactttccttcttactttctcaggtaaattcttctctctttccttgtttttctcatctatgtttactttgaatttcagggtttatctccttttgattactttctctgtttttcatctcaaagtctcgtttttttatgtaattcgatgcgtctatgagtttctctttttcagcgatcttcgtgctcgggtcacaaatttgagatagctgtatagtacagtttttctaaattattcatcttttccgattaagcatctgagtttcgataaaatctagacctagtgattagtgatgatggcaaaattttcaggatttttgagctgtttcttagtgaggacctgtttttgttgtttgaaactttcatcttcttattgcgatcaagtttggaataacatgatatttttcaactctttattattctgatgatattgcctaaccaaagtttatatttttgctgcataattttcgtatagcgtgagccatc

SEQ ID NO: 5956 - DNA, 3000 bp, Unknown
  misc_feature (1)..( 3000): cDNA_ID_2175085_gDNA_ID_1620834_Annot_ID_169811 3000 nt of promoter + ATG
ctacactatcctcgcctgaaaaaacccaagagtttccagcagaagatttctgagaggttaaactgttactgatccaagactcatcatccgtaattattggtttttcatcaccaagagtagtgtctgatgtcagattagcatcacaatgctcttcgagcaatggagacttagagagtatttcttcttcagaaaatttctgaggggttaaagtgttagtgattagagactcatcatcggtaactattggtccttcaccaccaagagtactggttgatgtcagattagcatcacaatgctcttcgagcaatggagacttagagagtatttcttcgtcagacaaggaggattcaactctaacttcttgtacactttcctcgcctggaaagacagaagagttttcagcagaaaatttctgaggtgttaaagtgttagtgatctgagactcatcatcggtaactattggttcttcaccaccaagagtactggttgacgtcagattagcatcacaaagctcttcaagcaacggagatgtggagagtgtttcttcaccatccaaggaggaggctgatgaattctctccgtgagctatattctccactaaaatgtcaccttgaactcgttcctcaacccgaacatgtcctaaaatgtcaaagttctgacatggcggtgaatcagaaggactattacaacttggtgaattagaaagacttttagtgatatgcgactctttatcagtaactattggttcttcatcaccaacactagcggctgatgtcagattagcatcatgatactcttcaagcaatggggatgtagagagtctttctccatcaggaaatatctgagactcttcatcagaaactaattgttcttcatcactaagagtagtggttgatgtcatataagcatcacagtactcttcatgcagtggagatgtagattctatttctccatcagacgaagaggaagctgatgaattatcctcaaaactatctctttgaactacattctctttcaaaatatcgccttgaactcgtttctcaaccaaaacatgtcctggaatgtcaaagttctgatgtgacggtggatcagaaggactttcacttcgcggtgaagcaacacgatcatgacgtccttgtacattagaagaatggtcctctgcaacttcctttgattcacctctaacatattcgaatctcggaggttcacttgatttcaaacaaagcgtgctctgtgccaacataagaaaaccatcactcattctctctattctttagacattattagctaaaattgataatgacaatcaaacaatggactaacctgagaagtgaaagagtcaacctcaacaagcaaattttccaacttgttgtagattttactaaaccatgctcgtcctttagattctggtcccatgatggctcacgctatacgaaaattatgcagcaaaaatataaactttggttaggcaatatcatcagaataataaagagttgaaaaatatcatgttattccaaacttgatcgcaataagaagatgaaagtttcaaacaacaaaaacaggtcctcactaagaaacagctcaaaaatcctgaaaattttgccatcatcactaatcactaggtctagattttatcgaaactcagatgcttaatcggaaaagatgaataatttagaaaaactgtactatacagctatctcaaatttgtgacccgagcacgaagatcgctgaaaaagagaaactcatagacgcatcgaattacataaaaaaacgagactttgagatgaaaaacagagaaagtaatcaaaaggagataaaccctgaaattcaaagtaaacatagatgagaaaaacaaggaaagagagaagaatttacctgagaaagtaagaaggaaagtacaacagaggaagaaacgagaaaaaggcctcaacataatcatcatacaacaataaataaatactaaagagcttatttaagatttttttttatttttttattttttattttttgagaaaaggattctaatttaggattacaaccagatccataataaaaattcaatttagagaattaaaaaaagaaaaaaagaaaaaagtagtgttattggtttgtgatttaaatagtgatttaatgactttaaatgttactagaatctattgttattcaataataaaagttaattaagagtttggtgttattagtttgtgatttgtaaaaaatctttataactctaggttattggatttagaatttgataaagttgttgaaaaaaaaaactttgggttattcaactaaaacaacataattttttttattattaataaactaaattattatattattaatttataattttatacattttcgtcataaaaatatcgtcaaaatagagaaattattcgtgaaactttacaaaattacgaaaaaaactaattaacaaaattatataatactctctaccaatttctcttcatttatttactttatatgattttaaatcatcaaaattctttttaaactagaatccaataccagcccaaagttacatatagattccgggcttttattgggctacctatctaaagttaacgggcttataaaatttagtaggcccaatagaaataaagtagtccgaatgggtcatgaatcatgcacgccacaagtgaccaaaacatgatcatgtgtacgcatacgttttgaagaagaatgatccaaaataagaagacgtggattatgccacgtggaggggaatggcacaaaagaggcatgggtctgacgataaatctacctcggggagtgtgcatctggatgatccctctccatcattctttccatcccaaattctttatcttattttaattttgttgaaattccattcacattttatgatgtctcatgtatatatatgcaactctctcaacaaacacataatataaatatatttacctacatcagattcttcatacacattgtaatcaatagaccatagagatttacatg

SEQ ID NO: 5957 - DNA, 3000 bp, Unknown
  misc_feature (1)..( 3000): cDNA_ID_2175081_gDNA_ID_1620834_Annot_ID_169810 3000 nt of promoter + ATG
caaccaaaacatgtcctggaatgtcaaagttctgatgtgacggtggatcagaaggactttcacttcgcggtgaagcaacacgatcatgacgtccttgtacattagaagaatggtcctctgcaacttcctttgattcacctctaacatattcgaatctcggaggttcacttgatttcaaacaaagcgtgctctgtgccaacataagaaaaccatcactcattctctctattctttagacattattagctaaaattgataatgacaatcaaacaatggactaacctgagaagtgaaagagtcaacctcaacaagcaaattttccaacttgttgtagattttactaaaccatgctcgtcctttagattctggtcccatgatggctcacgctatacgaaaattatgcagcaaaaatataaactttggttaggcaatatcatcagaataataaagagttgaaaaatatcatgttattccaaacttgatcgcaataagaagatgaaagtttcaaacaacaaaaacaggtcctcactaagaaacagctcaaaaatcctgaaaattttgccatcatcactaatcactaggtctagattttatcgaaactcagatgcttaatcggaaaagatgaataatttagaaaaactgtactatacagctatctcaaatttgtgacccgagcacgaagatcgctgaaaaagagaaactcatagacgcatcgaattacataaaaaaacgagactttgagatgaaaaacagagaaagtaatcaaaaggagataaaccctgaaattcaaagtaaacatagatgagaaaaacaaggaaagagagaagaatttacctgagaaagtaagaaggaaagtacaacagaggaagaaacgagaaaaaggcctcaacataatcatcatacaacaataaataaatactaaagagcttatttaagatttttttttatttttttattttttattttttgagaaaaggattctaatttaggattacaaccagatccataataaaaattcaatttagagaattaaaaaaagaaaaaaagaaaaaagtagtgttattggtttgtgatttaaatagtgatttaatgactttaaatgttactagaatctattgttattcaataataaaagttaattaagagtttggtgttattagtttgtgatttgtaaaaaatctttataactctaggttattggatttagaatttgataaagttgttgaaaaaaaaaactttgggttattcaactaaaacaacataattttttttattattaataaactaaattattatattattaatttataattttatacattttcgtcataaaaatatcgtcaaaatagagaaattattcgtgaaactttacaaaattacgaaaaaaactaattaacaaaattatataatactctctaccaatttctcttcatttatttactttatatgattttaaatcatcaaaattctttttaaactagaatccaataccagcccaaagttacatatagattccgggcttttattgggctacctatctaaagttaacgggcttataaaatttagtaggcccaatagaaataaagtagtccgaatgggtcatgaatcatgcacgccacaagtgaccaaaacatgatcatgtgtacgcatacgttttgaagaagaatgatccaaaataagaagacgtggattatgccacgtggaggggaatggcacaaaagaggcatgggtctgacgataaatctacctcggggagtgtgcatctggatgatccctctccatcattctttccatcccaaattctttatcttattttaattttgttgaaattccattcacattttatgatgtctcatgtatatatatgcaactctctcaacaaacacataatataaatatatttacctacatcagattcttcatacacattgtaatcaatagaccatagagatttacatggcgacttctaccttctcttctcgtggggcacaaaccatgaacaccatgttcgtcaagtaagtttaccttaaatttagtgttgagcatatgcattatttgtttcgtgcatgtcaatctttacgcataaaccatgctaattttctctctattcatattgattcttagatcatacacttttggttgttatgatcgtttaattatgtatcatgttatatatcattaacacatgcaatttgcatatatataggccgatgcttaggaaatcaattcacaagaagagtgcctcgcatgatatagtgagggatacggtgaagactgagggctctagctccggagaggaggtgaagacgatgagaggcttctacggcgccggagaaacgtcgtcgccggcgagtagttgggtgccacatgaaggtacgggaatatactatccaaagggacaagagaaagtgatgcaagatgtgcctcctcctccagctggcagccacgcggacgagctcgttaattggttctcttgatccattagtctcgagtgactctcttctcatctcgatctcgtcgaagactcgaagtctctatattattgtctattgttctaatgggaaaccataaaatatatgtgtaattaagtggaaatatattgtcatataaccaatgataatgaataattaatgatgattacaaaatgagttacgtaccaaactaccaatgcatgtagattaactgctgccttattcataatgtaccttctaatgactaactaaagctttgatccaaaatccaccaaacaaaaaacttatatccattcttacaaattggaattgctatagtttcagacagatacaaacatgcaagtagtaacaagtggggccaaaactatcttttgacttcaagaaccacagaattagccactatcagacgagaacaaatggctcttcttcttcaaaatcctatctttgggagaaaagtataaatctttttttattaaattgagggaaaaaggtagaagctttaattgtgaagtgatttggtgggttaatg

SEQ ID NO: 5958 - DNA, 3000 bp, Unknown
  misc_feature (1)..( 3000): cDNA_ID_3079064_gDNA_ID_1620834_Annot_ID_169809 3000 nt of promoter + ATG
gtaacaacagtctacaagggccggttcgtttcggatcacctaattgcaagaatttgttgactttagatttgtcatacaatgaattcgaaggcggtgttccacctgcattgggaaattgcagtagccttgacgctttagtcattgtgagtggtaacttgtcaggtacaatcccttcctcattgggtatgttgaagaatctcacaattcttaacctttccgagaatcgtctctctgggagtatccccgcagagctcgggaactgcagtagcttgaacttgttgaagctgaacgataaccagcttgtaggcggaataccgagtgcattaggtaagctgaggaagctagaaagtctggagcttttcgaaaaccggttttcgggtgagattcctattgagatatggaagagtcagagtcttacgcagttgctagtttatcaaaacaatctcactggtgaactacctgtggaaatgactgagatgaagaagctaaagatcgctacgctgttcaacaacagcttttatggagcgataccaccgggtttaggtgtgaacagcagcttagaagaggttgactttattggtaacaaacttacaggagagataccgccaaatctatgccatggaaggaagttgagaatactcaacttgggttctaatctgcttcatggtacaataccagcttctattggtcactgtaagaccatcaggagattcatccttagagaaaataacctttcaggtcttcttcctgagttttctcaggatcatagtctttcttttcttgatttcaatagcaacaacttcgaaggaccaatcccgggcagcctcggaagctgtaagaatctctcgagtattaacctatctcgaaacagattcacggggcagatacctccacaacttgggaatctacaaaaccttggttacatgaatctttctcgtaatcttcttgaagggtctctaccagctcagctatctaactgtgtgagtttagagcgttttgatgttggcttcaactcattaaacggttcagttccttcaaactttagtaactggaaaggcttgacgactttagttctcagcgagaaccggttttcaggaggtattccacagttcttgcctgagcttaagaagctgtcaactctgcagattgctagaaatgcttttggtggtgagattccttcgtcgattgggttgatagaggatctgatctatgacttggaccttagtggaaacggattgacaggtgaaattccagccaagttgggagatctcatcaagttaacaagactcaacatatctaacaacaatttgacaggatctttatcggttctcaaaggtcttacctcattgctacatgttgatgtctccaacaatcagttcacaggtccaataccagataacttggagggtcagttgttatctgagccgtcgtcgttttcaggaaatccaaacctctgcattccacattccttctctgctagcaacaatagccgcagcgcgttaaagtactgtaaagatcaatctaaaagcaggaagagtggccttagcacctggcaaatcgtgctaatagcggtcttatcgtctttattagtcttggttgtggtccttgctcttgttttcatttgcctacgtcgtcgcaaaggaagaccagagaaagatgcttatgtcttcactcaggaggaaggcccatctttgttgttgaacaaagttcttgcagcaactgacaatctaaatgaaaagtacaccattggaagaggagctcatggaattgtgtacagagcttctttaggctccggaaaggtctacgctgtgaagagacttgtattcgcgtctcacatccgcgctaaccagagtatgatgagggagattgatacaatcggtaaagtcaggcacaggaatctgattaagttagaagggttttggctgaggaaagacgacggtttaatgctgtatagatacatgccaaaaggaagtctttacgacgttctccacggtgttagcccgaaagaaaatgtgctagactggtctgcacggtacaatgtagcacttggtgtcgctcatggactagcctatctacactatgactgccatcccccgattgttcaccgtgacatcaaaccagagaacatactcatggactcagatttggagcctcacattggggatttcggtttggctcgccttcttgatgactcaacggtttcaactgcaactgttacaggcaccaccggctacattgcaccaggtaatgcatcttctcattatacatagtggacttggtataatctggtttagtgttcaaaccgagttagttaccggttaaaaaagtctgttaggaagatactctgtttcttattagctaatttcacaattaaactgcagaaaacgctttcaaaaccgtgaggggaagagaatcagacgtttacagttatggagtcgtgttacttgagctggttacgaggaagagagcggtggacaaatctttcccggaaagtacagatatagtaagctgggtgagatctgccttgagcagcagcaacaacaatgtggaggatatggtaacaacaatcgtcgatccgattctcgtggacgagcttctggattcgagtcttagggagcaggtgatgcaagtgacggaactggcactgagttgtacacagcaagatccggcaatgagaccaacgatgagagatgcggtgaaactgttggaagatgtgaaacatctggcaagaagctgctcctctgattcagttcggtaatctcgttactttgtgcagagcagaaggaggaaactaaaggactgttatcagtggtaacgtaactgggcttaccggtaatgtaactgggccaataatgtaaaatatggcttattgaaggcccaaatatgacggccctttaattgtaaccgtgtttgtttgtgaaataaaatctcgtttatcaaatttctgtttcctattttatttttaaaaaaagtgttgggaaaattttcgtttggccggag

SEQ ID NO: 5959 - DNA, 3000 bp, Unknown
  misc_feature (1)..( 3000): cDNA_ID_3079072_gDNA_ID_1620834_Annot_ID_169806 3000 nt of promoter + ATG
aaggtattggattccaggacagcaatgtaagaggacgatagatatgtgtttaattgtcttatctttctttacataaagaactaggagattccagaaaacttcaagaagaaacatttacgtggaacaaattccaaaagtgttcatcatagtgccaaaaagaagatgagaggaatattatattacctcctgttttcacattatcaatatttaagtttgctctagtatgtactatgctatatgaacatgtcctctgctttctgacacaggaaggtttgaaatttgccataatggttactctgaaagtaagatcaggccatttatcattatatctcaatcctgtttttttacatgaactatagacgaactcctgtactccgttattacatgaattaaccgaggagtccaatgatagaaagaaaaaatgaacaaactaactgtagaaccatctgatagagagctacaggtgaacgtataacagaaaaagaatcagcaaactaatccagaaaatgcgaaagagcccatcttgcggaaatcatttctatctcatcctctctctcagcatcttcagccccatgtacctgcaattaaagccaatgaaatttgtttttaagtctggtcaaaaaggactgatacagtttcgaagagtatacactttgatggtttcttcttaccttccaagcatcatcaaggtagcctgaggattagtccctggagagatattgaaggttgatccatccacgagtctaagagaattaacaccaatgactttgagatcagagtccactacttttcctacaacagcgcctccatggtagtgccagattgtgctcacagttcgtctgcagaaatctgccatcacaagatcatttgattggtccacaggcaatggagctccaacaaacctgaacctacggttcccaaaccattcccttatcataaagtcctgcatagctcggctcctgagtatttctccaatcttcctagtcccattgacacatctctctagatcctgtggatcactgaagtagttgaatctaacaactgggttaatcctcacatccgttgacgccaaccttagtaaaccaatagacactggacctaggatcttttccattatagttgtcacagggacgtacaaaggagaagctggagctctgatgaacacagaatgtaaaggcgatgcaaacggaatcacattcgaagcagcctccagaaaagccccatcctcagtaacacccacgacttgtatcagtgagttctccattggaaccggaggaacaatggagataccattcctcgggttatcatacacaaaatcccccacatgaggctggtcaagagccacagggatcccccaagttgaaagataactccttggaccaatcccactaagaaaaagcaactgtgggctaccgagtgcaccagcagacagtatcacctctcctctgtcccgtatcaatgcgtgatggaaacgtcccagctgatcacggtaaaccactccaatcgcagaaacgttggaacctgagacactaggagatgaagcaagcaatactctctctacagttgcgtaaactgcaactctaatgttggaactccttgcatatctgagaagatctgcagagctgtgtctcctcccagtacgatcaaacgtggaacctccgatcttagtccccactttatgctccaaggtgaagccattaaacggatggacaccaacttcaagcaacgcatccctaattgcagtttgccaagtcctgagctgaggtctaaacacaatcgctctctcaacccactcataagactgattcacactactcagatcccaaacaagacccgaattctcaaagaactgtttatcagcacggctatagaatccagcattgatcgcactacttcctccaagaacacgacctctcgcgttaggaactccttcctcagagatgaaagactgagccggcgagtcgaaattgttgacgtcagtgagagtggtcaagaaaccgtcgtgtgacatcacgttaggtctgttgtagggaacgccaccgcgttctagcagaagaactcggaaagattgcgaaagtgtggcggctagtggacatcccgccgttcctcctccgacgattatgtaatcgtagtaatcctccgacgcaaaatcagttgcgttcgatatgaatcgcatgaaaccgggagctgcaacgaaggttccaacagtaagaaacaacaatgaaagagaagaatctcaaaatcaaattagggataagctaaacatcgatcatcgttttcttgctattactcaaaagcgatacaaggaaatcaaagaaacctcatcaaaaacttcttcgtcgccaaagattatgatgtttcaagcattaacatgagattctacagaaattttctcggaaacttacgtcgattaacgcgtggccttgcattagagcgatgaactactccaagaagaagaagcactacgagcgccgtgtagagaagagaagaatcaatccgtttcgtcattctcgttcttctgttgaagattttctcggagctgatagaaaattaaattttctcgggaaagtgagaagtttctcagttagagagagaaacagagtaaaagtagttaaaaaagaagactcaaattaaatggcgcttggattctgttatagagagagtttctcagctctggaactctgatataaaagtaatcacagccgtcgatgaggtttagaccaagttgagatcagcggttgtcaagagaagtagtcctgagctctaccgcagtggataatagcatgcaatatatttgacgccgttagcaaccgtctctggaccctttaacgtcgtcgtcttgttgtaaaagtaccgatttgataactgccaatcaaattccggttcaatccggttaagggaagataacaggatttagccacgtgtcatgaggttgtgcagattagactgtagccagtgttatcactaccgtctaaacacagagagagagagagagcaaaa

SEQ ID NO: 5960 - DNA, 3000 bp, Unknown; identical to SEQ ID NO: 5948
  misc_feature (1)..( 3000): cDNA_ID_3079076_gDNA_ID_1620834_Annot_ID_169805 3000 nt of promoter + ATG

SEQ ID NO: 5961 - DNA, 3000 bp, Unknown
  misc_feature (1)..( 3000): cDNA_ID_2109538_gDNA_ID_1620834_Annot_ID_169802 3000 nt of promoter + ATG
ttatttgtgaattgtgatgctataatttagataatagagatcgctatacttaatataaaaaatatataatttatcatatagagcatttctcaataatgtcatgcacgttgtatgttttgtttttcaaaattaccatcacaatttaaaaaacaatataaacttttaaatttagaagggataattttaaaaagtgtaggaaaataaccacttactaaattttaatatccattagatctttaggattatatgatactgaaaagaatcagcacaataatatttagaaacaccaccagttaatttttttttggcaaaactaataatttattttctaaaagtcaaattagtggagacagtaagcaacagggaaaaaacataaaagagacgtaaatcatcaaaaggtttttgaaaaaaataaaatagagaaaattggagcagcaaaataaaatggtgcaataacatttcatagacgacgattgatttagttgattttcgccgcgtcatgtattaaagacacagcgtcgtggcctatgcatgcagtcactcaaaggtgtataatagaaagatcatttagaatttcctttagagaaagtatatactatagaaagatctagaatacatgttaaggttaattacatatttatagtgtttcataatctagatgaatacaaatctctataatatcaataacatatatttaccatatcttcaatatcttctagatccttctatgtatacgagtacacaattttcaatacatataaatatatgaatgtgattagtgtttattattgttctacgttgttatccatcctaaaccgatcgaattactaatttaacttctaatgttgtcgtaatgatataaacttaagtatattaatacagttcaaatttcaaatatatgtatgtttacgcgtgatatacttaatagaaattcgcgtgatttcagatttgctaagcacacacttcaaaatgtcgtatacgttagatgtttaactattacagtattaattcccaattattattagatcctagaatattggatcgttttcgacaaaaaaaaaaaaaaatgaagaatattggaccgcacgatacttgggaacttggcatgcagctttagtaagtgcgattaggattttaatgggacatagatggcgtggcatgtcacaaatagaaaaggacgaatttactttttaaaactgtttcacaatcacaaatcagcgagtgtcgcttttgcatacgaaccgcatataaaataatcgtgtactaaaatgagaatttctatcaaactttggattcttcattttttgtgctaatataatcaacggacacaaggaatatcacgagcttatattctaatgacgattctcggatcatgtcagtgttgttaggctaccgaataagtgtatgtgtcaaactataatttgtaaaacatgttgtagtgtttggaataacatttaactttcagaaatcgatgaatcatcatatgatacgtgagaagaaagtatggaaaaaaaaaaaagtgtggctagacatgagacccttccataaaactcataattctaaacagtttacgaaaatagcttgtaatttggtcataacacaacacttgatttaacgtgaataatatatgacgaaatagaagggaatgtttgctcaataaataaaaatgcatggttatcaatgttcaaagcaaatgcgaatatcacgtttgctaagtttcgaaagctgacgcgtcatgtatatcacatactattgttattatgattacaaggcaacgtgtttcttatagatctttatttggtggcagcttatggttttgccattgctctagtgtcacggatccaactttatctatttattgacaactgtttttctctacaacatttgttgattattgacacgcacctatttgtttttcttattttacattaattgtttttttcttaactcaccatagctattcgaagtgctcattaagtattcaaatacgttacaaaagctttttgctcttaatcaaaatttgtgtaaatgaaattagtcaaatttttagagctaaatatatataattcagtcttaaaccgtggaccgtctgtcagttttttttggtaaaatatgatcttctggttttcttatagtacaattaattggaaaaatgagtgttgaaatcaaatggatgaaagtaaacaatgaaagcctgtagccaccgaaaaaggctgctacttaattaggatattcttcttattattgttaatctctgtccctcacgattccttgcaagtgccttcctatcaagttccaataatcatatcacataaaataaagaaatctcaaaatagcataatgttataagagttcatttttgccaaagaattaactacaatgttaagattttaaaagaaaaccaacaaaaactatgtatatatacaataacaatcaattttaaaaaagtttctagaatatatattactaaaactataactatattggtttgaattatctaaaattccattctcttttaaatcgtagatcaaatttttatctgatatagtactgctttttagttattttctttgatatttatttatttgaagtaaggatatatttgggtaacggaatattcttctcttattcccgcgttacctcctcctcatcttttttattaaacccaccaggaaacttctaaaaaggcaagaaatcaccccagagccctcacaaccgttggatctctctacaagactcaagtttgacccgtaaacgtcatcaaatccaacggttctcagaataaaatcaaaagtattctaatttgttcttcttttttttgttaccttgaaggtaatattccattggcatctccgataaaatcccccattgtttctctccattcattagtataaatacctaaccacatttctattctcctcaattcacaaaccaacaagaactcaaagagagatccatcaattagaatcactaatttctttagaaatttcctgagtcatg

SEQ ID NO: 5962 - DNA, 3000 bp, Unknown; identical to SEQ ID NO: 5952
  misc_feature (1)..( 3000): cDNA_ID_3079084_gDNA_ID_1620834_Annot_ID_169800 3000 nt of promoter + ATG

SEQ ID NO: 5963 - DNA, 3000 bp, Unknown; identical to SEQ ID NO: 5953
  misc_feature (1)..( 3000): cDNA_ID_3079088_gDNA_ID_1620834_Annot_ID_169798 3000 nt of promoter + ATG

SEQ ID NO: 5964 - DNA, 3000 bp, Unknown; identical to SEQ ID NO: 5945
  misc_feature (1)..( 3000): cDNA_ID_1989733_gDNA_ID_1620834_Annot_ID_169794 3000 nt of promoter + ATG

SEQ ID NO: 5965 - DNA, 3000 bp, Unknown; identical to SEQ ID NO: 5946
  misc_feature (1)..( 3000): cDNA_ID_1988891_gDNA_ID_1620834_Annot_ID_169792 3000 nt of promoter + ATG

SEQ ID NO: 5966 - DNA, 3000 bp, Unknown; identical to SEQ ID NO: 5944
  misc_feature (1)..( 3000): cDNA_ID_2990797_gDNA_ID_1620834_Annot_ID_169790 3000 nt of promoter + ATG

SEQ ID NO: 5967 - DNA, 3000 bp, Unknown
  misc_feature (1)..( 3000): cDNA_ID_1988786_gDNA_ID_1620834_Annot_ID_169781 3000 nt of promoter + ATG
cgatctggttcgtgactttatgaacgaggaatattctcaagaggtaaggctctcttctctataatctgttccctttaaccccctcataagctatatttttaagttgtgacttgattgattctcattttgcacgtaggctccatttcgacttgtttgtataacgaaatactcaattgcttctaccaacaatatgcgaacctcatggagggaacctatgaggatcaaactacctaagattaaagctgcccccaagcttgtgggattctttgtccaaatcatggttgtttgcgaaaagcccttccatctacagtttccagcgttttcttataattgggactgtgaaggtagcaggttatatcggattaacctcaaaccaaatctctatcaatcatcagagatgatggaggacaacaataatagaccatataaatggcatcacctggtcattgtccaaatcccaactggcatcatcagcgcagaaattgatgaggtgcaattcgaatcccatatccaagttccggagccgggcgacgagataattttgtgtggagttgaacacgttgggttcgttttaaagtagctggtgcggagatcaattcttaagatgatgatggatctgcagatttctaaacacaaggatttgtaccaattttcgttttggaactaaataaattactacccatgtaacctcgtgtcggtttgcttttataatcggtttggtatttttcggtttaattgtgacttgattttatttttttccttttaagagaaccaattttttctttctgctttgtactcgatgtctgccctttttgctcaacaagctttaccagattgtattctggtatttcatcaggctagaaatggagaaagaaaagttggagctgccaaacccacaggagttgtgttctcactggaaatgttacattaaatatcattgcaaaacaactactaatacattgaatctcctttgattttggtccaaagaaaggtgaataacttttgattttggtgcatatgggatgatgacggactgatgagtacccaatatccagtgcccacgtgtcctaattcttatggatcaatcaagggcttaaaagcccataaacattaaacagagggaataaaggaatgctaaaaactaattaagaaaacatcaagtaacaattattatgttttggttgttacttgttacttccaaggataaaggagggattcctatgcttgacttgcactagagctttatttcattgcaaaaaaggttaggtacttgattaagaacccaacctaagttttagtattatacaatcctttttcccatctcattttacatgcttacactttcattaaactattatactcaaggaaactggttgcaggtctataacttgtaaattaaaactgttcgtgttatttattcccatgataaaattgtaagagcgtgtgaatcacgagcttaggagagcgtgtgaatcacgagcttaggagagcgtgtgacatcaatatggggaggggcggctaaagactaacgagtaaaggcataagggggaaattaaggactgttcagagttcagaaatgtttttagtctggaaacgacaatacactttggacaaaaagctaaataacattttaaaagcttcatacaaattaaaaatataatcaaacaaaagctaacgtggccaagatagctaattacttttttggaatcattattagagataatggaaattaagaaatcatacagccaaaacaaaccgtagttattatattcgtaacaaaagatgggggaaaagttaatataaaacaaaccttatactagtatatataatacatggctcataatacattactgctaaatgagcaaaaacaaataaaggtaaagttcttaacggctttgtagagataggaatcattaattttagagaaaaaaaaatcttgaattgtacgtttacctttccagaattacattatttgttggcttttaattgttaatcatttttgttgtgtttttcctccaaattataaaatttaaaaactgtgtcagggaatttaggaatctaatatagttggacgatttcgtattaataaagattttcaaaaaaagagtctgctctaatcgttatttgggggtaaattgattctataaggtagggttagccagagagccttattctgtgttttgggttaaagtgagaccaaataaattaagatatttaaaatgaataattaagagcacttaagacaataattaacccagaaggagaagctggtgtagtggtggttctcatggcgatgttggtttcccaggaaaggtaaaagagaggagacgaaccaaaacaaggaagaaagaagaagatcttacatacgaagatcactctctgattcactctgagagacaaactggtttactttggttctgtttgacaaaaggagacatgcaaaaataaatctctatcccttgtttttcttcttcgcttcatcgattactcaaagaggtttctttctctatctcttatctatttctttctgcatctgtagtctctttgttcgaaaaaaagatgtttaatttctgtcaaatttttctccttttttctttgttcgattattggtgtatctgtcttgtggcgtgcgattgatgtttactgattctgaaaaattcttgctaaaataattcatcttcaagtcaacgactttttgcccaaaagtgatgacgggaacaagaaatttttcttggtcggaaaattactaattttagccaatcgtagcgatctctgcaatcgtgttttggttacccaagatagtacgatcgaatcagttcgtttagagaattaaaaaattactcaaatttagaaacttccaacttctgtttctttctattctgggttttttcacccacttggattattagctttaaaaatctaatctttgagtcatttttgattgttatttaggttgttggttgtgagaataattagcttgttaaggaagacgttatgatg

SEQ ID NO: 5968 - DNA, 3000 bp, Unknown; identical to SEQ ID NO: 5943
  misc_feature (1)..( 3000): cDNA_ID_4265714_gDNA_ID_1620834_Annot_ID_169778 3000 nt of promoter + ATG

SEQ ID NO: 5969 - DNA, 3000 bp, Unknown
  misc_feature (1)..( 3000): cDNA_ID_1989675_gDNA_ID_1620834_Annot_ID_57953 3000 nt of promoter + ATG
ttaaactaacacctttctaaattgaaaccattgtcacataacacatggctaacttgaaattcttgctgtgcttgttcttgatctgcgtttccttatcgcgttcatcagcgtctcgaccgatgttcccaaacgcagacgggattaaacgagggcgtatgatgatagaagcagaggaagtgttgaaagcgagtatggagaagctaatggagagaggttttaatgagtccatgagactcagtcctggaggtcccgatcctcgccatcactaagtcttattctcgtagttttgaattcgaggatgtatattttgttcttgatcgagaaccggtttagaagaaaacatatcgatcctctttgtttgttttttttgccttgtttgttcgttcggtgtaaccaatatattgatgtatctgtttcgttacacatttatgatttgtgcatgctttacgtaccttatacattccactatatagtagtctagtagagaggaggactttgcatataaattgttatataacaagaaagggtaaagaaatatagtatgataagggaggattgaattaatttaatttatcctgttttttcagtctctaatggctcgtgtagaaaagtatatattatatatggactcttttgcctcatcgtccaccaatgaaatatcacataaagagagaacgatagtgattgaagtttttcaaaaagaaaaaaaaaacaggggaaaacagagagaattatactttttaagagcgaagcaacgtcttcaaatcttcaatttttcagagatcaaacccttgaaatgctgctctttacgaaactcattttccaaaatctctttttcatcactttcgttacaaattcacaaaaagttacaagtcgtgacaagcttgagcttaagtatgtgtatgaatagtgtgaccaaattgttttgcaagagatcaagtaacttgttacaaaagaaatgattcaacgtaacttacaaaactataccaatttaccaaatcagttatctgtggaaagagggtacctacagtacctctcatttttcatacacataaagaatctctcataagccgaagccatttgagtcgctgtaaacatcgaaagagcgtatcccttacaagctattcctttcatctccaaaaccctaggcccatctcttacaacagaatccaaagtctcaacaagagatctcacgtttggagaaaatgtgtacccaaaacgctcgtccacaaccactgtcccaacaatgcttggataattaggtgccacgacaggtttcccacactgcatcgcctcaatgatcgtcaaatcaagcccctgtggtctcaacgtcggattcacaaacacatctaaagcgttgtagaaaccagagagctcctctggctctaaagctcctaaaaccctaacgttttcgcctaattccgcgtatcttttgccccaaggaccagatccagccacaagcaaatagactttcgggtgcattttaacgagcaaagcaaacgcttcatatagaagtggatgtcctttgtctctcaccaaacgtccagacacacccatcacaatatatgtcccattgtcaggaataccgtgtttcgccctgaacctagctccagattcaggagaatacacgaacttggtttggtcaacaccgttgactataacgtgaacttttctcttaggaagttgatagatgttaactagtacctcgcgcgcgctgttgctaatgcaaatatgctgtttatattttgggaagaatctgatttcatcgacgagtctaggcatcgtttgttgaagatcagagctaggacgatcattggaaagttcttgaaaaagatttgaatgcataatctcgtaccagattccgtgccatgtcacagctatgtcaccattaggcaccattttgactcgccaatgaggcagagaaacactctcagtgtgaacataatcaaaggaatgatgatctagactgttgattttatggaagatctcaaaagctcgagagtggttaagtgagccgtgttcgtttggagcaaagtagacatggagatctcctttgttgtagtactcttctcggttacttctgtcggaagaaaccgtgaagacgtgaatctcgtgacctcttgaggcgagagaagtgtagagtgtgtaagcatgacgctccattcctccggggatcgaaccaacaggccatgacttgcagaagacagcgagtttgagcttctccgagattggtccaagtgagagtttgttccaagggaatgtcaggtctcgaagatctcctgcgaaaggaggattttccggtgaagaagtcaccggagagtaatcaaactgtgagaagaaaatgtagtaagaagaacaaaagatgaatgctaaggtaatgattgttgtgaatctgaatgaaaatgaagtggaagaagaagaagaaagagttgttcttgaagaatggttcttgaaggccattgttttggtttatttgatttttgtgaattgagtgcaactattgatgttgattctttgcttaaatttcggatctttctcgagttattatatcaaagttcatttctcaatgacattgcacatggcttagctaatttttatatggtttttacattcaattgaaagtcaaatctctcttaaccaactgagatttgtaactaaaccgggatatcacacctaattagttttcccggtttgatattttgttttgtacacgtaggcgtgtgattactccgtcacactttacacatgtgtaattcccctaatttatcgggtttctttaggcgcgtgagataatgcgcgtgtgtctacgctattcttgcgacgctgtgcttcctagggtttcgtcgttgcaaacacagtcaatgttcatgaaccacggatcctaatctccccgatcttcgattcattgtttcagaaatccccaattactgtctctgtgcgtaaaatctctagagaaaccttaaaattttccgttcagagaaattgtcaacgaaggtaatg

SEQ ID NO: 5970 - DNA, 3000 bp, Unknown
  misc_feature (1)..( 3000): cDNA_ID_1989676_gDNA_ID_1620834_Annot_ID_57952 3000 nt of promoter + ATG
gaaaggaggattttccggtgaagaagtcaccggagagtaatcaaactgtgagaagaaaatgtagtaagaagaacaaaagatgaatgctaaggtaatgattgttgtgaatctgaatgaaaatgaagtggaagaagaagaagaaagagttgttcttgaagaatggttcttgaaggccattgttttggtttatttgatttttgtgaattgagtgcaactattgatgttgattctttgcttaaatttcggatctttctcgagttattatatcaaagttcatttctcaatgacattgcacatggcttagctaatttttatatggtttttacattcaattgaaagtcaaatctctcttaaccaactgagatttgtaactaaaccgggatatcacacctaattagttttcccggtttgatattttgttttgtacacgtaggcgtgtgattactccgtcacactttacacatgtgtaattcccctaatttatcgggtttctttaggcgcgtgagataatgcgcgtgtgtctacgctattcttgcgacgctgtgcttcctagggtttcgtcgttgcaaacacagtcaatgttcatgaaccacggatcctaatctccccgatcttcgattcattgtttcagaaatccccaattactgtctctgtgcgtaaaatctctagagaaaccttaaaattttccgttcagagaaattgtcaacgaaggtaatggcgtctggtcctatagctggtggtggagtttcgaagacgaagcataaatggagtgatagtggcaacaaaagccaaaaacgatccaagcccacggtggcgaattcgaattcgcttgggttggaagataatcatcagatgatgaagataagtttaagctcaatttccaagcttgaagttaggaacttgaagcggaaactacaagctgagcttgaggaagttaggagcttgatcaaacggctcgaaccacaaggtaacaacttcgctcccgtgccgaacaagaagctgaaaacagcaaacggtggtaagaaaggtggagtacatggagctgctgctgataaaggtactgttcagattttgaagagctgcaacaatttgcttaccaagttaatgaagcataagtctggatggattttcaatactccagttgatgtagttacgcttggtttacatgattatcacaatattattaaggagcctatggatttaggaacagtgaagactaggttgagtaagagtttgtataagtcacctttggagtttgctgaggatgtcagacttacttttaacaatgcaatgctgtataatcctgtggggcatgatgtgtatcatatggctgagattttgttgaatctgtttgaagagaaatgggtgcctcttgaaacgcagtatgagttacttattaggaagcaacaaccagtccgtgatatcgatttccatgctcctgtttcgacaaacactcataatgtagaggcgttaccgttacccgctcctacaccttccctgtctcctcctcctcctcctaaagtagttgaaaataggactttggagagagctgaatctatgacaaacccagtgaaacctgcagttttacctgttgtccccgagaagcttgtagaagaggcgtctgcaaacagggacttgacgtttgatgagaagcggcaactaagtgaagacctccaggatttaccttatgacaagctagaggcagttgtgcagattataaagaagagaactccagaactctctcaacaagatgatgagattgagttagatattgatagtcttgatctggaaacactttgggagcttttcagattcgtgactgaatataaggagagcttaagcaagaaaaaggaggaacagggattagactcagaaagagatgctgaatcttttcacaatagtgtgcacgaatcggtgagagcaaatacctaattgttattcacttctcttacttttaccatataactcttactgggctaatgatatcatatttcttcttccgtcttcacagaacacgctagtaactggccttgaatcgtcaaaagttactgaattaggtgaaattttaattcttaagatagtatcaagctcttctatattggtcgtttagccccactacaataactcttctttaatgtttttgacacttgaaaaggtcatgtggcatctactgttcgacaagaagtaaatgttggaggatcaagtagttctaacagttctagtagtggctcaggctcgggttctagtggtaaatgttgaagctggtttaccttcttctcccttatgagcatcacagttccaaacaagtttactcacattcctcttttcgttatgcaggctctgacagtgatagctcaggacatgaatctgataccggtaattaaccacgattgtgaaagtatttagcataggtgggagccatcgtggtgtcaacttccaacttttttttttttttttgcatctcttaaaatagcaaagctaggttaccttcttttccaccatcggattgtttctgtattactgtattagggttcttgttaattgtatagaaaagtggacataagtcttttgtttcgggcttgtgtcatcaattgaacaggcttgttctgtacttcttagttggtttttttttgtttggtcttacgttcaaatttgtgcattgattttcgaccagtcttgctgggccagatcggagaatagtttgacctcaaaacccaagcgagacctttattggcaaatttgtgttgttttcagtatcatatcactatttttagatcaatcaccaaaacaaaggacatgctacctaatgtagaaagatcaccaactggtggttgcatggaacaaagtcgtttttttatgcttgtatgtgaagacatacgcttctctcaaacatccaacatagattcatcagctcaatagcaagaagtagttctaaacgagctaattactccgagaagtctgtttcaaatgtctatacaaacaactgcagattcgaggatg

SEQ ID NO: 5971 - DNA, 3000 bp, Unknown; identical to SEQ ID NO: 5955
  misc_feature (1)..( 3000): cDNA_ID_1989677_gDNA_ID_1620834_Annot_ID_57951 3000 nt of promoter + ATG

SEQ ID NO: 5972 - DNA, 3000 bp, Unknown
  misc_feature (1)..( 3000): cDNA_ID_2175081_gDNA_ID_1620834_Annot_ID_57949 3000 nt of promoter + ATG
gttactagaatctattgttattcaataataaaagttaattaagagtttggtgttattagtttgtgatttgtaaaaaatctttataactctaggttattggatttagaatttgataaagttgttgaaaaaaaaaactttgggttattcaactaaaacaacataattttttttattattaataaactaaattattatattattaatttataattttatacattttcgtcataaaaatatcgtcaaaatagagaaattattcgtgaaactttacaaaattacgaaaaaaactaattaacaaaattatataatactctctaccaatttctcttcatttatttactttatatgattttaaatcatcaaaattctttttaaactagaatccaataccagcccaaagttacatatagattccgggcttttattgggctacctatctaaagttaacgggcttataaaatttagtaggcccaatagaaataaagtagtccgaatgggtcatgaatcatgcacgccacaagtgaccaaaacatgatcatgtgtacgcatacgttttgaagaagaatgatccaaaataagaagacgtggattatgccacgtggaggggaatggcacaaaagaggcatgggtctgacgataaatctacctcggggagtgtgcatctggatgatccctctccatcattctttccatcccaaattctttatcttattttaattttgttgaaattccattcacattttatgatgtctcatgtatatatatgcaactctctcaacaaacacataatataaatatatttacctacatcagattcttcatacacattgtaatcaatagaccatagagatttacatggcgacttctaccttctcttctcgtggggcacaaaccatgaacaccatgttcgtcaagtaagtttaccttaaatttagtgttgagcatatgcattatttgtttcgtgcatgtcaatctttacgcataaaccatgctaattttctctctattcatattgattcttagatcatacacttttggttgttatgatcgtttaattatgtatcatgttatatatcattaacacatgcaatttgcatatatataggccgatgcttaggaaatcaattcacaagaagagtgcctcgcatgatatagtgagggatacggtgaagactgagggctctagctccggagaggaggtgaagacgatgagaggcttctacggcgccggagaaacgtcgtcgccggcgagtagttgggtgccacatgaaggtacgggaatatactatccaaagggacaagagaaagtgatgcaagatgtgcctcctcctccagctggcagccacgcggacgagctcgttaattggttctcttgatccattagtctcgagtgactctcttctcatctcgatctcgtcgaagactcgaagtctctatattattgtctattgttctaatgggaaaccataaaatatatgtgtaattaagtggaaatatattgtcatataaccaatgataatgaataattaatgatgattacaaaatgagttacgtaccaaactaccaatgcatgtagattaactgctgccttattcataatgtaccttctaatgactaactaaagctttgatccaaaatccaccaaacaaaaaacttatatccattcttacaaattggaattgctatagtttcagacagatacaaacatgcaagtagtaacaagtggggccaaaactatcttttgacttcaagaaccacagaattagccactatcagacgagaacaaatggctcttcttcttcaaaatcctatctttgggagaaaagtataaatctttttttattaaattgagggaaaaaggtagaagctttaattgtgaagtgatttggtgggttaatggcgcttgcaaacatatctctgcgtttcaagtttccacctttacaatcttcttcttcttcttcttcctcgttcaatgctactttaatcaataccagaaaactctcttcaatcgtttgctcgaaaccctcctctaatgacggcggcaaagtggctaatgacgatggtggcgcaaagccgcggaagaagttgtcggagcaatcgtcatgggaagttaaagattcagaagggaaggattatctctataggcttggcgcggaatcggataatgttaacatagccgttggggcacgaagcggcatgatcgatgatgtattcattggagacttccttggaaaagattgttaagtctctttttcttctttttgaaaaatcctatattttggaatttggataagtacaatgactctgattgtggagttgacagaacttgtgtatatctgtgaatttgcagctgatattgtgtttgattaccgtcagaaggcgacgaggtcctttgaacatcttcaaggagattattacattgctccatcgtttctggtaaatgtttattcttcttcttgtaatctcattttgaagatatcctaattaatgattatctatttatcttgttaaaatgctttcaaactaagctttgatttgtgggaatatgtcaccaagttttcttataagaacatgtgtcttctttcttgacaggataaagttggtaagtcatattgaactaagccttggtgaagaagattagaggaatacatcagtaacaacaaattggatgatagggttcatatttgactgcctaaagtttggaacttttgattcatttgtgatgtttctttcttcctttctgtttaccttaatatggcgattttcgcatgttttctgcagcggtccacattgtgaagaactaccttgctccttctctaaatataaaaatcccattgattttaggtaatgaatgccttcttcttctctgtttagtagcagtgtttgaaattttgcaaccatctcttgaacatggatgtgtttttttatggctgcttaggtatatggggaggtaaaggacaaggcaaaacatttcagactgaacttatattcaaaacaatg

SEQ ID NO: 5973 - DNA, 3000 bp, Unknown
  misc_feature (1)..( 3000): cDNA_ID_1989692_gDNA_ID_1620834_Annot_ID_57933 3000 nt of promoter + ATG
caaactttccaaagttggaatctacatatgtctaaaacagagaagaaaagcttttaaactttttacatgatgatcctccaataatagtaatagtgtaatggtactatactactacagttcaaagccactgatttatgctttttgggtacgtggaagatttcaatcacagacaaacgtaattaaatcatttattggaaaatgtgagtcaagctgaataaacttgatgcacacgaatagatatgaaagaaattgggttgatcaacaaaaaaacaagccgacaaaaactgaatcttatgatcttttttcgtccgtcagtttcaaccattcgtttgatcggataatcaaaaccagcaaatgccaataatacacaccagaaaaggtaagatgataatttttgttcgttagtagtattttattattatcatgctcatcattttcttactttggcggcccatcttttctcttcccctctttctgagtagtttagcaaaacagaagctgacaagaaaaaaatagaacatgcctggaaatacacaattacaccactttagcaggaagactatgggagtctctaatcaatgcacatgctttattcagttcaactactctctagtggtctataaatatccttgagtcctttatttctattactcatcatacttaagttctcaatagagagaatcaaaaatcaaaatgacttctcctactgcgactaagtatgatgtctttctgagtttcagaggagtcgacactcgtcgcaacttcatcagttttctctacaaagaattcgttcgaaggaaaattcgaactttcaaagacgacaaggagcttgagaatggccggaggatttctccggagctcaaacgcgccatcgaggagtcgaaattcgccgtcgttgttgtctctgtaaactacgctgcgtctccttggtgtctcgatgagcttgtgaagattatggatttcgaaaacaagggttccatcaccgtgatgcctatcttctacggtgtggatccgtgtcatttgaggaggcagatcggagatgtcgctgaacagtttaagaagcacgaggctagagaagaagatcatgagaaagttgcttcgtggagacgagcattgaccagtttggctagtatctccggagattgttcatccaaatggtgaaatttcgtagctttggttataaagattggatttttatttgatttgaatcgttactaaagtttcgttttttattttgttttctctctgtagtgaagatgaagcgaagctggtggacgaaattgctgacaagatatcaaaaaatctgatgactgttacaacaataagcaatgggaagaacctagttgggattgatacacacatgaaggctcttaacaaaaaactggatttgaattccaacaaaagtttgagagtggttgggatttgggcaagaggatacaatggtagatcagctttagctaaatatgtttatcaagacatctgtcaccactttgacagccattgtttcttgggaagcgtgaaaaggatttctcagggtcgtcacttatcgcatctacacgaagagtttctgataaggattcaaggaagtaaacataatctcaaggaccaaaaggttttgcttgtggctgatgatgtttataagcttgaacagttagatgctcttgctgaggatttcaacgggtttggtccgggaagtgttgttatcatcactacacaagacaagcatctgtttgtttctgctggtataaagcttgtctacgaagttgagcttttgaaattccagaaagtttgtgaactcttccgacaattcgcctttaaaaagagagacatttctgctgcggtcaagttggtttactatagggcaacaaattggttaggttgtctaagtggtagatctggttaggggggaagtgttaagaatcaattttgaagctaaatctcttttcataggcaaatagacattaagttaagggaatgtggctttgattaagtttgaagcctctccaaataaccttccggttctcgtttgggataccatcctatccttttattactttgttttcctttccactcgtgtaaaagcgagttccttggcaaagagttccgtttgcttaattgtgattttgtatctttggtttaattaatcttaaaggaaattgtgaaaaaaagaagttaatttggttttgaaatatgaatgtttttgttttttttttggagtattttgtttgtaattttgaatagactaactaatacaatatacaatttttcttttaaagttttgggtttgatgtttccatatgcacaacaaacttatacctaactaaagttcatagctcaaagttggaatctaaaatgactaacaacaagataaaacagagaaagggaagcttttgaagaggaagatcccaaaaacgtgaaagctgtcttcttctgctttctctcactgacactgtagaatttttctgtctgagaaagacaaaagaatgggtacaatttctctatctgtctgccagtatccttcgtccgatttatgctttttgataccttgtttgcttctttctcaggcttttacgtctcatggacccgttttcatgactttttttatgggaacaacaaagtgggctaaagcctatagatggtaactgaaattaaacaaagaaaaacaaaacaatcagaaaaggcccagcccaaatagggagaaggaggcccaaacagaaaagaaaaacggagcacaaaatggttttaccggcggcaagaaaaccggcaaagtctctcggccggaagcctaatctaaaatattgcactgcattgtgtcatttcattgagttgactttgatattttcttggttacaagctgacaaaaataacaaataagaaaatgcgaggaaatttaacctgtctctgaagcatgaagaaggagtctctgtaaaatcctcccacacggttacacgtccacggctattaatcccacttattccatttctctttagaatcaatgaa

SEQ ID NO: 5974 - DNA, 3000 bp, Unknown
  misc_feature (1)..( 3000): cDNA_ID_1989695_gDNA_ID_1620834_Annot_ID_57926 3000 nt of promoter + ATG
aaccggaaaaaataaccgtaaatattttgacagagaattacaatataggaaggttgcaataaaagacacaagcgagaaaaaacaaccgtcaatattttttacaaaaagttgcgattaaaagacacaaccgttcagagtgcaaaaagacatttatttaaatttaatttaatttaattatttttaattatttattaatttatattttttgatcgctaagttgttcgtttgcttgtcgctggatccagcgaccaaaagcagcgactaatcgctgaaaccagcgactgatcgctaaaaatttcagcgaccaaaaattgcggtcgctgatcgctggcgactgtcgctacttttggtcgctgaaccagcgacaggcaaacgaacaacttttggttgttgtcgctggttttagtcgccagcgacaggcaaacgaacagagccatagtccaaaccaggactagacgccaccgtacatccttctagatcacgtgaaatttacgctgaaaaaccgagtttatcttaaatcatcagaaaattgttttaaatcacgtgaaatttacatttagagacatgtttacgtgtaaacgcccatataaccaatcaaccatcctaaagttgaaaaataaatttggataaaatcttggaattgtttttgtcgcaatcatatattctaaagtaattattcatttattttgtataacacatgcgacgtcacagaatctggagatatatttgtgtatttgtaccttataatttaataaaaacgttttgtttgctgaaagtattcgccgttgaaagattcgaacatattttatacgttttgttctgtagacaatcatcgagttcgcaacgtagttaacgtatgctactatacattgccgagtcatatgttcgtcgaccgtacgtacagttataatctcgaccaaatatttttcattatctatactatcattcaatttaaagtggccaactggccatgaccaatttcttcgtgctttattcaataaagtcatatgcagttttttttttttttttggccggatacattgtttttcttattcaagagcaagagtcaaagatattaccaactcataaggagaaagagtcataagctaaacatttgatctgatttctttagtttgaaaagtcgataaagttgtgaaatttctctgtaaatttttctaatttacttttgtacacggaaactggtaagacattcaaactagagtaaccacaaacacaagttacaaaagttttcgcaagtatttaaagaaaattcaaaaaatggcaaaatgttaaatacaagtttgataagattttgacgcataattgaacaaaaaaaatacttgtggataaattgatttttgacgattccaatgctatttgttgaataaaaagtgattaccgaaggtgaattggcattagataaacacaatttttttaaaattttttttttgtcaaagtagtgtataatggaataatgtttgtcgaccgttaatcgaatagtcaggcttttttttttggtctgcattattcttgtgggctacttaagtttggcccaacacatttcctagcaatgcataaactagaaacagaatgaaaagtccatccaaaaatgaaagagaacacaatgaaccattcttcttagtttttacttcttacctttgaatttgattatcaagcattacattttttccccattattcttctatatctgtaaagttctagaagtgtttgtagccaactgttaaaagatctaaagactaaaaagcaaaagaaagcccaaatatttgagacaactaaaatagttttttttttttttaatttgttaagcggactaaggataaggtgcaaaaataaatactccaattcgtttcactttacaacggtttatgcattcctttttttacaagatgtattcctctctttatttgggtcaatctttatgttttcctttaaacaatgaatgtcatcgaatacaagaataattatcacgacgtgacgatcacttcaattatcaaaacaaaaggagctaacctttgacattttatgattacgaagacaattctcacaatcactccataaccctcgcattgacgttttctaattcgtttgttgactttgagaccctacaatattttgccatccataataagctcaaaatcatttatcattaataagtaatgctaactaacaaaatcaactattagttggagttggagtaagctaccaaatagacaaacttagaaatgctaatttttcccatcacctataacagattttaatttgctactatatcctaatctaaacttacttaactcaaaaggctaatttttgacagaaataaaaaatatttaactagcatatgatctagcaacaattaacatttttaattttgcaaccaacatggtactataatgttgtcggttcaaactatatttttccaatatctttaaatgtatgtcataattcttcttattacatctgataactgtataattattagatgtggaccatttataatatgtttcatctttttgaccatagtgagaataaaacaattaatattaccaaaaatacataaataaattgttcaagatctataatctatatgtctttatgcataattaaaatattattttaatttaaaatattattttaatatttacaaaaacagtttcctaatttcctattggatggtttcggattgaattttaataatatttgtttttgtctgaaaataaattgcgcgtcattgttcttcttctttcttcttctctatctaagcggaggaaactcaaattgttacagttcacaagtaatctcttcttcaagctttctctctctaccaattaaagtatctctctttcttctcctctctctctctacgaaaactccgttagacccgttctctctgttctaattttattcttcttcgtgttctcgttagggtttttgattctttcaacacagacccaaatcaatttctctcgtgtctttacgatg

SEQ ID NO: 5975 - DNA, 3000 bp, Unknown
  misc_feature (1)..( 3000): cDNA_ID_1988786_gDNA_ID_1620834_Annot_ID_57921 3000 nt of promoter + ATG
tagcgatctggttcgtgactttatgaacgaggaatattctcaagaggtaaggctctcttctctataatctgttccctttaaccccctcataagctatatttttaagttgtgacttgattgattctcattttgcacgtaggctccatttcgacttgtttgtataacgaaatactcaattgcttctaccaacaatatgcgaacctcatggagggaacctatgaggatcaaactacctaagattaaagctgcccccaagcttgtgggattctttgtccaaatcatggttgtttgcgaaaagcccttccatctacagtttccagcgttttcttataattgggactgtgaaggtagcaggttatatcggattaacctcaaaccaaatctctatcaatcatcagagatgatggaggacaacaataatagaccatataaatggcatcacctggtcattgtccaaatcccaactggcatcatcagcgcagaaattgatgaggtgcaattcgaatcccatatccaagttccggagccgggcgacgagataattttgtgtggagttgaacacgttgggttcgttttaaagtagctggtgcggagatcaattcttaagatgatgatggatctgcagatttctaaacacaaggatttgtaccaattttcgttttggaactaaataaattactacccatgtaacctcgtgtcggtttgcttttataatcggtttggtatttttcggtttaattgtgacttgattttatttttttccttttaagagaaccaattttttctttctgctttgtactcgatgtctgccctttttgctcaacaagctttaccagattgtattctggtatttcatcaggctagaaatggagaaagaaaagttggagctgccaaacccacaggagttgtgttctcactggaaatgttacattaaatatcattgcaaaacaactactaatacattgaatctcctttgattttggtccaaagaaaggtgaataacttttgattttggtgcatatgggatgatgacggactgatgagtacccaatatccagtgcccacgtgtcctaattcttatggatcaatcaagggcttaaaagcccataaacattaaacagagggaataaaggaatgctaaaaactaattaagaaaacatcaagtaacaattattatgttttggttgttacttgttacttccaaggataaaggagggattcctatgcttgacttgcactagagctttatttcattgcaaaaaaggttaggtacttgattaagaacccaacctaagttttagtattatacaatcctttttcccatctcattttacatgcttacactttcattaaactattatactcaaggaaactggttgcaggtctataacttgtaaattaaaactgttcgtgttatttattcccatgataaaattgtaagagcgtgtgaatcacgagcttaggagagcgtgtgaatcacgagcttaggagagcgtgtgacatcaatatggggaggggcggctaaagactaacgagtaaaggcataagggggaaattaaggactgttcagagttcagaaatgtttttagtctggaaacgacaatacactttggacaaaaagctaaataacattttaaaagcttcatacaaattaaaaatataatcaaacaaaagctaacgtggccaagatagctaattacttttttggaatcattattagagataatggaaattaagaaatcatacagccaaaacaaaccgtagttattatattcgtaacaaaagatgggggaaaagttaatataaaacaaaccttatactagtatatataatacatggctcataatacattactgctaaatgagcaaaaacaaataaaggtaaagttcttaacggctttgtagagataggaatcattaattttagagaaaaaaaaatcttgaattgtacgtttacctttccagaattacattatttgttggcttttaattgttaatcatttttgttgtgtttttcctccaaattataaaatttaaaaactgtgtcagggaatttaggaatctaatatagttggacgatttcgtattaataaagattttcaaaaaaagagtctgctctaatcgttatttgggggtaaattgattctataaggtagggttagccagagagccttattctgtgttttgggttaaagtgagaccaaataaattaagatatttaaaatgaataattaagagcacttaagacaataattaacccagaaggagaagctggtgtagtggtggttctcatggcgatgttggtttcccaggaaaggtaaaagagaggagacgaaccaaaacaaggaagaaagaagaagatcttacatacgaagatcactctctgattcactctgagagacaaactggtttactttggttctgtttgacaaaaggagacatgcaaaaataaatctctatcccttgtttttcttcttcgcttcatcgattactcaaagaggtttctttctctatctcttatctatttctttctgcatctgtagtctctttgttcgaaaaaaagatgtttaatttctgtcaaatttttctccttttttctttgttcgattattggtgtatctgtcttgtggcgtgcgattgatgtttactgattctgaaaaattcttgctaaaataattcatcttcaagtcaacgactttttgcccaaaagtgatgacgggaacaagaaatttttcttggtcggaaaattactaattttagccaatcgtagcgatctctgcaatcgtgttttggttacccaagatagtacgatcgaatcagttcgtttagagaattaaaaaattactcaaatttagaaacttccaacttctgtttctttctattctgggttttttcacccacttggattattagctttaaaaatctaatctttgagtcatttttgattgttatttaggttgttggttgtgagaataattagcttgttaaggaagacgttatg

SEQ ID NO: 5976 - DNA, 3000 bp, Unknown
  misc_feature (1)..( 3000): cDNA_ID_1989699_gDNA_ID_1620834_Annot_ID_57922 3000 nt of promoter + ATG
catgacggacatagtcaagaggtaaggttacctctcaattgggttaccctagctggaaactttttccagaacctcatttcatgttttagaagttgaccactgccttcgttttaagcttgatgatggtgggtcaaaatggtttgaaattttctgctttctttgatccctctacgccattgccatgagacggcaaattctggatcttctcacccagtaatccgccgcaaatctgcctgccccgtcacctgatgattctgcttgatttgctgttttcgtttcatctattttgtttatttcatatgaaacctccgagttcattcccgagtcaactcattaacccaaatcatactgaaaataattctagcccggttttgttttggtactctctttgagattttggttttatattaggaccgatttgggttttgaattccggttcaatttggtgtacgaattataaccaaaataaatcagcggtaagtaaattcaaaacaaccggctgatctgattctgcataaaaaaaaatacaggtttttatgaatcatgattacttgcgagagagtcgtcttctcatctgcaattctcgtcttcttcatgttcactggagttgggtaacttgatcgggtctctcctcaatccaaatcttaattcatcctccagagtggttatccatcagagaccacttgtttgtcttctgccgtttcaagaaccctaagacaaacaattggacgagttcggcttcgaatcccatcggcaaattcccagaagagtagcttttatgtggtgcgcgcttaatctctgaatatgtctcagcagacaaaatcaacatggagcatcaataatctatctcaaagaaaaaatcactactttggtaagcctttttgagttttcgtttcaaaatacgtttttttcctttgggcaaaatttcacaacgtatatacgttaattaaaatctctaattgcataagttacacactttatagtgagatgcttcattagcttaggtgaaaataagaaaatctcagataaaccgcaatgttcatcagtgataatgtcatattatacattaatgacaacagatctacaacttgttgacattaacagatcatcacttttttaatatcttcttgagtgattcattcacttattaatcatcactcaagagaataaatgatgtgattttctctttatcttcttctttttttcctgctcttgtgtatctcttgctcgtgatttccataatagctttctcttggtctccctccagttgttgcagttccttctcccaacgctcttcatccttgcctcgtagagaagacccgaggattttaagtgtcagaggaaggaaacccgatatatggacagcgcgaagggatagtgattcaaaactagtgggagggtgttgctggtcaaaagcagagtgagaaaatagttgaagagcttcgtcgtatctcagagactgaacttcataagcatgctccacaccagactcaactaacaggttcctgtcctgtgtaacaaagatcactctacttcctggaataaaccagtgagcaaggtatactatctcctttaactgtttgatgttatcaacgcaatcaatcacgatcagaccttttcggtgtccaaatgttgatttgattttatcaatccccacatctaaaccctgtgttgtacctttttctgttaacaactttaacagatcccggtcttggtgacaaatcttttcagccttgtctacaaacacatgaactttgaagttgctagatatttcttcataagcgtacctcgctagcgtcgtcttgccaatgcctcctggaccccaaattcctatcaaacgaacttcttcagcagctttgaaatccagcaatttgtagagtgtttgcatctgacgatccataccaaccagtccatcacctttggctgttaatggctttctattcgagatactcaagatttcatttgcaattaactcaatcatgtccgcttcgttgctcctatgataaaatcaaaaacataaagggaaaagaatcatgaatccgagtgaaaaaacccttgaatattcttacgtacagattaagcttgtgttttaccaatatcgtgaatccagggcaggtatgttggtgagtttagtgagagaaaccctccattcttgaatcttgtcatctggatatccttcaccaagctcttgaaagggttccgcgagatatccagtctgttttctaacattataaggatcaactccgtagaaaatggggaggatggaaagtctaccttcgctgtgagagtttacgatcttctcgagctgattgaggcacaaaacagagattggatagctctctgagactacaacaaccgcgagttttgactcctctgccagaaacgagtcatctttgaaattggtggtaatgtctttttgttccaaccaacggtccagaacagagacaaaagtttttgaggggtcttcgctgcagaaactaaggaatacttcaaatttggaggatgaagacattgctaacgagagattgagagttgcgaattgttaatttcttgaattacaattctcaaacgggaagaaatggaaaacgaaaagtatctgtttgccaaagaaagcgatgagtagaagctgccaaagtgcgcgagagtcgagatttgactactcaactatcgtgcacttaaaggtacgaaggataatataaacttttgttttgtattgtttaaggttaatttatagcagagtttgtttttgaacaggataacataaactatcttcaaactaactcacttcaattttgattttcttttttattcagttaactattttaaaaatcaacctggctctattcgtatcatttcagcgtggcttcatagcgggagctccgagacagctgctttgtcagaaacctccatgtgatcaaattgacccgacccggaaactacgaggaatactaaggggaaacaaacgaatgcagaatattttcccatttttctctttccatg

SEQ ID NO: 5977 - DNA, 3000 bp, Unknown
  misc_feature (1)..( 3000): cDNA_ID_1989696_gDNA_ID_1620834_Annot_ID_57925 3000 nt of promoter + ATG
atcaagaaactctgaagtggccttaactttccgtcctttcctcataagcgatccaaaaccacataatattgtttttttacgaggttcttgttgctgctccctctttgtcaattcaccaggtgcttgttgcttctctttctttgtcaatttatcaggtccttgttgctcagtagtaaaactgagatgatctacgttgccatcaagccaaaacatctgaatatgtatgtttcctccaatagatagatttgcaatggacctcgtttccacttctttacccgagaaatacaaagcaatttgacggccgctcctattcaattcccttatagtgatataactagcaagctcctcacagtatgagacatcaagcgtcgtcaatctagtaaggtagctgatggactctggaattttcttcagcctcttgcagccttgagttatcaattcctccaaattaacggccattgaaagatctggaagttgttccagattttcagaatctgacaagtccaatcttctcaagtttggcatcccctgagcatattcaacaaagaataggaaaattgcgagaatgttaagtaccagaagatacattgttataagcatagatctgttaagagcttttaccacggtttctttccagaagcttgtgagattgctgcgatgtagaatgatttcaacaagatcttgcggctggaatcggcaagggaaggttgtcaagggaaatgcgtcccaatgtagtaacctaagccttgatgaaagtagatttgtatcgtcaccactgaaaagcagcttggacttaatatggttcgagtgcttgtagatcttgaggaatttgagagtatcgtggtacgctgtataccctcccagatgcaatgcataaaccatgtcacacatatgtagtgccatgcaattggttggttcgcttgtctgtgggattaaatacgataaaattagttggcctacgaacaagcttagtgcagaaacaaccatgaacaacaacgatgttacagatagacactgtaagtgcttaccgtgttacgtttcagtaattcataaatttcataaggattccacaaaactcctcgtccatggcgcctctgcatggattcttgattaacaattgctcttgcagtttggtctaccaaattatgcatctttatatacccactggctgttatttcaatgagagacttctcagccaatatttttaatcccagacaaccctgtagtacaccatcatcgagaagggtagtggcacgccggagaggttctccattaaagagacatgctacatgaaggaatacatttttatctgtttcctctaatccatcgtagctaattttcaagatctccataacactttcatcaggagcttctataaatctacataatgcatcgtcccactcctttaaagatgtcattcttcggaaaaataatccataagcttcaatagcgactggaagaccttgagcaagccaagacgctcggattgacagtttttcataaagttcagaaggaggaagcgctcctttgaaagccaactggttaaataactgaagagcagcatcattatccatgcacttaacttcatatacagttcttactccgtatgtattgagcaagcccttgtctcgtgttgttatgattattcgactgcctggcccaaaccagctcgactcttgagcaaaagcatgcatttgtctcatgtcatccacattatcaaggacaacaaagactttacgacatccaaacctcgccttaatctcctggggtccaagttttacgcccgaacccttcatcttcttcttagacagaccaagtgtagttgaaagaaacttttctgctaaagacgagacaccaccctttctataaatcttggaaacgttttcaaggaaacaacgagctggaaatccctgtgaaaactggtcaaagagacacttggcaatggtggttttgccgatgcctcccattccccagattcctatcatacgaacctcattctcagagtccatactcaatagaggactcaggcgctccatgtgagcgttcatccctacgatgtcgctgaaatctactggctgcataatcaacaacttttttgaaatgtctttaacaatctcttcaatcatcgacgcctcgtcttcactagaatatagaacatgataagaataattattatcagttccatcgatattgtacactaaaaaccatatgttggtggtgaaaacttaccaagtttcaaaatcctttcctgctaaactggcgatctgggtgagagcttctctccaagttgtgaccttgttaggcattttagagtcttggtacttgtcaaatgtgaaactcccagtctgatgtctcacgtgagaaggatcaactccatagaaaatggggacaactttaatcttattctttaggtgaagatccattaccatgcggagctcgtccaagcaccaactagatgaagcgtagttctccgatagaatcacaagagcatatgtagagttttgaatggctctgctgatttcttcggagatggagtcgccgagctcaagctttttatcatctttgaacgtaacaactcccttatcgacaagttgtttgtgcaaatgactgacaatgttcttgcgggtgtcttctccccggaaactcaagaacacatcgtacttccagataggagatgaagaagatgaagccattagtctctctctttatggatcaactatttggccaagaaggaggatgaagaaatcatatcaagttcttagtacaagataatcatattgtcacaaacttgcacgttgtccgtataatgatttcaaatccatggttcaataagaccctcccccaagccaccctgttgtaacacagttgcacgtcgtcaattcgttgacttttggaagccaaactctctagatattacaaggcgtcattaactacatcaatatctcatttctttggtcaaaattcaggcatcaatcatctatctctccactatcgataatc

SEQ ID NO: 5978 - DNA, 3000 bp, Unknown
  misc_feature (1)..( 3000): cDNA_ID_1989697_gDNA_ID_1620834_Annot_ID_57924 3000 nt of promoter + ATG
tttccgtgactccattttctctccttccaaaaacggattcagaaactcaagccgcagcatcagaatggatctccaaagcccttaactctgatcaatgaaaaaggtcatactcgtaaattatgttacatgatttggccaaaactctcccaacaaatctgatttactggattctgcaatttgtttgttcttgtggtcttgttgtcatcttaacccttttgtttattttatttatttgatctccctacaagtctgggttgctcttgttggcttatttgtttgtcactagctgttttaacctttgtaatcggaaaaaaggtcggtctgcgttttctctatttcgaattcagacaatttgtaaaccttttgattgagaagaacgatcttttacctaaatactatggctgatagtttgtaattaacgcatctctttggctatcggttaaatctgagcagaatgatattgaatcatgtcattgcactacttttaagtctcaaatctctggcaagcatcttgtctcacattttatcttcttcgatctcagtccttcacgacaacacctaggaatcgcatttcaggatacaagaagtataaatgtaaattgcaacttttgcatagatactaacaccttgcactatccaggtactacaagagggacaagaccactcccccccctgttagtcttattaaatgctgaacaacattaatataatgagcgaacaacatagataacagaaacataaccaaatgtttcgagtaggcttatgcactttgattgtcaaagtgacatgatatatgaaggtgaatattcttcttcatctggacttacatattgttccaattctatttgacgtcttggaaggtattcacctgccccgatgtagttagagacataacgacgatcgttatcttgtgatgcttctagcttgtgcaatgttcttttccaactctcttcgtctttatcatatagaaatgaaccgagtactttcagggacagaggaagacgtccagcaaagtggacagcacgaatggagaatagttcaaaaccaataagagggtaagttttcttgaaagcgtatagagagaagagttgtagagcttcctcatatctcagacactccatctcgtattttgccccaccgaacttaagcgaagacttgaatctagatgtcatgataattctactgccaggaccgagccaacgggtaaccttcatggcatcgttaaattgttcattgtaagtagcatcaacaccatcaacaacaaacaggacttttcggtttacaagacttggtttgatggcatcaaatatgtcttcagaactccttctccttgtaagatgttttagtaaacttggtgagatgcggttctgatagattttattggcattggttaggaagcagtagtgttgaaagtggcttgagatgtcgtcgaaaacacattcagcaagtgtcgttttcccgacgccttggaaaccccaaatgccaattgtacggacctggttcttagattccaaatcaagcaatccatagaccgctttcttatgacgatacatcccaacaagaccgttggagtcgtcagatgtgggagaaggcgattcatttgacatatcgtccataacagatgtggcttcaagtgcatatctctcaagtccaaatccagattctacagacccagacagactgttgagtttgtacttcatatcgatatctgtcatcaatcccagaacgctcgcgtctaggccaactgtcgtttctgcgattatatctacgtccggtgtgtagtatttagaaaaataaatattgattagtctgatgattagatcatcgatcatcttggaatcatcctccctgtcaaaaaacataaaatatataggacttttggagaaaggttaagagactattttactatgatttcttaaaaaaatatatgtaacttgtagagagttttaattatgttggaaagaatataaaaaaaacttttgagaattattttgtttgaaaaagtttagtttatgggacttttaaaaaaaaaggtttttaaaactttcaaaataaataaagcaaaaaaagtctaattagcaaaaaaaaaattggaaagactttaaactctttttaaagctttgaactagccaatcaccccctatgagttagcaaattttttaaaagtaaaacaataaaagaaaccactacaataaaaaaaccactacagtaatcggtgattaccaattgcgcgaacaaaaattactgttggtgatgctaaccaattggtccagtgcatccctccaacgattcacggttctccgattttctctcgcttcatgcctcctgaagtcgtcggcgaatttaccagttggtcttgtcaaatcccccggatccacttcgtagaagactgtttcgattttgatgagaggcaaacgctcaattatcttcgcgagtacgtccaagcacaagacggaagagacgtagttctccgatatcacaacgacagcaatcctagactcgttgatagcctgcttgacctcagaagatatcctctttccgtctcccgcctgctggttttcaaatttgtaagttcgaatttctttttgatccaacgaacggtatagatggctgacaaaagttctaccggtgtcctctcttctaaaactcaggaacactttatgctctgatgaggaggaagaagaagccatgattatcgatagtggagagatagatgattgatgcctgaattttgaccaaagaaatgagatattgatgtagttaatgacgccttgtaatatctagagagtttggcttccaaaagtcaacgaattgacgacgtgcaactgtgttacaacagggtggcttgggggagggtcttattgaaccatggatttgaaatcattatacggacaacgtgcaagtttgtgacaatatgattatcttgtactaagaacttgatatgatttcttcatcctccttcttggccaaatagttgatccataaagagagagactaatg

SEQ ID NO: 5979 - DNA, 3000 bp, Unknown
  misc_feature (1)..( 3000): cDNA_ID_1989710_gDNA_ID_1620835_Annot_ID_57956 3000 nt of promoter + ATG
aatttaaaagtgctcatgagaaacatacgtttcagttttcactctcaaaggaacacatttttggtcaactcagttcagttagtttgaagacttgaagttaagaaaactaaattcaatcgaaaggaaaaaaaaactttttcacttttagtttcttttactttttcagacagcttcgtgacaaaacaatataattggttacaactgaaaaacaatcaaaaagaagtttgatgaacatattttgaaaaatgagaaagaagggggttcaaatgttagctttaaaaagattcatatgagacgacaaaaaaaaaaaaaagaaagattcatatgattttaatgtgaatgtgatccgcaaataaataatctaatgtttttttaatagtacaatggtatcttacaaaattaaatgctatttattctatagaaaacttatttttgctaaaaacgtaagatatacatttctaaaaaacataaatttatctaaaaccagattggatttaaaaaaaatagtaacaagtatttgaacctaaaaaaaaaaaaaaaaaactcagataaacagaaatcacctttaaaattacttgatgttttttcttcttctgttaattatacaaatgttgtattactaattatacttaagctgaaattaaacgggattgtggttggagacttggagtgtgtgggaaaccaattcgctttcaacatgcaagcatgtaagtatgaatgctctcattattatcacgttacgttcgccgataataaatgtatttaatttgtaatacaagtataattagtggtaacgaacacattacacatgaacggctatgttacttacttggccattaattccgttgaccttaagagatggcatatttatgagtttctttgactatttgtatatcgacaacttctccaccaccataggcaccactttccattttcttttatgccaaaactatatcagcccacttaaatcaatattttattcacttttatttatggatttatgaatcacacaattctccacaattctaaaattaataaattttgaagaatgaacataaaaatttgttaacatatatcatatattacttgtagatccttctttttggaataaaataaaagtgttgttagcgtcaatatacttcaactttgttaaaaatgagtaaatgaccacaaattgtgaaggaaaaaaaagtagacttgatcttgatttgtcgattgttgtctttcttcggtgtgtttatgattacctaaggtgacaatgaatttgaaggatttccaaaactagagctgcggaacaaaactgtgacggtaggtttctcctagctagtagagaacttggtttagaggagacacgatttctacagatttgctccatctgttgttagtaaactgccaatgctggttttagtgtagtaataacaccgacgtaacgttgttctctttatcaaaaaggaaaaaacaaaacaccaactttattcactattccttccaagagtttgtagatatgcatatatctttcaaagtggagatatttggtggaacatgaagacatttggtgactgagttcattgaaggttttaaggtagggaataacgtatgcttaacatgatgcacggtagcacgtcatctgtccgcaaaatgaggttgtgattattccttgattccaaaagttatttgacactatttgtctattcaatacaaatcgctactcctgatttaataagtgtccctttaaattaattgttctatttttttaaaaattgtcgtttctttataactttgaactatttttcaatttttgtgtcatctctaaatagagagactatactaattttctctgtactatttctattttattggatactccaaagatatgattactgttttacgatttaatatataatttttaacaaaaaaaaattaaatttattcctatttcatattaaagaaaattcaaaatatagtcaatttgttattaggagtataatagaaaatttaatttattttgttaataagtttattgaattgcttgaaaatacaaaatatagtcaatttctgattaagagtatataaaaaaaattagtttattttgttaataagtttattaaattgcttgaaattacaaaatatagtcaatttcttattaagagtataataatagaaaaacattatactattaataattttattaaattgcttgaagttacaaaatatagtcaatttctattaggagtatagtagaaaattttaatttattttgttaacaattttgttaaattgctttttaatccacatgaaaatatccaatctgcaagaagtataaaatcatcattttcaaaatatagaaagaaaataatggttttgaacattgaaaaaaatgatcttattgacaaagaaaggagctttcgacttttggaaacataatccaaattttagataattatgctaatgtatctaaaaatcttaaaacaggataattataatacgttagtgtcatcattatcatacatttcaccaaaataacgaaagaatagactagcaacaaagatttgattttctgagaatatttgttccaatccaaagtaaaaccaatcagaaaaatagaaaatttctatattcacggtaaaaaatatatattttaaaaacagaggctgtgatattttttacccatcatttctagaattttggggaaatgcaaaacactaatccataaaaattaaaaaataattaaactaaaaataaaacaaaacaaaaccaaatcccaaaggattggtccaaaatctgtgtttacaaaatatcaatggcaatttcgtagtaaagataaaaaacaaggatattgtttttaatctttctattaccctattattctcttatatatatatactcttccctccggtcaaatctcgtcgtcttgtttggtctctgtttttcacgccggagatagagagagagaagtaaaaaagcgagaaaaagctagaaactttagaatacccaataatg

SEQ ID NO: 5980 - DNA, 3000 bp, Unknown
  misc_feature (1)..( 3000): cDNA_ID_1389239_gDNA_ID_1620835_Annot_ID_57960 3000 nt of promoter + ATG
ataatcttgttgaagagtcatctcccaaaactaatgagcatgtataggctcttgttgaagggtcatttcccaaagctggcaaatcataattacataatcttgttgaatggtcatctcaggatcacagtttgtcaaatagaaacaatgtcatctgggttaagaaagttgaaagtggacatgattgacttggcttagatgattgtgtctctatggttgtactttgtgaagccttctttatcattatttgtactatgtaaccttttgtttgtgtatttctttttcatatcttcttgacccgtttttatctcgttcattcagaaactgaagacgcgtgtgattaataataactgtaatccagtgtggaacgaacaactgaccctttccatcaaagatgtgaatgatcctatccgtctggtaagctatcgtgtctattacaatttacgacggtcttctaaagaaaccgattgttggctcatattatggtctgtttatgcagacggtgtttgataaagatagattctcgggagatgacaaaatgggtgatgcagaaatagactttaggccgttcctagaagcgcatcaaatggagttagatttccagaagctccccaatggttgtgcaatcaagaggatccgtccaggcaggaccaactgtttagctgaagagagcagcatcacttggagcaatgggaagatcatgcaagagatgattcttagactaaagaatgtggagtgtggggaagtagagctcatgcttgagtggactgatggtccaggctgcaagggtctgggacgcgaaggtatgttaacaaatcctcggtttttgacttgtgcatatctatgattgcgattaacatgcgagcattggttcttttaggatccaagaagacaccatggatgccgacaaaacgattggactaagatgcagaaatgttaaaacagagaccgtgaagatgtgatggtattttttcgttatgttcatggaaagacgagtttgtctttgtctcatcagagtttaaattgacaaaaaaggctctgctttggtctttagttgtacatgtcgaataactcaacccttatatatattgtatctgtttctactaattgaagaaataaagcaaaccctgaatttctagaacctctttcaatcttatttctctggttctggtaacattagaattagctcacctatatcagtatgtatacaaaattatatttgcagggtagtaccttcttttttgtgaaatgtaatgatgatatttctaatgtcaatgtcagaaaaagacaggagatatttcttatgaatagaatctagaaggtatttgtgtgtgagtaacgcgtagatgataattaaagtgagttagcaggaaacaaaaagttggaaaagagaccttttgaattcacctttccttttcttttttgtttctttcttttaataagctgatttaagtagcatcgttgaatttgagtcggtgattgtttgtaagtgaataagaaaagtagtagagtcaggagacaggtgtgctttctcttcaaagctcagaagcaagatggagaaaacagaggaagaggttgagatgaaggaactggtagggcttgtgagaatcctagtgaagagagggatcgatcttgctcgtcgagacgctctaagcagcgacccttttgtcgtcataaccatgggtccacaggtactttttctctctttctgattctaatctgatttggttctcttctgtttgatgtttctatttctgttcttgagatgtatggtttctctgtttactttcttcgcagatggaagaccaaagaatcgacctttaagaaacatgattaataatcatttaaaaagattttacatttcatgctacaaaatgaaaacaatctatagctataggatgttgtgttgcattcgttctaactgaaattggttgtatctttgaattgcaccagaagctgaaatcttttactgtgaagaataactgcaacccagagtggaacgaagagttgactcttgcgatcgaagatcccaatgaacctgtgaagctggtgagtactagtacccgtcagtaactaccggaatcatgaattttcaactcaaaaccaactgatgataagtggttggttccatatgtttttgtttcgtatgagtgcagatggtgtatgataaagatacatttacagcggacgacaagatgggagatgcgcagatagatatgaaaccgttcctagacgttcacaaactcggtttgaaagaacttccacatggaaaagagctcaagagaattgtgcccaccagagataactgcttgtctgaagatagcataatcgtctccgataatggcaagatcgttcaggacatgattcttctgttgaagaatgtcgaatgcggcaaggtcgagatccagcttgaatggcttaaaaatccaggtggtagtggactctgaaaaaacagagatgaagtagctttatgattttctgtgtgtaataaaaaaaatctcagttaataaaatagaacagagtactactactctgttttgtaatggaaatatatttggttttagatctaaccgaaaccgttttggtttcccgcgagttttctcttcatcacaaaaaagaaaaagtgatatttatgttttatattggtttggtaaacatgttcttggaaaagtcaacggcttaaaccttttgtccatagtcagaaaaaaagaagaatcaagaagatattattaccaaagatgttcgtgagagtaacgcgtagatgagaataatatagaaacaaacacctggaaaacgaaacctattatatagatggtctttattttttgtttctttattcgctctatcgtccattgataagccaatttttaagtggtcctcgttgaatttgagccggtcattgtttagaattaaaaaaaaagaaggtaaaagagtcagagccgcctagagaaatcgatcacaaattcagaagaaaagaacagagaaaacagaggaagaggtgag

SEQ ID NO: 5981 - DNA, 3000 bp, Unknown
  misc_feature (1)..( 3000): cDNA_ID_4370980_gDNA_ID_1620835_Annot_ID_57962 3000 nt of promoter + ATG
gaacgaacgacatgaaccgcgtaacatgcatgttttcttaaagatcaacaacactacatgccaataacaaatatgtcaaaacgagaatttgcagaaggaacgtacaacctaaaccgcgttatactgaatgatctctagatcatttatatgatcaaaacctaattcaaccgttatccattacaaaaattcagtaggtgagacaaaaagatagagtcatgatatcagaagggatacaaaattgcaattaataatgatttgttttcttcttcagccgttacctccctcaatcctctacaaaaagaggctaaagaactcaaaagggactcattttctctcaaaatccttttaattttcaagttaaacaaagagaagaaaaaaatggcgactaaaatggccggggcagcaatgaatttagcaaagagagagtcgtcaagtttgtgtgggaagctagagacagatattgaaatcaaagcttcagctgggaagttccatcacatgtttgctgggagaccacaccatgtctccaaagcaactccagggaaaattcagggttgtgagctgcatgaaggtgactggggcaaagtcggctctatcgtcttctggaattatgttcatggcaagtgcaaagttatattaacttttatcggaaaaaaaagttctaatatctacatagaatatgttcttaaacttaatatttttatcaatgaaaaaagtgagcagaaatgcatacttgatgtgaacttctggccaagggcacatctcagtgtcataaatccttggctccccatttcattacaaaaaacatttattcgattcttacaatcaaatccacagatatgtaatgacaaaagtatagattaattaaattttatgtttataacatttttgtgaattaatattcataccgattttttagtcaaacccaaacaaatatatttggtgcagatggagaggcaaaggtggcaaaagaaaggatcgaggcagtggagccggagaaaaacctgatcacttttagggtgatagagggagacttattaaaagagtataaaagctttgtgatcacaatccaagtgacccctaagagaggaggacctgggagtgtggtgcactggcacgtcgagtatgagaaaattgacgacaaagtggcccaccctgagacctttcttgatttctgtgtggaagtctccaaagagatcgatgaacatctcctgaacgaggaatagagagtactctttaattgagtatctatcatatgtgtatatgtatgttatgaagcacgcatgttcttgtgtatgatacaataaacaaggagagttgcccaatatatgtgagtgatacataaaagctttgtactctaaatgtgagtatgtcatgtttggttttaataaaagcttgtgagatatgtttgtggaaggctcgtctctctgatatcatgaatgttgaatgttggaatcatccatttctgatatcatgaatgttggaatcatccatttctttgcttccttgtttgagtcttttgttgtattagcgagttctgggggcttcatgtaacaaattcgaaaaacgcgttattctcgttaataaagcatactaatatggaaaacaaagttagaatcaatatttaattagccaaattagacgtaaaaagaccaaaagaacgtaactattgatgcacacacatgtttagcgtattcagatatgagtgtttgtagttgtcactgaaaattgtatcgatcttacctattttctctcaagataaacgtgtgataatgtgttattcaagttttcaatcgagaatccattgattttaaagagaaagattttacaattttcaaaagttatacgagtgttgggaagagtgttgtctaccgacatactcatatcacaccattttcaacacctagtctaccaaaaacaaaagtgagcatgaaggccaaaatgatctaaaatggcattttgttactctcattattattttcccaattattagactctatctataaataaatatttttctatatccgcagaaataatggtataagaacgatcgatataagtaaggaggtatagctccagggtaaattccagttggactatggacgcggtcacatgaaagaagaaaaaatgagagattttgttattagttcttttgtaattaaagttgtgaattgtagacaacattgatctaattcgattgtttatataagcgtaaaaaaaatataactatgcgtgcataatgacggtgtgcttcaaagaaaataatatttaacgaacaatggtaatcatgtgtgtgcatcaatagttgacgtttgttttacctcccttttcataattttgtaacaactctattattttcccaattgttagacaaatagttattatgtcttcactttttttttccacattggaaaatcgcgatccccaacattcgtttgtaaagatctttgggaccgaaacaatctggtctctctcatcatgcatgtcttgtagatttcattgacaactacaaacactcatatctggttaattagggatgtaacaatcaactgcatgagcatttacattgaggttccagttccacggactaacaaaattcaattcttaccaaatgtttggtctctcgaaacgagcttaaaagttttatttgtcctacgagttcctctctgtaatattttctaggcaattaatattttaaaattaaaaaacaccactagcaataataaatccatctgagcatataaacgttaacagagaaaggagtgacgtgaaaggacgcaaataattcagtattattattttggttaacaaaaacaaaatcttaatgaagattttttgctaaatcttattttttgctaagaaatacgcatttaaatgaagataagattttaggtggaaatcttaatgaatctttatgggtcatttctctatttatagggctatcgaagccccaagaaaactcactctctatacctcctcaagaaaatcaaagcagcagttatg

SEQ ID NO: 5982 - DNA, 3000 bp, Unknown
  misc_feature (1)..( 3000): cDNA_ID_1572397_gDNA_ID_1620835_Annot_ID_57966 3000 nt of promoter + ATG
gtagatggatttgttagtcatgagcagttgattcatctagagttaaaaaaaaaaaaaaaaaaaaagagcagttgattcatctttttttttttctctttactttttttttgttacagagtagttgttgtatctaaatctctacttttgaagtacaccaaacaattaaatgaaagatggtaatagtaatagactaatagtcatctgagagagaaaactattcacacttactcaattagtaggggtaggtatatgttgagagcaaagagaaaaaagtggaattatgagggcagatgctgaagaaggaaagttaaatatgattcagagcttcttctgcacgcactttctcaaattcaaacaccaaaaccataccatctcgtttcttgaaacattacacatcagatgagatgattcatagttttttctgtactagccttctcaaattccaaacactaaaaccataccttctcatttcttagaaaattacacaccaaatgagatgatttagggcgtcttctgcactagccttcacaaatttcaatcactaaacccaaataagacattaaagagttcaacattaaaaccacataccatctcacattttcttgaaacattaattaaacaccatataagacatcataattttctgtgacatgaaacacaacaacattgtaaccgttgcaacacttaacaacatcacaattttatctttagatagtttactctcctttagttgttaggcaaaagtggcgtatattctttaaattcttaatactaacattaaaagagttcaatatagtcgaaccaaatctaccctaaatacctaaaatataatcgtttctatgctccataaagacaaaaacaaaaggattccaactttcaaaatctatgacaaactcgattttacactagagtaccttcggatcgcgattggcgttccacgtttgcgtcttgcgttttgcttgtagcccttgtaggttggtgaagggggtaagtgataataatagcaacacgtaaaagttagttgtggagaggattgggacccgtgtgaactactctcttgtcgtctccataaatatcatctctgctcaatggcccacgaaacggtgccgtactgtatctcagagcctttctcggcggaggcggcggcggcgacgcgacgaggtgaagacgagaataaccaacagaagccgatgacgacaaaactatctgaaaactgacatagaagacgaagaagaataagaagaaacacatggtcatattcacgtcccatcttctcttctttccttgtccctgtcttcgtaccaacacgtgagtcatctcacaaaaccttgttccggaggagtaaccaaaaacagacgaacatgaagacaaagtcacaaagagacagtgaaagtcaaaggaagaaaaaaacaagagagaaggaggagaaagaagaagaagaagaagtggttttttggaatgcaagtttgtttgttgtcttgtgggtaaaaataagatttattgactcgtaaaaagtttctgatgggtcttcggatccttctaagatctggcactattctttcctctaaaaggcaaaagcttttacaagaattctctttttctctctctttctctctttgtctcggaagtcgtaagcaaaaaaagagtgtgtgtggtctgtagaagaaagtacggcaggaggtattaataacggctgtcacctctttgagtttattcgagggaagagtcttcgaaagcactctcttctctttaccattctatctcactttttgtttactaattacgaatttggacgtactaataattgtaattagggtttttcttggtaatgacgatgagttgtttatgtttgatggtgaaacacattggccaatgttcttttgaggcattgactttgtaggtttagacagctcactgtgcttaaaataaaataaatgttagcaccctacttttctttttttgtcaattattacggtcaaagtagatgagattgggacgttatagccaatttttttatttttatttttgtgaataccatttaatcccccggttatattagtatattactgttacacttactgtattcagtttcaaaatgatacaacaggtgatgtcttgactctttgaccaaaaaaaaaaaaaagtgctgctatctgattccaggacttttatataaactgataacatcatatgatttttagcgtagcagaaattatttgtgaatgacaaactcagattctaacatcacggtcgatcttaacgatatcttgtttcattcaaccatgattaatagcttatgaaacaatacttcaaatatcacaaaaggaaaccaatattagttatcaatttttgtttttggaaaagtaagcaatggtctctacagctctaaaaacagttattgtgtatgttttcaacagaattgttcatcaaatcttgaagagttttataactataaagtctataatctactctcattcccacgaggcccactacaatcgtgccttgattcctcctctaccactttcggtgggctttaatctattgggctaaaactatcatcttggattcaattatatttttcttgtggggtttaatactagagtgtactaattgtaaaaacattggtaactcttgctcatttacatcagaaaacctcttattctcacgaaattttcaacacacgacaaagaaattttgataagctgaggagatatttggtaacgcctcacgcaaatgaacccatgtgaataaatatgatcgatcaataatatcatatcatcaagataagacgcagataattgtaaacatgatttattatgaatttatgataaggtcccgaaactattcatgatattattttaacgatcaaaaatggttctatcatttaatactttctcactcattcttctacaaatagaggctaaataactcaaaaagaaaacacactcatctcctaaattccttacataatattttcttaagataagcaaaaaaatcatg

SEQ ID NO: 5983 - DNA, 3000 bp, Unknown
  misc_feature (1)..( 3000): cDNA_ID_1989705_gDNA_ID_1620835_Annot_ID_57968 3000 nt of promoter + ATG
cataatctattgtttttttacataaatgcattgtgttaccgttacttcaaattcatacattgcaatatacggaaaaacttttatagatgatatctctttacaaaacctaaaaataacactagaacgatacttttgcgacactgaaaaatattatcacatcatcattatgattacaaagatgattcagtcgtgtacgttataacatgtcgaaattcatggtcacaaatcacacccatctgtcattctctttcttggacttcctaaataacttttagcctttttcccagattatattcaataattgacgatcgataactttaaactattcattctttaagagtgagtaaattgaaaagtttatgaacatttcacattctttaatcacgtgtttaagccaccagtagccatcattgttcactttcaagattgtctaaatcgcttcgacgtaccacttcttttgaagaactggaatcaatattgatcgtccgaagttttaaccactcatttgatttgtatcaatatataactgccaaattcttatgtgttttagtgtttatttcatacggctaaaccgtatacttttgttcacgtgtatctttgattatttaaccacaaacataattttattgcatatagtgtgtttattaaatgatactgtactttagtttctgttttgtataatacttctttttctttacaataatattttagtactctattgaactcaaagtttgaccaaaattttagatgatatttttgtaacaattaaaagagggcacatttttaaacttagccataaacattttgagtcactcagtcatagccttatacgcacaacactgtgtgtactagctttattgtggaatatgtatatttttgtgtagatctttatgtacattagctagaattatcaattatataaacacttaaacagatggaataatttggtagttaatggaaatggttaagctgacatatgaagtgcttccaaaagttccctaaatcttttgccgatatctaggattatttattttgttaattgaatgtcaattgagtgaaaatattaagatataataataggttgattcgattatgataaatagttgaataaagtgtataatatggttttgtaaggacggcagattttatcttagcttaaatcacaattaatcattcatgtttggacttattcgaggaagttgtgtcaagtaatattttatgcaatcagaaagatacagcaacactaagtcacaagaaggtcacgacattctctgtctcagccatttactcatgtgaaactttggctctgtactaaaaaggtagtaatgcccatatcgggaaaaaaaattataagaataaaatacaggaaaatatttttttctactatataagtgatttaatgatatattaactaaatttatacaataaattgagctatttggttttgtaaaactcataaataaaaatgacatatattaactatactcataagtactacattgtgatgataatattttaaaactcaaatatcaaatcaataaatgtctaatatcaatttcattgataattcatttttgaattttatttctctattaatctatttaaaaagatatgtttaccgctagcctccaaccactagttagaggttaaccactgtagttctaatttcagttcatctcaatttttgttttggttaaaaagtttaaaccgatcatctctacactaaattcagattttagtttatgtgaacaaataattccgaagcgacgtgttaactaatatcatgaaggggaattagacagaagcttaacgatgagaatataggctaaaatttatgtcgtccaaggagtaattgagtgttgcctacttcacgagacaaataagtaaacctaacaataacacatagacacactcgacgccattagccaaattccatttgagccatccaattccttagtggatcttctttgtctccagcccatcttgtctccttatttttctaatgattactttataaaaagtgttttatcaaacatcacaaaatataaaaagaatttccaaatacttttgatatttaactattgcttttttgattattagccggggtaccaagatattagtttttaatttagtaatatacccatatgtttaatattgatatcgatattgatttattcatattacgaaaatggattagttagagaatgtgaaagaaaggtaaagtaaaatattgaaaagcaaagattaggggacagaagagaaaaggtatgtctctgccatgcccatccccaaaagtagagtgccacatgtagaccttcttcttaagatctaactcagatgctatttgtacaagtaaaaaatgtggcagactcagtttctatttttccatattttactttaatcttcatgaatcataaaaaatgaaaaatcaagcacatgaatgtcactgaaattattcaacaatattcttatttatcagttattttaattatttgactatttatgtgtatgttgttatctacaatatgtccgtttcaatcagtcgaacaaaaaatactagattttagttatgtagtataaaatataaaaatgttgaaaaacactctaaccattaatttgtattattttaaactttccatatgatgagatgtattattcaatataataataaaaagaatattatttaataattaaacaaaaacataataaatcttataaacaatatcttaaaagaaaagaactatattgttatttttttgataagatcgataaaaaatgtaacatactaaagaataaataaaataaaataaattagtaaaaaggaacttgggtggtcacgtatttgctgtataaagaggtgtaaagtggcatccttccttaaattatatcctcaaaaaccaaacttgctcactccacacacacactgctcccaagtcctctcacttcttcttcttcctccgacaccgttgcttaacggttttccatttttgtcccttcaag

SEQ ID NO: 5984 - DNA, 3000 bp, Unknown
  misc_feature (1)..( 3000): cDNA_ID_1988785_gDNA_ID_1620835_Annot_ID_57971 3000 nt of promoter + ATG
gtttttaagtcatccgatccctttcataaatatcagcaagttttgacgtatgacaattttttattgttcatgtaattacaaacaattaaagtgggatcgttttaccaaattttgtttttactaaaacgtgtatgctgacagaaaatctgtcaatgtaatacttgtattcgaataattaaactactaaaacgtgtacattgaaagagaatatgttttactttcatgctggtatccaataatctctatggtaattggtcggtaattttagtaagtttttaacgtgtggaactaatttaacatttcttcctttggttttagaagtaaagcatgaattataagttaaagatataggcgttttgcgactcaacaagtaatcacccactcacagcattagtaacaaactctgagattcttctctataaatatcacttgtgtgtgttcaagttaaagaagaagaaaatggagaataagaaagaaaagaaaagaaaaagaaaaatggagaattcaagttccgaaacacttcatgttgaagatttacaaacggagataatgtcatggctgcctctgaaaagcttgttgagattcgtcatcgtctcaaagaaatgggcatctattatccgtggagaacaattcaaagctctttacttgcgtcgatcgatgacaaggcctcggctgatgttcatggtccgacgaattgcaaccctaccacccgaacctgagatggtgtggtttcagtctttttgtaaagaggaaagatgtattcccggccaactcgaagttgagttcttgtttcactctgtttatcaagaaaagataccgtatttttcatctggtcaacagcagttgcgtgttcctcctaatacaaactatacgtctgtttctcaacccatcggaggtttgatctgtcttcagtcagaaactaagtttgcgctttgcaatccgggtacgaaaaagtctcgggctttacctgatatccaagcacatgaaaaagcttttataacaagttttttaggatacgatgaagctacgaacgtattcaaggtgttatgtttgacgatggtatgggcccatgaaccatcaaaacgagtttatgagtatcaagtcttgacggtggaatccggtgtagagtcttgttcttggagagggatcacatgtaaggagaaggatcacacaccagaaactcaaggactatgtaaaggaggggttttgtactatggagctcggtccactagtgaccatcgacctctggtaatgagctttaatgtgaggtctcaagagtttaccgccattgaacttcctgatcaactacatattagttatttttggaattttgtgatttacaatggggatattgccttagtgaacgaatctgactttgaccctagagttgtgaatgaaccgaatgggaataaagtttttcacatatgggttagggatgcaactgcacaagaatggcagagaacccgcatcgagattcctcgttgggaacaaaatgttggacatgtggactatgttttcagaggtaccactggaacaaaagaacttgttttcgcccaagactctcgccattgcgaagatgatttctttgtgttgtattacgatacattcacaaaagatctcagaagatttcagattggagtgactggccctaaaatttctgttcgaacctgcttggatcatgttgatagcctttggcttatgtgaagaccaagatctcagtctctcttcttgatttatgctaaatattaatgttgtctctatagtagtaatatcttattttagttttcatttcattaatctttatttatgctaaataataatgttgtttctcaagtagtgctatcttattgccattgggatggtttgttttcatttctactgtcgtttatctttatttatgctaaaataataatatgtttgttctattcagattataacttcaataacatttctaatttctatatatatatactcactatttctcaagctctgagagccttttcatgaaaccaagggggttccattccaaaaataaaaaagaattgagtacagaacaacgttgtaagatatgcaagaataaagcatggaagcaaatattagccagaaagatcaacccagagtcgagatgaaaaaaatgttccaagtaagaaatcaaacattcatatataatacttgttcagataatcaatagaaacaatggtaagaaaaagtaccatataaagtctctcaatcttcgctataacagagttaagacgattaggatgaggtttaattcaccatttcattctctgtttgtgccccctgcatttgatatatagcaaaatcattagacaatgataaatatccacattgaaatcactatacagctttagttttgtttcagtttcaagagttagtttattgaaaccctagctccaaactcaatgtcaagaaataaattttccaatttcagctctcggaatgatacaatacaaaaattgttctaacagagacagagaaatgaatacgtgagaatatgcatgtagcagctaagaactcaccgcaccggtgcaaggcgaaactcgaggttaggaagccgaaacgaacaagccgccgttttccttgctagcctcatccataagcttcttccatgatacgagcgtggtggtctcctattggagaagttcgactttaagtactttccgatcaccggcagtcaatatctctgacgagattttacacgattcgccgaaagttggaccgtcatcggttgggaccgggtcagagttagactctgtagagacccgaatcggagaggaagtgaaggcccatgaataagcccatacaattacaattccaaggaaaagaagtatacaaagacacgttttggagctgcgtaaactgtccccataatcctttgccatcaacaacttcgattccggggactacaagcctctgtcttctctctcgtttagggttttattccaaaattccgtgcttcgatcccgaagatcagaaaaa

SEQ ID NO: 5985 - DNA, 3000 bp, Unknown
  misc_feature (1)..( 3000): cDNA_ID_2039305_gDNA_ID_1620835_Annot_ID_57969 3000 nt of promoter + ATG
taataattgaaatccaatatataaaattcatgaatcaacaaaagcaaaattaaagagaaaagtaaacgtgaatagattgagagagagaaggacagatgaaggtgggtgtcggccgaaccacggacaccggtcggagtctcaagacaaaggaaggtttgcgtctggggaccattcacactacctcaatacaacacccatgccaactccaaatccattcttaattctttttattttcagtaaccaaaacataaatctactaatatcatttaatggaactaatttagtttaaagctttttttaatgttgctaatgaaataagcaccttaagtatattctcccattggtgatatgttttcttatcggttggtttgggtaattttcgacacttttggaaaatggacaacccatgttgtcatttccctttagattttcttgatggttatggtgtggctagtttttttttttcttattttcttatttttggtatttaagaagagaattataaaggaaagagaaataagtgtatagtttaaaaggaaaaaaaacaaaggaatgtaaaggcaaatacaagtgtatcccggcattagtttggttttgcgtacttgttgttgtgagcttcatgttctttagcgacttttcgtcacgttatctttggttcccttcacttattttttcaatgtaccatttgataatacatattttttcgttgtttctgaaatgcaacgtataatcttggcgtgattttacatatttttaaagaatacacgatgaacaacaataacatgaaacaaatgtctaagattatactctcccggaggagaacatgcattcacccatcctaatcctatgaaacagttattttacgttttgaccattgactctagagtagcagctgtattaaaatctggtacaaagagatttcacgacacattttaatgcatggcatcagatggatgccatttatgtcgcatacgctacccaaatatgcacaccatcaattaggctacatagggccataggatcgcatgcccaacaaggtcagacaaaccaacatcaaagtctacgtactaactttgcagcagcaggcgaatccaacccaaagaccaacaagtatcaagatccaaatcatgtaacctctataaacatctccttaaggaaagcaaatcttgcagttcttcaacaataacggccagtttaagctaaaacaatgaaaccatgagagtgctcactattcgagatgaactatacaagaattaatgtctcgatgttaatagtatattatctacgatcacaagtaagaaagctaacttgaataaagcaaggattcatccgcgtttgcttagaagtcttatctcgagttctagcctcattcccatcgttttgcctttaccttctcaaatgcattcatcttgttgatcctgaaaaactatatccttcagatacgaaaatgaacaacaaaggtttttgctttaatgcttaaaacctaatttatgtttgccatgtccttggtcatttccttttctctccatttgccatcctctccaatcaccttcttcaaatcttttaggctcctaaaaccatcaacgttgatgcatgatgataataaaggcaaactcaaatatcgcaaatttgcaactgatattagcacacatttttgcagtacatagactatatttgtattaattactctctattcccaaatttgttacacaatctctttcgattcttccaaaatttgttctgctttgacttctttttatttttttgataaacatgtgaagattcataccaattttaaagtttctacagagtacagagattcaacgaaaaaagcagaaagcagaaatctacaatctgctttgaccagctttgctttcataatttttactgtacagagaataataaccaacctaaatcagaattcaatatttcctctaccaacaaaaaagataaaccctgaaacgttttgtaagagaatcacgtgagagaccacgtgaccatttttttccctaagcatcgttaatcttaatgggctcaagaaaagtttcttaattggatcttattataatactgttgagtgagccttagtccattattatgacgtggcataaccctgccactttcagggtatcgatccacatctgccgttaaaacagtaaaccgccgtctaaactttatagcaaagaatctggaccgttgataaacccctaaataaacgggaggactgataacggagaacgtgagcatcctctgacaagaaaaagacaaaaaaagaagaagaaaaaaagcacatgacatgattctttcaccaccctttcgtcttccactctcatcaatctagattctcttctctcttctctatattccaaagcttttacatttcttcaaatcttattttccttgagatcaattatggcaggagagattcaggacccgtttagtcttagttttcaggtaaattcttctactacaatgtcacacttttacttgtttttcttctaactcttttcataattgctcttgacgaatcttggtaaattatgtatgttcgttttaagatcaatctaaatggacttgaaattctactgttttcagctttacttcaacgaaatttgctaaatttaaccgcttagtagcatgtatgcagagtagtgcttcatgtcttgggaaaaaagtcaattgctaggtcacattttgttagatttgtgtattcagtttgattaatgtgtttaagaaatgctaggtcttaaatttatttaatgtttattgtggagcactcaaatgaacataggcaagactctgaatgtatgtaatacgttttagcattgttcttattggtttgatgaatacaaactacaggggaactctatccactctggatcgatatcctttggaagattcgagaaagagggtttatcatgggagaagaggtcatctttttctcacaataggtatcttgaagaagttgacaagtgttctaaacctggctctgttactgag

SEQ ID NO: 5986 - DNA, 3000 bp, Unknown
  misc_feature (1)..( 3000): cDNA_ID_3079122_gDNA_ID_1620835_Annot_ID_169874 3000 nt of promoter + ATG
gtaatactgcgagagaaatcttatgaaagaatcgaaatgtgttttaaaaaaattaaagttttaagttttttttttttaatattgttaattttgtttagtgtttaagattatataattatattataattgttaattataggttttttttccgtagcatatcatcctatgttataatccactcaaacccgtcacaccatataaccccgtcccatgaaactaaacacaaatttgtcattttattataaatttcaaatatgtataaaattataaacttcaaaaaagattaatattgacccaaacttcatcattgaattttgagtgttatatctaagatttctctcgcagtatatcgtctcatattaatatcttttatattttgagtgttatatataaaatttgaaacttaaaaaaatacaatatcgaccttgattatatttaagacttttcctgtaatatatatcgtctcatattaatatattttatatatatttataatgtttaaatttctttaaaattcaatttataatttttaaaactttataagttttaaaattataaatattcaaagaattttttaaagataaactttataaaaagtttttaaaattataatatttaacttttgataaagttataatatttataatttcttgaaacattttaaagtttcaattctttaaaataaaaaaacccgagtaaatcggataactattttaattttggacgcctgataaatcaagcttcctgctcattcgtaatcagaatcattttggtccttttataatatgggtctgaaccattgtccaatttttctaagcgatgtgggacattgtacacatattatttcttcataggttgaataatatatgtctgttttaaaaaatttaaattacatcatatgcagaaaaaaatataatattttattaactatatatattttatataaattcaaaataaataaagtataagatcaagtaaaagtgaaagaagaattatatatttatgtttaaattaggtagaaatattttaggaaattagttaaggtaaataacaaatatggttagtttagagatattgtttatattaaatttggtaattaaatcattaattttcgtttttaattattagtttttaggtaacttttccaaaaattaatgttatccaagatcagaacagaattaaacatgttatccaagatccgaacagagttaaaccgggtaaaacccacccatttgaattaattgttgaattatggctcaaatcttcaacattatcttcaaaaaacgtttacaaaaatgtatatatagataactacaatataatacggttttcatagtaacaaaaatatatatctatttatatatagatattttcgttacttttaaaaatatatcgtacaatgcagtttaatcttaattcaaaatactgcaaattaattaatgatacacaaataatcaaatgcttttaattagcctatcaatagagtattaacacattttttttccttttttttttgtgtgcaagctattatacatcttgatatgcaagctattataattaaaacaatcataaagttagatcatttctcacttctccaattatatatgtatatttcaaaagcgtaacttaatcataatttcgatattatttcatttacaattcataaatttggttatcttttcgttttaatattttctatagtaaaagaattatgaagaaatttgattagttaatgcttataattttgattttttcatttacatgtcataaatttggttatcttttcattttaagttttcctatttataaatattaaacagtaaaaggattatgtaatattttgaataattaatgctttcattcaatatcagattcacatgtttgttgtggaaattaaagttttaggaatattatgagatcttctataattaataatatactcattaaataggtttatatctgctgttggaaaaaatgtgaatcaaaaagaaaaagagaaagaattttggatataaatttaaatttatcaaaatagttacacaaaaaaagaataacgccgttgatgaatggtgaccaattgaaaacggaagcttgaagatggagtcactgtcctgtcaaataaaaagactttgaaggtctttgtcatgttttttcttcaaacaaataaatacttaaggaaaacaaaagttatctatcaaaccatatatattaaaaaaaactaagaaccctagttgaattaaaaaataaagaaaaaaaaggcaaggtaaaggggaacagaggagagagaaaaaggtgtgaacagttaatggcggagcagtataaggaatcgcttctctctagaaatcttttgccatagctggatttcatttttttgatctctctctctctcttctcttgtaataacaaagctcacaacataaagaaattattacagaacaagcaagcaagaagaagaagaagaagcaataaaaattagtgcttttttatttagtgagagagaaaagctctgaagaagaaggaagttgttttcgagatgcgagctagtaaaggaaccttctctgtacttcttctctttctccttttgattctcattctgcccagtctttaattttttttcctttttcttcttcttctttcttcttcttcaatttcactcttgttgggtaagtcaagaatcgtccaaagtctttttttttttcttgggttgtttggtattggatctgtttcttggttcttttaaagattggctaatactttgattttggggggttttgatttgatctagggtttctagttagagtctgaagacctttggatttgatgtaggactttgttttttgttctaaagttaaaaaaagaagaaaaaaagaaaaagaatctgttttctcatccaaatctacccaccatttttgttgtgggaggtttttttttttattattacaaaaagaaaaatatagagagaaggagagatttgttttaaagtaaatattttgattgttt

SEQ ID NO: 5987 - DNA, 3000 bp, Unknown
  misc_feature (1)..( 3000): cDNA_ID_3079134_gDNA_ID_1620835_Annot_ID_169870 3000 nt of promoter + ATG
aacagccgctccaaactgctggtcaatgggatacaactctcctggtggacccgtcatgtatatgtaagtggacggaggcggtggacaataagacttcttcggcggtgaaggaggtagtggtggtggaggacaagcttgagacggcggtggaggtgatggcggtggaggtgacggaggaggaatgttttgaagacatggtgtacattttataggatcctcttcgagttttctattggttgatgaatctgaagcgttgatgatcattggaaacgtgagaaacaccactgtcgtcaagagcgtggcggcgagagcctttgtacggcgagttttctccggcatggtgagagttgttatatgcctggagaatcgaataaagagaggtttgggaagattctttggttggacgtaaaaagagttgaaaatttggtgaggtggtttggtaagagggtgcatgggactgatatactagctagtacttcttcaagactataaatttctgtctaaattttgttttttattttatttctattgataagatacaaaaatactttacaacatgcaagaatcaaaagaagaagaagaatatattctatagggaaaattgaaatcggctcttagttacatgtgagttggagcttcaaataaggggtcccatatggaccatctaacataaaatcgtgttacttgaaatataattaaatacaactatagtggaattattagcctttaatccaccgtcgtccacccaaaaataaaatattcacgaatttatacgcttaaaagcttccaaataattgttaccaataataagaacgtttgatgacacaatgattgatcgtaatctgaattaaaaagctaaaagcataaatgtatatgactctgtagcctgtaaaatcgttgctaaagcgtgaattggtcgctttttctatcatatgataatccttaattgtattgtattagatgagaaaaaaaaaacgttacgatttggtaatagtagagaaataataattaggaaaaagactatactacagcgtctctatactgtattccatgacggttcttttggtagcaattgcacatgcagtgagaataaatgaatgagttgacttacggccacatactacgcaacgcaaattgctccaaagatttattataacagatatatgttctaacaattacacaaactttaatgctcttatttctgttaagaaaatgacaaagtagttggaaatctattccaaagctggaaaaggggatatacatcgaccgactcaatgggctgaaataaggactttagcccaaatcaaaaattaattcggaacaaagattagcccatatccaaatttgttactcatatcctcctttttttcctttttgataaaacgtaaaaagatattccaaatgccattgttttgatattattaaaaaaggtcgttacaagcatcagaaaaaacgaaaacgcaattacaaatcgatgcttcttaacgaacattgttcccctacaaaaattatccaatgctactttatccaaaacgtgaaaaccatagctagagcagaatctatttcttggaccagaagtcacagaagtgttgagacttggaagccagagttttctatctgcttaacaaaaacagggtcagtgattcctcattagtcacagtccgagtctcctagagatgcaaatccaaatatgcgagattcagattcttcgattctttcccacgaaaatcgatatagttcagtagctgctttgagaatagaactcaaagcttgaaagcggtagagacatctgtgaatgccaatcaggcgtttggttcaagtcgaaattcatttgcattgattggttctggaacaatggttctgattggaactcatagaccatgtcatcgaccattgtctgtagctcttccaagctgtattgcttttcctgcacgtcaatattatcaaaccgtttacttgtgtgagaagaaacaaaacaagatcagtgaatttatgtacaaaaatgagatttacctctcttttagtctgagacataagtgaaaccatctcttgaacaaaatcgaagtacccctattgtagtgaacaaaacacaaacatatcagctttttgtaataaacaaaaacaaattataaatatttgaaaacaatcacaatttgaagtaaccatgcatacctcatcttctccagaatcatagagtccaacgtcgtacgagcttcgtttcctctcatccgacaaaactaaacacaagaaaattgtttccagacaacaatgtcagtcatcggacaagaaccaaaaaacctcaaaacaaagtctgaacagatctttacctgaataagcttcttgaatctgctggaatcttcgtttagcttctccagatctaaaaggatctttcgtccaccggtcaggatgccatatcttagcaagcttgtgatatgctcgtcgtatctgctccgccgaagaatcaacggcaacaccgagaatctcgtaatacgtttgcctaatgccaccttccattggttattacgtaaataagcttaaagcattacactttacgaagagataattacttgtaagtgtggtttggggtttatataaaacaggagttgtgttccaatggcggttatatggaagaaagatttttacaaaagaagttctagaagatttcggcttaccaaaaatatcttgtctcaagattcaagaacgttcgggaacatagtaagaaggcagatattatccacacaatctttagatattttttcattggacggccgcgattgaatggacggtcgcgtcatgatcttaacatgacacgtggttttaaataactttatttggaaattgtgagatttgttatgttttttgtagtttaatactttacttgtggaagcagacaagtaatgcttattcacattcagactcggtgaacaagacatggatttttcttatgcacattcaaatctatcttttggctaattatctaaaaagttacgtaaacaaaaa

SEQ ID NO: 5988 - DNA, 3000 bp, Unknown
  misc_feature (1)..( 3000): cDNA_ID_3079138_gDNA_ID_1620835_Annot_ID_169869 3000 nt of promoter + ATG
aagcatgcttgttgaatatacacatgagcatattaagagtcgttaatccctaattaaggagtcaaaagtttgcatttttttttgctttttccctttttttttttgataattctgtggagctaagcaatatgtgatatattaacaaaaaagaagaagttaaatgtgatgttaaagccaaagccaaggtcgaacagacaacgaagataagatggaaccagatcgggactgctcctttgacaagtgtttgcactgaattcaaaaactttgatgggcttatacatatcattatatatgtgcatggttcgatggagtggaataattagataatatttctaatagagaaaattaattaatagaagcggaagatcgaggcatatggacctcaaacactaccaaccccccaaaacccaaaaccaaaccaaactcacacctctatgtttgtctctttgtctactctccaaaacccttcgggtaggtgtgttttcgacgtgtgattcatgtcttcccaccattcctttaatttacgttgattttaatatctaattcaatttattaatttgtttttataaataaatttgattacatcgatttgattttgttctttaatttttagtgaattttgatgtaagtttaataactaccacatcgaaagcttgtatgcatgcatttaaactaaacggcaatatacgtgaaattatacaatattgaatcagtacagatatcttgaattcttgcatagattaaataaaacaatgccgaaccgacaagaaaaaacgtggcgaaaagattatagttgcgttatctaattataaacttagttttgaatttttccaatacatttttattaatgtttccgatattttagaccttttcttttatcaattataacgactacatctttctcccttttcatgaatcgatgcagaagtagttaatagtgactttagtaaaatagaaaattatcgttgaacagcaaagcaaataaacattaccgatcgagatggaacaacatcttgaggtatctccaaatacgtgcctatgccaagtaagctgaaacaaagtttcccatgttttcctatttcacatgcgtctcatccatatgacaaacattttagtcttcgacagtaaaaaaaaaaataataataataccgaagaggtttcgtagggtaaacatgaaacacgaagtgataattcaaaattgctagacaaaaagaaaaggtttcaatttaacataaacaataaaagtgaatactattgcactgtatgaaaatgaaagcattttttaactggtttatgacttgtataagagagtgaactatcttattcaagtaataaatatactgaagcatctttttcaagtattaaatatagtaaatacttgaacaatatatgtagtgaagatatctaccatggtctcaattacatttaatataaaaaaatgaaatgaagacatatgctagtgaaaaaggaagagaagtattagagcaaaaacgaagtactggtttacaaatgattgtatatatcgacctaggccttgacattcaagtacttgagttgggtccgggtctctccggtaaaagagtccattatccaagtaaattaaaaaattggcttggtttcggtttagattctattaaatttgggttggatcggatataaattttcagaagcactaaatacctgttaaaagaacttacaggtataaattaggatttaagataaaattttggatattcgagtattttttgattcaggatctagttagaacttttagataaagggttttgagatccaataagataaatctaatttttgagttcgaaagggggttaaatttttgggaccatttccgcttccggttaggatactcattccagtttttatgttcaaaccaacaccaatgtgttttgtcgtcagtttcaactaacaataccacttttcaagtggtcttctttgttgaagttaggtagactgcgtctgtaaaggctcattagcccaactataataaataataggtacatattaacagttctttgatctgacctaaaaaaacaaaatttgattgacgaaatagttgttatacacaaccaaaaaaaaaagattgaagaaaaagccaaatttttaggtgcgagtgaatggggaagtatcacagtaatcttgattatttgactttaatattattctaatctttttcgtttcattttattttacttttggtacaatgcaaagagactaaattagattaaaatttagggacaaagagagttcagttaatttctgctggttttttgtttaatgtccaatctaacatgtatactatcagtctatcatgtatttatttagtcatcgtaaataactaaatgtctgaattttataactacatcgcaaatatttggtgtagatgccaatttttcatcaaactactagactgctatgtttgacagtttgagtaactattttcgtaaccaaccctataaacaaaaacaatagttcatggtctaaacccaacattttttgtttacgtaactttttagataattagccaaaagatagatttgaatgtgcataagaaaaatccatgtcttgttcaccgagtctgaatgtgaataagcattacttgtctgcttccacaagtaaagtattaaactacaaaaaacataacaaatctcacaatttccaaataaagttatttaaaaccacgtgtcatgttaagatcatgacgcgaccgtccattcaatcgcggccgtccaatgaaaaaatatctaaagattgtgtggataatatctgccttcttactatgttcccgaacgttcttgaatcttgagacaagatatttttggtaagccgaaatcttctagaacttcttttgtaaaaatctttcttccatataaccgccattggaacacaactcctgttttatataaaccccaaaccacacttacaagtaattatctcttcgtaaagtgtaatgctttaagcttatttacgtaataaccaatg

SEQ ID NO: 5989 - DNA, 3000 bp, Unknown; identical to SEQ ID NO: 5984
  misc_feature (1)..( 3000): cDNA_ID_3079143_gDNA_ID_1620835_Annot_ID_169865 3000 nt of promoter + ATG

SEQ ID NO: 5990 - DNA, 3000 bp, Unknown
  misc_feature (1)..( 3000): cDNA_ID_2039305_gDNA_ID_1620835_Annot_ID_169860 3000 nt of promoter + ATG
aatatttaatatgttaaacaataagatagaattctaagataattgaccacatgtctataaataaatttgataaaatatattcatacatagaaaaatagcatgataccaagaaaaataacgtgtcttacaacactgagaggatacagataaacagtataaatgagatacctacgtaaaaaataacatgttacgaaaaatgatatgtatcgaaatagtcaaatgaaaaaatgaaaagataatcgtccaacatggtcaaaatccacttttatcatatgtgcaaaaaagtaatcaacgagtgataatatgctgatatttgttacaagaattcgaatatgagatatgtgtatattgacatattgtgctggatagataaattatattagggttaactttacaagcatattttccttatgattactaattttcacatatatagattttatatatgactatcagttagtcaaggatttttgtgagaataaggtaaatggagaactgaaagaagataactggggaaaagtttaatgagagggtatggtggtgtcctcgtgtgcgtggctgcattctcgtggcatgccatctcaatgctaataattgaaatccaatatataaaattcatgaatcaacaaaagcaaaattaaagagaaaagtaaacgtgaatagattgagagagagaaggacagatgaaggtgggtgtcggccgaaccacggacaccggtcggagtctcaagacaaaggaaggtttgcgtctggggaccattcacactacctcaatacaacacccatgccaactccaaatccattcttaattctttttattttcagtaaccaaaacataaatctactaatatcatttaatggaactaatttagtttaaagctttttttaatgttgctaatgaaataagcaccttaagtatattctcccattggtgatatgttttcttatcggttggtttgggtaattttcgacacttttggaaaatggacaacccatgttgtcatttccctttagattttcttgatggttatggtgtggctagtttttttttttcttattttcttatttttggtatttaagaagagaattataaaggaaagagaaataagtgtatagtttaaaaggaaaaaaaacaaaggaatgtaaaggcaaatacaagtgtatcccggcattagtttggttttgcgtacttgttgttgtgagcttcatgttctttagcgacttttcgtcacgttatctttggttcccttcacttattttttcaatgtaccatttgataatacatattttttcgttgtttctgaaatgcaacgtataatcttggcgtgattttacatatttttaaagaatacacgatgaacaacaataacatgaaacaaatgtctaagattatactctcccggaggagaacatgcattcacccatcctaatcctatgaaacagttattttacgttttgaccattgactctagagtagcagctgtattaaaatctggtacaaagagatttcacgacacattttaatgcatggcatcagatggatgccatttatgtcgcatacgctacccaaatatgcacaccatcaattaggctacatagggccataggatcgcatgcccaacaaggtcagacaaaccaacatcaaagtctacgtactaactttgcagcagcaggcgaatccaacccaaagaccaacaagtatcaagatccaaatcatgtaacctctataaacatctccttaaggaaagcaaatcttgcagttcttcaacaataacggccagtttaagctaaaacaatgaaaccatgagagtgctcactattcgagatgaactatacaagaattaatgtctcgatgttaatagtatattatctacgatcacaagtaagaaagctaacttgaataaagcaaggattcatccgcgtttgcttagaagtcttatctcgagttctagcctcattcccatcgttttgcctttaccttctcaaatgcattcatcttgttgatcctgaaaaactatatccttcagatacgaaaatgaacaacaaaggtttttgctttaatgcttaaaacctaatttatgtttgccatgtccttggtcatttccttttctctccatttgccatcctctccaatcaccttcttcaaatcttttaggctcctaaaaccatcaacgttgatgcatgatgataataaaggcaaactcaaatatcgcaaatttgcaactgatattagcacacatttttgcagtacatagactatatttgtattaattactctctattcccaaatttgttacacaatctctttcgattcttccaaaatttgttctgctttgacttctttttatttttttgataaacatgtgaagattcataccaattttaaagtttctacagagtacagagattcaacgaaaaaagcagaaagcagaaatctacaatctgctttgaccagctttgctttcataatttttactgtacagagaataataaccaacctaaatcagaattcaatatttcctctaccaacaaaaaagataaaccctgaaacgttttgtaagagaatcacgtgagagaccacgtgaccatttttttccctaagcatcgttaatcttaatgggctcaagaaaagtttcttaattggatcttattataatactgttgagtgagccttagtccattattatgacgtggcataaccctgccactttcagggtatcgatccacatctgccgttaaaacagtaaaccgccgtctaaactttatagcaaagaatctggaccgttgataaacccctaaataaacgggaggactgataacggagaacgtgagcatcctctgacaagaaaaagacaaaaaaagaagaagaaaaaaagcacatgacatgattctttcaccaccctttcgtcttccactctcatcaatctagattctcttctctcttctctatattccaaagcttttacatttcttcaaatcttattttccttgagatcaatt

SEQ ID NO: 5991 - DNA, 3000 bp, Unknown; identical to SEQ ID NO: 5983
  misc_feature (1)..( 3000): cDNA_ID_1989705_gDNA_ID_1620835_Annot_ID_169857 3000 nt of promoter + ATG

SEQ ID NO: 5992 - DNA, 3000 bp, Unknown
  misc_feature (1)..( 3000): cDNA_ID_2992212_gDNA_ID_1620835_Annot_ID_169853 3000 nt of promoter + ATG
tcaactgctcatgactaacaaatccatctacacatctccaaagtgtacaaaattttgtccatttcaaacatattttaatagtttttaccatctatactcaaattttacaattccatggcaaccatttacaactagtataaaccgtgggtctgtaagaataaggccaccacaaaatgttaatacgcaagacatcttcggattcagaccattttccattcgttatttaaaaaactaatgtatcagttaagtaagagtaaaaataggcagtatagtacaattggaccattagtcttttaaaatccactaaaatttaccatttgtagtaaacagtacacgtattaaaataagtttaccgccgcagctgataataaaaagagaggaaacaaaagaggatggaaaaaaagaagtgagaaatggatgtgaaaaaaaaagtttgcacataatcaaagtttgactttattcatatcatccatattttattatctaacttattttttataaatttgtcgtcattgatcactttatcttgcattttcttctacatgtttaacattttttttgttcaaacatgtttaacatttaaaactagttaatatgaaggaaataaacggattgagtgagtgatcagggttaatattatttgttataaaggacacatatggagaagagaaagaaatggtcaggcctcagggctgtgagtctgtaacactgtccatcttctttattgctcccatctgcctctcttctctaccttttccttctttattatatatattcctcacttttctccatcttcttaaatataggcattcccgtcaataaatgtgtataatctcgattagtgattcatttccgggttttaaacattggtaagatgttttttgcaaatccactacgaggaaaacatccaaccgaagtctaaatgaccaagtaatctatgggttgtgtttttgcacttgcacacaatgaaatcgaacatggttccgtagcaccttcagactttgaaaaatataaagaactacgtaattcaatagattgtctcaataatatagcaagacaaaatcggccgacaaacaaaataaagaagaaaacataggggaaacttgaatttcaaccaaggaagacccaaccacgtcagaaacaccttgggaatagtgtaactagatttaaatatttgtgcattacttcttactataccatcaacactcttataaatgtattaccacgacacataacggtcttaattatgatgcaccttttttagcactcccaaagattctctagctataagtatcggtcgaaagtattcattaatgcactatttgttttacctaagtttgaattcatttcataagaatgtgtgttcttaattaattttggcacactggtcgctcactagctattttcttctttgggcatagcatttagccttttagtatatatagaaactagttaatgttaagaaatggtgtttgatcattaatgatttagcaataacttgtatttataaccaaaaatgacaatttgtattctaagattttgtctttatctttttcagcaatgtatttgttttatctcatgtatatatatttttttgtgtgcacttgtgttctcttttgtgttttctcacattcttgtgtggatttttatttttttatttttgtgtggatttttttatattaacattccaattaaatttgattttctaagcagttctttttttttgggttaattttctagctacttaatcaattatcaaacattcttgataaattttaaaaacaaatctttgtttatgtacatgtatattaacttctcttttttactcgtgttggtatgaagagaaaacgatgtatgtaatgtgtacacggacaaaaactatagatcaagacatagcctataatgatttatgctagtgttgttgatgtgtcactatttaaaatttaaatcatgtgatatgtatatgtaggttcaaatttgaaagatatgtgacctaatcaatgtgagcatgtgatccaaacaaatgattagtacaactaatatttttcattttttggacaaactatataatttattttatgcatgatcaattttttgtatatatatttgcaactaccatagacatgtgaatccgaccacaattgttatcagacaggtcatgtatcacattggtgacagaaacaagactaagcccgtaaggtagcaacattgggctcaaccaaattcggcccatgaatttagactagagaaacagaaccggattaaaccggggattcggtacgaggagaaacagccgactgttgtagaaagaatatgccaaaagagtcaaagattcgtgactcatcatctctgtcgctgttccttttcttcttcttcttctcctttttttccaaacttttctctctgttacttacttccattattttcgagcttattcttatcttcatcgcttaaggttcgaattttcgaattcgatctctttttgtagctataccaatcacaaggtccgttctctactcaaatctcgcatattccttatgtcatcactgagctaaatcttttctgtattatgattcaatcgtgtctatgctttgtctctgtttctccggtaacctaattcgttgcaaaattaataattagatagaattcgaatctattgcatgcttaccagatcaattttggataaattgaatccagtaatttacgaaactcttggaacaattagtgttaatcctatgaattcttgttgttttaaacagttagagcaaatctaattatagatgacaggatcttaaaacgacttgtacctaatttctcaatctggcaaaacttaatttattagttagttgattagtgttttttttgtttccaaaattgcaatttattgttaatggtgaatgtttttattttcttgtggtgattgtagcagtagctgaaatcaatagtattaagccaggctagctagaccagcaagtaaatttgctggctagcaggatcctc

SEQ ID NO: 5993 - DNA, 3000 bp, Unknown; identical to SEQ ID NO: 5982
  misc_feature (1)..( 3000): cDNA_ID_1572397_gDNA_ID_1620835_Annot_ID_169849 3000 nt of promoter + ATG

SEQ ID NO: 5994 - DNA, 3000 bp, Unknown
  misc_feature (1)..( 3000): cDNA_ID_3079158_gDNA_ID_1620835_Annot_ID_169848 3000 nt of promoter + ATG
ttttggaatgcaagtttgtttgttgtcttgtgggtaaaaataagatttattgactcgtaaaaagtttctgatgggtcttcggatccttctaagatctggcactattctttcctctaaaaggcaaaagcttttacaagaattctctttttctctctctttctctctttgtctcggaagtcgtaagcaaaaaaagagtgtgtgtggtctgtagaagaaagtacggcaggaggtattaataacggctgtcacctctttgagtttattcgagggaagagtcttcgaaagcactctcttctctttaccattctatctcactttttgtttactaattacgaatttggacgtactaataattgtaattagggtttttcttggtaatgacgatgagttgtttatgtttgatggtgaaacacattggccaatgttcttttgaggcattgactttgtaggtttagacagctcactgtgcttaaaataaaataaatgttagcaccctacttttctttttttgtcaattattacggtcaaagtagatgagattgggacgttatagccaatttttttatttttatttttgtgaataccatttaatcccccggttatattagtatattactgttacacttactgtattcagtttcaaaatgatacaacaggtgatgtcttgactctttgaccaaaaaaaaaaaaaagtgctgctatctgattccaggacttttatataaactgataacatcatatgatttttagcgtagcagaaattatttgtgaatgacaaactcagattctaacatcacggtcgatcttaacgatatcttgtttcattcaaccatgattaatagcttatgaaacaatacttcaaatatcacaaaaggaaaccaatattagttatcaatttttgtttttggaaaagtaagcaatggtctctacagctctaaaaacagttattgtgtatgttttcaacagaattgttcatcaaatcttgaagagttttataactataaagtctataatctactctcattcccacgaggcccactacaatcgtgccttgattcctcctctaccactttcggtgggctttaatctattgggctaaaactatcatcttggattcaattatatttttcttgtggggtttaatactagagtgtactaattgtaaaaacattggtaactcttgctcatttacatcagaaaacctcttattctcacgaaattttcaacacacgacaaagaaattttgataagctgaggagatatttggtaacgcctcacgcaaatgaacccatgtgaataaatatgatcgatcaataatatcatatcatcaagataagacgcagataattgtaaacatgatttattatgaatttatgataaggtcccgaaactattcatgatattattttaacgatcaaaaatggttctatcatttaatactttctcactcattcttctacaaatagaggctaaataactcaaaaagaaaacacactcatctcctaaattccttacataatattttcttaagataagcaaaaaaatcatggcagaagcgtctagtttggtggggaaacttgagacagaagtggagatcaaagcttcggccaaaaagttccatcacatgtttaccgagagaccacaccatgtctccaaagcaactccagataaaattcatggatgtgagctgcacgaaggcgactggggcaaagtcggctctatcgtcatctggaaatacgttcatggcaagtacatcctatatatattttcctttgcataactagtggattcatgttgattcgtaaatttaaacctagggaagtaaaatgttgaacaaatggtgcagatggaaagttaacagtggggaagaataagatcgaggcggtggatccggagaagaacctgatcacgttcaaggttttagaaggtgatctgatgaatgagtacaagagcttcgcatttacactccaagtgacccctaagcaaggggagtcagggagtattgcgcactggcacctggagtatgagaaaattagcgaggaggtagctcatcccgaaacccttctccaattctgtgtcgagatctccaaagagatcgacgaacatctcttggccgaggaatagaaaaatactcctcgtctgtgtgtgggtctttgaaacttaagcaagtctttgaaactgcaataaataatgaacgggtccgtctttatgtaagagaaaagagatatatatatatgtgttggtgtgtgtaatgcgtgtatgcctactactacggttgagttatgttggaatagtaaaagcatataatctattttggttcaagtgtttgactcgtagtgaacttgagaaaaactctttgttcaaaggctatacaaactataaaaactagcgatccaaagttttatttttctatttttggttcaaatactattttgtgctgacatttttccgacaaccatatctcgatcttatattgtattttcatctattaccgctttttattattattaatttgtgttattttgaagagaaacttgatagtgaaagaaacaacatgaattgtgtgatcgatcaataatatccatatagtttggcaggttaaacgtcaaataaagtattgggtaggtgaattataataacgggaccgtgatgacatggtgctactaattaaagctaatcatgatccttaccaaaaaaaaaaaataaagctaatcatgatatgattttaagaaacaaaaaatcgatatattctttaacaccttttttttgggtaaaattattcttcaatactttctcactcattcctcttcaaattgaggctaaagaactcaagaagagaaacactctcctccccttaaatcctttacttatattttcttgagataaagcaaaaatcatggccgaagcgtcttagtttagtggggaagcttgagacagaagttgagatcaaagcttcggctggaaagttccatcacatgttcgtcgagagaccacaccatg

SEQ ID NO: 5995 - DNA, 3000 bp, Unknown
  misc_feature (1)..( 3000): cDNA_ID_3079161_gDNA_ID_1620835_Annot_ID_169843 3000 nt of promoter + ATG
taaaacctcacacttaatatataagaaaatcatatttacataatgttcttgtttttattaacaattcagaacatatatacatacataaaattaattttaaaaataaaaatttctattgtcccttttgtaccgtcccaattcttatccggaattgcacaaagaaacagaccatttttgcaagagacacggccagataaaacgatctttttcaaattgtggtgtggcaagtcctcaacgggagaaaacaaaaacagataaacatatgtttattatatcatttaaaattatgaaataacgtgtattccatttacaaaagatatgatctcatagagttgacaaaaaagctatacgatctttttggatgatttagaaatataaaatactgaatagtacatgaatcagttggcttatgaaatactgatactccttcaaaatcttttgtatgacacgagctacggactataatttatatggctatatatagccttagttttgacatttctttaaaaaatatcaaacaattaattctgctttatcatcagttagcggcagatggttaatgtgatcacataggagaatgacttgatcaaaatattattatcaattagccataaaataaaattcagtcttgttctcgctctattcattcctctcttaaaaggagctaaagaaatcagaaggaaccaatttactatttactctcagaacgcaaaaccctacgagacacagaacttagtgggagatcaagaatggcggaggaagtatctactttggttgggatccttgagacaaccgtagacctaaaatcttcgacagaaaagtttcatgacatgtttgttgggaggccacacaatatctccgatgtatctccatccaactttcaaggctgtgagctgcatgaaggcgaaatgggacaagttggtgctatcctcttttggaattacgttcatggcaagtcaaattcatttttctctatttatataaatttttataagattcatcgattttcaaatcaaaataaataggaaacgggtggattaactcatatgttttatatattactttagatcctctcatcttatttcaatgtgtgatttctaatactctcatacctataaatatacatcaacgttatattgatcagatggggaggcaaaagtagtgaaatagaggattgagtcaatagatccggagaacaatcgggccacatatagggtgttagagggtgacctaatgaaagagtacaagagcttcttgatcaccttccaggtgacccctaaggaaggagaacctggaagtgttgcacattggcactttgagtatgagaaaatcaacgaggaggtggctcaccctgaaactctcctccagtttgcaatcaaagtttccaaagagatcgatgaacatctcttttcagaggaatagaggaagagtcctcatgtatctatacatgtgtgtgtgtgtgtgtgtgtgtgctctttatagttcagtctttgaaagtgcaataaataaagactaaagagccttgaattgatgaagaaagattatgagtgtgtcatgagtgtttgtttactatcgtgaaagttgttagttttgaaaagtgacgaaataactcaaaatttatgctaagatttatggacgttcaatccaaaatcatcaattgacaatgaatgaatcaatattccaaaatcaaagagaacttacatatgtattagaaaacatgtgtttttactttttaacaagacaatatatataggccttgtctttcagccgcaaatatttaagaacccaatttttatctcattgtatagagattaattttattttacatctttaaattgacaagatctaattcataactaattcttactatatggaataacgggagttagtggagtcgaactccagtaaaaaagacagagtcaaatggactataccgtatttcatgtatgttagttattaataacactaaaaagcaggtgagatatgatttgataaataagcatcgtcttcaatttctgccttcatatatttaagaaccatttcgtatcatattgtattgagagattcaatgaagcatttataccaagataagaaaaagatatgtaacttgtacgatttagctcgcttggcctccaaaaaggaagaaaagtcagcacaaattatggctcaaataaagattttgtcaactaaataatgcgaataaaagattctctcaagattattaatcatcattgtattaaccaaagggccaaggccatgtgattattatactgtaataatcaaagtagaagactataggcataatgatgaaaatcaaagtgttaagtgataaatcaggttttgagttgtttttgacgacaggtttagttgttttaactattcatttttatttctaatatttttagatactattgcatgttttaatattttcatatcaatatatatatatatatatatatatatatagatatatcatatttgatgaaaaaagaaaaaaaaagatatatcatatttagcgtgaaacactatatattctttactgtcattttatctttttcttatttcaatcgttttgtaacgttgcatttaaggttgaaatggtaacattaggtgataaaaaagaggaaatggtaacaataattatatgtttaagtacaatagaaatgtatgtcagcaacaacctactaccacttaacaaaatcatatatacaagcagagacttagaaacagggaaaacgaaagttacaacgtacgtcgtgtatcataattcaaataattaaaagattagataattttatgaacaattcaaataattctacggctgagtcataatgatgggatcggaatcacatgaaacacaactaatcataaaattagtttaatgaataaaattcttaatgtcttcaacagttgctcaaccattccactacaaatagaggctaaagaactaagtagagtattcactcctctctcaaaaccctaactgtttccaagataatg

SEQ ID NO: 5996 - DNA, 3000 bp, Unknown
  misc_feature (1)..( 3000): cDNA_ID_4370980_gDNA_ID_1620835_Annot_ID_169841 3000 nt of promoter + ATG
agtttagaatcaatacattgcaaaaatttgttacaagatcgttaatctaaccaacgttggaatatgagttacatccaaactagagcagaaattggtttgggctgtacaaacctttaattatcttcatcaagaggtttcttcatttttttttaataattaagttgtttaaccttatatgatttaattgctacatttatagatacagttgcatgttacaaaatatttatataccatttttcagttttttttacggattttatacacatataatggaaaagaaaaagagaaataccctaaaatagcatcaaaacaagttttgtggacaatttatacacacactttacacattgccaataataacattaattgttgatacaatgatgaatctagttcataaattgttttaagacatattatttaggaagcttttcaacaattaagtaagacaaccctaaatattttcaacaattaagtaagaatttcctaaggatattttaatcttttaacactaaatttgtgctattttggaacattccaaaatgtgtgttatttgtgaaacaaaacttatttttgtgctatttgtgaaaattgccaaaaaagaaatccatatattgattctaatcatatttatccattaactttttttggttgaagcatgtttatccaataacatagttaatgactgttatatttgttttgcatagaactgtacgtgccttcatgaacgaacgacatgaaccgcgtaacatgcatgttttcttaaagatcaacaacactacatgccaataacaaatatgtcaaaacgagaatttgcagaaggaacgtacaacctaaaccgcgttatactgaatgatctctagatcatttatatgatcaaaacctaattcaaccgttatccattacaaaaattcagtaggtgagacaaaaagatagagtcatgatatcagaagggatacaaaattgcaattaataatgatttgttttcttcttcagccgttacctccctcaatcctctacaaaaagaggctaaagaactcaaaagggactcattttctctcaaaatccttttaattttcaagttaaacaaagagaagaaaaaaatggcgactaaaatggccggggcagcaatgaatttagcaaagagagagtcgtcaagtttgtgtgggaagctagagacagatattgaaatcaaagcttcagctgggaagttccatcacatgtttgctgggagaccacaccatgtctccaaagcaactccagggaaaattcagggttgtgagctgcatgaaggtgactggggcaaagtcggctctatcgtcttctggaattatgttcatggcaagtgcaaagttatattaacttttatcggaaaaaaaagttctaatatctacatagaatatgttcttaaacttaatatttttatcaatgaaaaaagtgagcagaaatgcatacttgatgtgaacttctggccaagggcacatctcagtgtcataaatccttggctccccatttcattacaaaaaacatttattcgattcttacaatcaaatccacagatatgtaatgacaaaagtatagattaattaaattttatgtttataacatttttgtgaattaatattcataccgattttttagtcaaacccaaacaaatatatttggtgcagatggagaggcaaaggtggcaaaagaaaggatcgaggcagtggagccggagaaaaacctgatcacttttagggtgatagagggagacttattaaaagagtataaaagctttgtgatcacaatccaagtgacccctaagagaggaggacctgggagtgtggtgcactggcacgtcgagtatgagaaaattgacgacaaagtggcccaccctgagacctttcttgatttctgtgtggaagtctccaaagagatcgatgaacatctcctgaacgaggaatagagagtactctttaattgagtatctatcatatgtgtatatgtatgttatgaagcacgcatgttcttgtgtatgatacaataaacaaggagagttgcccaatatatgtgagtgatacataaaagctttgtactctaaatgtgagtatgtcatgtttggttttaataaaagcttgtgagatatgtttgtggaaggctcgtctctctgatatcatgaatgttgaatgttggaatcatccatttctgatatcatgaatgttggaatcatccatttctttgcttccttgtttgagtcttttgttgtattagcgagttctgggggcttcatgtaacaaattcgaaaaacgcgttattctcgttaataaagcatactaatatggaaaacaaagttagaatcaatatttaattagccaaattagacgtaaaaagaccaaaagaacgtaactattgatgcacacacatgtttagcgtattcagatatgagtgtttgtagttgtcactgaaaattgtatcgatcttacctattttctctcaagataaacgtgtgataatgtgttattcaagttttcaatcgagaatccattgattttaaagagaaagattttacaattttcaaaagttatacgagtgttgggaagagtgttgtctaccgacatactcatatcacaccattttcaacacctagtctaccaaaaacaaaagtgagcatgaaggccaaaatgatctaaaatggcattttgttactctcattattattttcccaattattagactctatctataaataaatatttttctatatccgcagaaataatggtataagaacgatcgatataagtaaggaggtatagctccagggtaaattccagttggactatggacgcggtcacatgaaagaagaaaaaatgagagattttgttattagttcttttgtaattaaagttgtgaattgtagacaacattgatctaattcgattgtttatataagcgtaaaaaaaatataactatgcgtgcataatgacggtgtgcttcaaagaaaataatatttaacgaacaatg

SEQ ID NO: 5997 - DNA, 3000 bp, Unknown
  misc_feature (1)..( 3000): cDNA_ID_1989708_gDNA_ID_1620835_Annot_ID_169839 3000 nt of promoter + ATG
agaccttttgaattcacctttccttttcttttttgtttctttcttttaataagctgatttaagtagcatcgttgaatttgagtcggtgattgtttgtaagtgaataagaaaagtagtagagtcaggagacaggtgtgctttctcttcaaagctcagaagcaagatggagaaaacagaggaagaggttgagatgaaggaactggtagggcttgtgagaatcctagtgaagagagggatcgatcttgctcgtcgagacgctctaagcagcgacccttttgtcgtcataaccatgggtccacaggtactttttctctctttctgattctaatctgatttggttctcttctgtttgatgtttctatttctgttcttgagatgtatggtttctctgtttactttcttcgcagatggaagaccaaagaatcgacctttaagaaacatgattaataatcatttaaaaagattttacatttcatgctacaaaatgaaaacaatctatagctataggatgttgtgttgcattcgttctaactgaaattggttgtatctttgaattgcaccagaagctgaaatcttttactgtgaagaataactgcaacccagagtggaacgaagagttgactcttgcgatcgaagatcccaatgaacctgtgaagctggtgagtactagtacccgtcagtaactaccggaatcatgaattttcaactcaaaaccaactgatgataagtggttggttccatatgtttttgtttcgtatgagtgcagatggtgtatgataaagatacatttacagcggacgacaagatgggagatgcgcagatagatatgaaaccgttcctagacgttcacaaactcggtttgaaagaacttccacatggaaaagagctcaagagaattgtgcccaccagagataactgcttgtctgaagatagcataatcgtctccgataatggcaagatcgttcaggacatgattcttctgttgaagaatgtcgaatgcggcaaggtcgagatccagcttgaatggcttaaaaatccaggtggtagtggactctgaaaaaacagagatgaagtagctttatgattttctgtgtgtaataaaaaaaatctcagttaataaaatagaacagagtactactactctgttttgtaatggaaatatatttggttttagatctaaccgaaaccgttttggtttcccgcgagttttctcttcatcacaaaaaagaaaaagtgatatttatgttttatattggtttggtaaacatgttcttggaaaagtcaacggcttaaaccttttgtccatagtcagaaaaaaagaagaatcaagaagatattattaccaaagatgttcgtgagagtaacgcgtagatgagaataatatagaaacaaacacctggaaaacgaaacctattatatagatggtctttattttttgtttctttattcgctctatcgtccattgataagccaatttttaagtggtcctcgttgaatttgagccggtcattgtttagaattaaaaaaaaagaaggtaaaagagtcagagccgcctagagaaatcgatcacaaattcagaagaaaagaacagagaaaacagaggaagaggtgagatggaggaacttgtagggcttctgagaatccgagtgaagagagggatcaatcttgctcagcgagacactctaagcagcgacccttttgttgtcataaccatgggatcacaggtcttttctctctctatctctgtctttgattctaatctgatttggtctttgtggatttcttctgtttttgagacatatatctctttttatcaaaatattgtcctccaagaagcatgataaatttcaattaagtatggaaaaataagagagtttaaacaacagagaaatgaaatcaatagataggtttagtatatgattttgatttttgatatagagaaaatcgtctttcgatattaggatgttcatatcttgcatgcactctaatagaattctttaaaatgcaccagaagctgaagactcgtgttgtggaaaataactgcaaccctgagtggaacgaggaattaacccttgcgttaagacatcccgatgaacctgtgaatctggtgagtacttctatctgtctatttttttattactggctctaataggaatcatgaatttccaactcaaaaacaattgacaattagtagcgtttttttacagatagtgtatgataaagatacattcacatcgcacgacaagatgggagatgcaaagatagatattaaaccatttctggaggttcacaaaatgggtttgcaagaacttccagatggaacagagatcaagagagttgtgcccaacagagaaaactgtttggctgaagcgagcagtatcgtctccaataatggcaaaatcgttcagaacatgattcttctgttgaggaatgtcgaatgcggtgaggtcgagattcagcttgaatggattgatattccaggttctagagggctttgaacatatctctttctgtgtgtaataaaaaaaaaactcagttcgttttgggtttttagacaaaagtcacaataagtagaacagagtactactctgttttgtaattgaaatatttggttttagcacctaacctaaatcgttttggtttcccgcgagtttttttattctgttgtttgtttgcagatgaaaaaaaaacgtggagaagaaaaaaacaaaaacgatctaataagcttggaagtttgcttgcagatattttttttttgaaaatttttgtggttaaacatgtgaaaatgcagagatattcaaacgtaaggttatggttacatctagtaacgaatcttatccatctccaaatcccaaatttgaaaaacacttccaagggaaaaatcgcggatacatacaagattgcaaatatctaagcttggaattatatttgttttctttctttggatctctgctttcaagtctgaaacttgaactctgtttctaatttacttcaaaagct

SEQ ID NO: 5998 - DNA, 3000 bp, Unknown; identical to SEQ ID NO: 5980
  misc_feature (1)..( 3000): cDNA_ID_1389239_gDNA_ID_1620835_Annot_ID_169838 3000 nt of promoter + ATG

SEQ ID NO: 5999 - DNA, 3000 bp, Unknown
  misc_feature (1)..( 3000): cDNA_ID_1456167_gDNA_ID_1620835_Annot_ID_169836 3000 nt of promoter + ATG
atatttcttagatagatatacgcaacatttatcatggttatcgacaactttagtttgatttttggcatatacctaaaattttgtaattttctaaggacttggttctaattaagaggctcgtccgctaggcgctaagcatgtttcatgtatgttcttcattgtcttttattaacttttcgaagcgttgaaattcacttctttaacatgaattggggatttaattttggagttaggtggatttaagtcatagaaagaagaaaacctgtcattaatgtgaacgaaaaaatgtaacatctataaaaaattgatttgtataaattggtttgtaagtctctaaagatgaaattgagtcaaatcctttttttagctaatcgaatttaataaattgacaaacgcgttaagtactagagaaacaaaataaacatgattagctagcaacggcggaatataaactctataaagatcacgaatcctttcgcatcgatatcttaattgccgtatgaacagtataattaatcttctcataatatggttattatactaataaattatatgtatagccttgtaggtaaatggaattattatggaaacagaatcaggtgcagagaaccataatgggccatgatcttgaatggtgcagagccaattcaaaatcatattatgactaaagacagagagcacatgactcacggataggaccagaagtatagagaggtcgtaattcagtttaagagaagacagctatcgatctcatttcatatgcattatgatctctggtacatctctatatatatcacctaacttcgtcttatcatatcagctcctcctccatgtcttatcctgagtcgcccattgtgtcacaaaccggttaacctaattgtatgattgatcgtgtttgcaaccatttataccctaaatgttgattacctcgttaataatatgccgtagattttattaatatgtatatgtgtgtaccaaattacaacgctaaatgaattttaaatccttggcagaaaaacagttcacaattttatatcctttgttaaatttaggttgtcgtgtccacattgtatgatctactcataagctcatagcatcgagtcattgacatcaactcattgttctggataatacaattgattatacatgtgtcacacctgatgataacttttagaatttttaaacgtgattttatacggacatctagatttgtttggatttcaatttaaattgttttttttggtttatatatttagttatttacatgttggttagtgttttattttatgtaagatattttcttacaatatctgtatatctatccacatctaatacatttagattttaaaatatcacatacggttaggatttgtattccctcagtcaaagacaaaggagtgggcatatagtatttataccctataagtaataacaggtcatttaaaaatttgaatagcttattccaaattaatttcatccatagaaaaaaacctaattaatgtgacagctgagctgaccatatattgttttttttggcacaaccattgtgtttatataaatcttatgattttatttcaaacgtacgataaggatttaggaaacgaacaaataaaatgggaaacggctcctctttaattattgaccagccattctgtgtctgttcaattagcgactagccagattcccaaatttcctcattgtccattgatttcaattatacgccaactcttctagattcagaggtaggtccatgaacttcaacatgacacacgttattttacttatctcagtctatatcgtaccaattgctccatattatacaatatcttataactctaaatgtcagtcgcatctaagattcgccactagttattatcaattcacccaactagaatcctcagttttcagtcgttctcaaaaaagtataaaaggattttttctattaaaaaatgtatatatatatatatatatatataaaacatgatagaaaatagaaaatttaccgaataaaaaattaaaactaattcagccgtgacaaaatacctaaaaaattatcggttttgtttattactcattctattgatcaaatactcaattttatatacaattattagatttttgctacggaacttagcgtgataaaactaaaatttcaaaatttaagataatcaaatggaatgtttagcccatatgtcacggttttaacaaattttgtttggttatgtatgttaacacatctatgagtttaattatatgtcaaataaatagtagaagtcaaatgattgaatactaaaaatattttcactgaacatgtttctatgaaataactgaattttctaattatattcatatatattaatttaactacttttaattatgtcaaaacctaaaaatttgataaatactttaaatgataaaacaagacattcatattaattaaacgtgaaaattgtataccatatatagtattcacaatatataatataattactttttgtgctttgcttaagatgcagtaaatcgatttgattagtctctaaagaataaatcttttatttggtcagtttgggtctaagcaataattactggtattaactttaaaattataagagtctagggactaaaaaagaaactaaagatatcggcgacatgaatgatgaatgagaaacagagaactctaaagaaagtaaaggagcagcgatgaaatcggttgtccgcaaacaacggatagatctgtcgatgtttgtttttggaactccgcgttgaatcagcgtcgatgtttctcgtaagtttgcataatccaaaaactcgttttcgaattataaatttcatcaaatccccgcttattttgggtaaattcaggcaaaaagggtttttgtgttcttcgatattatctcttattactattaggctattatcatcgccttattggggaaaaagcttcaaacttttatataaagtctcttcctttttctttctttctcggtggaatttgcagca

SEQ ID NO: 6000 - DNA, 3000 bp, Unknown
  misc_feature (1)..( 3000): cDNA_ID_1024639_gDNA_ID_1620835_Annot_ID_169834 3000 nt of promoter + ATG
tataaaccaaaaaaaacaatttaaattgaaatccaaacaaatctagatgtccgtataaaatcacgtttaaaaattctaaaagttatcatcaggtgtgacacatgtataatcaattgtattatccagaacaatgagttgatgtcaatgactcgatgctatgagcttatgagtagatcatacaatgtggacacgacaacctaaatttaacaaaggatataaaattgtgaactgtttttctgccaaggatttaaaattcatttagcgttgtaatttggtacacacatatacatattaataaaatctacggcatattattaacgaggtaatcaacatttagggtataaatggttgcaaacacgatcaatcatacaattaggttaaccggtttgtgacacaatgggcgactcaggataagacatggaggaggagctgatatgataagacgaagttaggtgatatatatagagatgtaccagagatcataatgcatatgaaatgagatcgatagctgtcttctcttaaactgaattacgacctctctatacttctggtcctatccgtgagtcatgtgctctctgtctttagtcataatatgattttgaattggctctgcaccattcaagatcatggcccattatggttctctgcacctgattctgtttccataataattccatttacctacaaggctatacatataatttattagtataataaccatattatgagaagattaattatactgttcatacggcaattaagatatcgatgcgaaaggattcgtgatctttatagagtttatattccgccgttgctagctaatcatgtttattttgtttctctagtacttaacgcgtttgtcaatttattaaattcgattagctaaaaaaaggatttgactcaatttcatctttagagacttacaaaccaatttatacaaatcaattttttatagatgttacattttttcgttcacattaatgacaggttttcttctttctatgacttaaatccacctaactccaaaattaaatccccaattcatgttaaagaagtgaatttcaacgcttcgaaaagttaataaaagacaatgaagaacatacatgaaacatgcttagcgcctagcggacgagcctcttaattagaaccaagtccttagaaaattacaaaattttaggtatatgccaaaaatcaaactaaagttgtcgataaccatgataaatgttgcgtatatctatctaagaaatatcacgcctaaaagataaattttggtacaactctcctcaacgttcatttttttaatactctgaaataccacaactatattccatatagatgaggtttgaggtttctaagacttttaaaacttaaagtcctagaattaaagaaacgtgtaacctttcaagtttaatatgggggaggtttggatcggcggaagctaaaaacagcaaggatcaggacaacaatggcctaacgaatgacacgtgatgctcttttcatgttgctcaacttcgatagcgaccgtttttctatttttatcactttcatattttacccccaagaaaaacaaaaacaagcgagtccgatatgtttaagagtcccaacctaaaatctattttcatcaccttccctatatagcccgcacaccgcacacaactaatacctcaaaatattaatttgtttgtgtttgcgcttgtttttatgttcttaacatcagggtaaaatgtatcttatgtgattagttttagtgggatactctacatagcattcacatgtctattagtttaaatacgtgtatgtcaatctaatgatacaattcagttcgcatgacttgcaaaacataaacgtaaaaagcaacacatatgaaccacttaccacaattttcgctacaactttttccaccatattagcaaaaaaaacaagggcgaataacattcatttggtataatccataacgatcaaattatcgattatcatcactacatttagctagagattttctagcctttctatttgccaaaccttttaatccattcttccttttaaaaaaaaaattatttatttcttttcaatttttatgaaaaccgtatctttaactaattgttatccttgctaatacatgcatcaacattttcttaaagtttttggtaaaattaacacataagaaataagaaatagttttcttctttaaactcgtccttatcacaaattttagattgtatgatattaaattcgatcttatcttaaatactttaaataacgttttatttactcttctcatattacaaatttactacactgttgcttttctatgttttacaattatatttaggagatcttttgttgtattatcaatactcttagatattcatttatgtagttaaaatttattaagattacttagattttattgagctttgaaatatattttaaaaaaaaacttttaattacacgttggtaaaaaaaaaagacacgtatgcaaaagcaccaaaaaaggtaaaaccggaaaaattctcaaatttcaaaattacccaaaaaagcctttaacctaaccaccttactttataaacaacctcaccgtctctcttagctcaccaacaatcacattcttctcccataagaaaaaaaaaataatcaaatcctcctcctctgcttcaccaccaaaaagcatattcttctctcgtcttctccggttaatcaaaatctctccgtgtgaatcgtttgtgaatggtggaaactaatccgatcggtggtaagtttacgctctccctttccatcaaaagggcgagcttttctcttcctctctcgacatcctctgttttcgctttcggatcttgcaaagaaggctggtactttcgctgccttggcctcgacccgtgaacgattcgcccctaaaattcacaacccggaaccctaatttcctaaaaagtggttctttttttattgattctgttacttgtgagatttgctctgttttttgttctctcgatttcgaagatg

SEQ ID NO: 6001 - DNA, 3000 bp, Unknown; identical to SEQ ID NO: 5979
  misc_feature (1)..( 3000): cDNA_ID_1989710_gDNA_ID_1620835_Annot_ID_169831 3000 nt of promoter + ATG

SEQ ID NO: 6002 - DNA, 3000 bp, Unknown
  misc_feature (1)..( 3000): cDNA_ID_4262201_gDNA_ID_1620835_Annot_ID_169830 3000 nt of promoter + ATG
gagtttttaaatagatggactaatatctaactttttttataattaaaacttttatatttaaaaggtttttctattaataatttaactaagggtttttaaagtaaattggccaattcgtgaaggatatttcatttaaatccccaaaaattcatattcattatgctgtcgtacaatgaattgaaaatcgattaataagaaggtgggtaacaaaatttcctttagtttccttttatttaagaacaccactttacttctttcattattttgaccaagtttaactaggcccgtaaggagaaccataaagagaggacaagaccttgttacagcttacaaccaaaataaaggagaccacagttaaaaataaaagaggtttaaaaacacttctactaaaaaacatggttgataaaaaagttggcggtatccaattttgaaagtatgcaactaactatgcatcattcataaacaattacatatgtaacgtgtgtagtgtagacaaggtaatcgatattcgaaatgagcaaataaataaagaaattgtgattaaaaaatttttaagagttaatggaccagtctaacattatgtgccacttcatttttatatttcacatcaaaaccgaattcattttaattaattagaccgtgtccatttttataaaatattgacgggacatttcaacattgtgtatgaatgttataatattattattctcttcgttagccgaatggttcacattgacatcatagggacatacaaatattgactttttcgaagacacattacaatatatgtcgttttttgaacctcgtggccttgtcaacttataatttgcgtgtttgcgaagagataatcatcaccaaatgtatgttaaacatgtaagtaattaatattcaaaggggccagtatatcccacttaaacttatactatgtcagaaaattaattaatattattgaaggtattaaccatatcaaatattcgatcactataccatagagagatattggaaacttgtgatttcgattatttgttttagcaacaaaataatttctgtgaatgaaaagggccatgtggtgttggccgtggctcatacaaagtttaatgacaggtcactcccacctcactgttttgcctaataatttactacttaattatagtatagaatctttccgaatttttgtttgatttggagtttacatattcatcgtagttttaagatttctaaggtataaatattggtaggtgcatgcaatcagttgaactttcacatcatttcttgatcgtttgttgatttagaattaaacaggtgatcgtgagaaacgctcctaagcaaatatatagtaaatggaaatcgattaattcaaaaaaattgaagtattattattctattaccatgtttattatactatgtacttatttgattttaattttatcattgaaaacaagaaaggagaagcgacctcaatgattaacattcgtcggccgaatcaatatagagactttaaaaattaaaaaaaatggtggtggggtttgcagtctaagcttttaggttaagcctttaacatgtgattaactttccacaccaatggctctccaaaatcccggaaaagaagaaaattatttcgaaactcacttgggattctaaaaatgtgaaaactaagaataactcgctagtcacttccatgaaaaaagtagtggtaacacttaatttgaaattgaggaataacattttatttttgagaaagaatttgattgttagagtatgttattattagttttctaaataataataacatgttagaaaaatggtaatggtatgggagattttattttttattttttataatgagtaaaaatggtgagagaaatgatggtgaattgagagttgttggaggaggtggggggtccaatggcccctctttttattccttattaaaaagtaaaataaccattacatagttctgattaattttgcaattaatagaataatattaagagtaaattttacaagatgttattttgactaactttacgggtgcttcatacacaaacgtaaaagaaatctatgtacagatgaatagtatcatgcaaatctaaaaaaggttacaaaataatgtaacaagtactttatcaaaaaaaaattaacagtgaaacaaagcatgtagtgtgttatgggagactcatgtcttatccgtttcaagatccatgcaagaggaaacattggaatgtctctgtcagtgtctctactgtgaagaacattaagggacagtagtttttgtctggttcgttctcaggttctgcattgtaacaataccacacactcatcaatgtttctctttatgtaatgaatgaggatcaatcaaatagcttataagcaagcaagtgaaatctcacaataggctactgtgaaatcacaacaaaaaacaactttatctgtatcaggtttcaacagtttctttctaattgaacagaatcaaatctttatgccaatttcattctatctacaagttacaacaaagtaaatcattatcctagttatgctcacttgctcagtcattatttagctagctttctattgaagaataacaataatcaaatatcgaaaatgctatttctctgttggatcaaaggatttcagcttcaagataatgacaattgacacatttcaccattcttgatctctctttggttatatctactctaatttacatcaatttacttactttgaactgcctcactttcaaagacatgaaccaaattacagaaacggcgatgcaactataaaatttggaatacatgtggaatttggaatgagattattcgtttttatttcattttcttgaaataaaacactatatgccaaaatcaaacgtgggacctccttatgacacgtggaatttatgtgattcagacaaaagtaatcctagaagtctctgccattagaaccaatctcaagagataaggaaacttcacaaccaaaaacaagaacaacagacacatagag

SEQ ID NO: 6003 - DNA, 3000 bp, Unknown; identical to SEQ ID NO: 5986
  misc_feature (1)..( 3000): cDNA_ID_2993407_gDNA_ID_1620835_Annot_ID_57974 3000 nt of promoter + ATG

SEQ ID NO: 6004 - DNA, 3000 bp, Unknown; identical to SEQ ID NO: 5992
  misc_feature (1)..( 3000): cDNA_ID_2992212_gDNA_ID_1620835_Annot_ID_57967 3000 nt of promoter + ATG

SEQ ID NO: 6005 - DNA, 3000 bp, Unknown; identical to SEQ ID NO: 5995
  misc_feature (1)..( 3000): cDNA_ID_1988890_gDNA_ID_1620835_Annot_ID_57964 3000 nt of promoter + ATG

SEQ ID NO: 6006 - DNA, 3000 bp, Unknown; identical to SEQ ID NO: 5997
  misc_feature (1)..( 3000): cDNA_ID_1989708_gDNA_ID_1620835_Annot_ID_57961 3000 nt of promoter + ATG

SEQ ID NO: 6007 - DNA, 3000 bp, Unknown; identical to SEQ ID NO: 5999
  misc_feature (1)..( 3000): cDNA_ID_1456167_gDNA_ID_1620835_Annot_ID_57958 3000 nt of promoter + ATG

SEQ ID NO: 6008 - DNA, 3000 bp, Unknown; identical to SEQ ID NO: 6000
  misc_feature (1)..( 3000): cDNA_ID_1024639_gDNA_ID_1620835_Annot_ID_57957 3000 nt of promoter + ATG

SEQ ID NO: 6009 - DNA, 3000 bp, Unknown
  misc_feature (1)..( 3000): cDNA_ID_1829661_gDNA_ID_1620836_Annot_ID_50802 3000 nt of promoter + ATG
ctgcttgatttggatacagctaccgagtttgaccctactttgacattcccctacaagttcagggcagtggctttggtggaagaaaaccagtttggagctgcaatcgcagaactgaacaagattcttggattcaaggcctctcctgactgtctagagatgagggcatggatttctataggtatggaggattacgagggtgctttgaaagatattcgggcgcttttgacattggagccaaattttatgatgtttaactggaaaatccatggtgatcatatggtggagttgctccgtccgctagcccagcagtggagccaggctgattgctggatgcagctgtatgatcgttggtcttctgtggatgatattggatctctagcagttgttcatcatatgcttgcaaatgatccagggaagagtcttttacggttcagacagtctcttcttctcctacggtataatctaaacctctctttccgcttctcaatgaattttttttcttgtggtgcatgttgttttagactgtaagtgattttaacaagtgctggttgtatactgacaggctcaattgtcaaaaggcagcaatgcgtagtctaaggctggctcgaaaccattcaaagtcggagcatgagagacttgtgtatgaaggatggatactgtatgatacaggccaccgcgaggaagcccttgccaaagcggaggaatccatttccatccaaaggtcgtttgaagcgtttttcctcaaagcttacgcccttgcagactctacgcttgacccggactcctctaattatgtgattcagctccttcaagaagcgcttaagtgcccctcagatggtctccgtaagggacaagtaagtaaagagttcaacagttttcatttatgtaattcaatttctcaataagtcaattccttttctagagggtttgttggatcatccttcagactgccatagtatcagaatcccaatgtaaaactttttgttcttggtgcctggaataacttgttgatagtggaatgtggtcgcatctcaggagccaactctcttaaaaaccgtttagtatatttggtcaaaaggttatcctactaaatcatatgacattcaatatcatgaactcccgtttggtgtatttgcttgcaggcattgaacaacctggggagcgtatacgtggattgtgaaaagctggatcttgcagctgattgctacacaaacgcgctcaccatcaagcatacacgagctcaccaaggtcttgcacgtgtttatcacctgaaaaaccaacggaaagctgcttatgatgaaatgacaaagctaatagagaaggctcagaacaatgcgtcggcatatgagaagcgctctgaatattgtgaccgcgagatggctcagagcgacctttgcctggcaacacaacttgaccctctccgaacctatccttacagatacagagccgcaggtatgttaatgacacaaccaagttcttgtttatcctccttttgtctgttgtttataattggatgccagaaacaagacaacaatggctgatcctttctgagggattctcccacgtataaaagtgttagaaaaacgtagaacccagcttatgtggtgatgaaaacggaaatgataatttgtgaccccaacacatgaaagaaatgagatttcgatcatctttctggagatagaaacagaactgcgagtgttatatacttctgtacttataccgaattgatatgcagtttctctggtttggttttggtgaatttgaatatgaaaaatagttttgctaagaccagagtatcaagttttctttttaagtttcgctttgtttaacatgaactcttggttgcagttcttatggacgaccacaaagaaagtgaagccatagacgagctttcgagggcgatatcatttaaaccagatcttcagctattacatctacgagcagcattctatgattcaatgggagaaggagcgtctgctataaaagattgtgaagcagcattatgtattgatccaggtcatgcagatacactcgagctctaccacaaagctcgtgaaccaaacgaccaaaagtagaacaaaactatcaatttggtttgatgggcaaaaatatttctcttcttccctcctggtatggcttctacactgtttcattttccttgtgcaaaacagaacttggagcaaatcaaagaaagcttggtttgagtgaaccagggaaaaagcaagcatagccatgtaaatagaaacttttttatatattatttttttttctctataattttggttattggggggtgagaggatactttataagtagtgcagagagtgtttcttgctgctaaagataatacgttttctggccaacaaaaaaaagggaaaaccacgaagaagaacttacctctggtgaaattggacttcttcttctgtcctatttctagatgtattattgcttctttctttttatttatttttttcatcactggaattatgtaaaattgtatctgtaacttcttcaccttttttttttttacatgtttcttgtattgattctccaaaagcatccggggatttgttttttatcctcctgaaacaagaaaacaaagaaactattcattcttcttacatttcaacatgtttcaccaagagtatcctcaatatttcaacattcttttttatcacttgatgaggaaatcatctccttacttctagatttgggtttgagttcttgtttggtttcatgatcgattttatcaccacatggttggattggaaactcaactttttccaaagctctcctgacctgtgaacacaataaagaggccacaaatatcggttttgcatacacgagaaagtttcaaactttcaacaacttctcattaaatttcaactttcagctaacaaactagaaaagaagagtgtcaacacaacaaagatctctcccaaactcacaattttgccttctttgggtcgcaaacaagaacatacccttcccactcagatg

SEQ ID NO: 6010 - DNA, 3000 bp, Unknown
  misc_feature (1)..( 3000): cDNA_ID_1829657_gDNA_ID_1620836_Annot_ID_50803 3000 nt of promoter + ATG
tgcttattgaaactgtttatctttttgattattgttaaatattggaaaacgaccatcgtctttatcttctaatgtatagatatattatatatagtatcggaaatctacatctctgttcgttatgttggaataatccctgggaatagtctttgatgtctctcagtctctgtcgtgcctaattggcttatgtcgtagtactaaagattatggctacgagttttggagacacttttgcatatgtgtttccatgttctagtaatcgggagctcaagttcaatttgatgatagcgatagtgttgcaaaaatgatttatgtttactgttacatgtttcaatccttataaactacagcttcgagggaagattgcctcaaactgagaagtacacactacaagccaaataatgcaaagttaaggttagtttcatttcaagagtacgatccgtgctttttggataaaaaatacattcttacccaaaaactagaagacattcttagctgtctcacccacatgaccatacgtttcattctcaattatatgttccatggaattatatttaatctatataataacattcttgtgccatcacataaactaataatccactcagcagtgattagacttaatcatagcttagcagagatttaattacgattacttccttaaccatttatttatataacaaaaaaaattaacagtaaaacgtgttgacatgacttcgccgttcaatgtgggtggcaaaagccatttgccggctatctaacagcacatattattatttattattttctcgaccatttattatgttctgtcagataatattttaattttaatttatattctattctgtgatgatttcttacgctttgtatcggtaaacataattggatttgcgagaaaatatcagcaatgtataattgtgtcacgcacaaccggtatgtggcagcctcaacatttgaaaggtacttaatacttatgaatataaatgataacgacgaatctctgcataaatattgtttatgaaagattctgacagatctatggacgttgtttttttttgcgtaatttaaactggccaaatagtagtaaaactagaatttattttggtcaagcggaatatagttttgacagattctaagagatgagtgattcaggatttttatattcaaattaccaacgaaataactgataatattagcagattattttaagcttaatcgatggactaactgaaacattttttttgtcaaatttttgatgttgttaagagtaattttcgttcatgaggttccaataactcagctcagctcgcttcacttgagtgtcaaatccatgaagaacatacttctagcaagacgtttccgcctcggctgcacacgtctactatcccaatggttctcccatgcttagcaaactcaactagtttcagtttctatgtaatagttatctacggctttttaattttttttaccataaaagctccttgcccccagctttgtaaataacctgtttccttttggtaatataattcacattttatccaaaaaaaaatccatgaagaaccaacctttcaatatataaaaacaagttaatccatggagacagtcattgattagtgaacatatttctaataaaagttaatatgcatggctaagagaacaaaaaccatttatcatggtagtttatttaattaaaattgcaaaattatgaatccaatattttgtttattattgatttttttttatcaaaattagactcgtctctagtttatgcggaaaaattgaaatatttttttttatcatttacaacatttatacactatagtagttaacagttatgaaaccgcaatggaaagatataatattttactagtaacacttcctttctgatttgtgagttagcaaaaatataaaaatgtgtcatttggtgtttttataatgaaaatataataaaataacagattaattacaaccaatcttgtcaaaagggaagacaataaataaataccaaaaaatgatggaatccactcttcttcaagctacaatagatatgaatgttggcactgtttcaaggcacccaaaagtaaaagttaaaattcagccagagaaaatggttaaaagaaaagtaagcatacacatattagacttaaacaaatagaaaaaagggaaacaaatgtaacatagaagcatgctaaagtaaaaagtggggggggggggatcaataaactgtcaaagtaaaattaaaggccattactttcacataaatgtttaattaatttttttcaacctttttggagattgtaaaaagtgccgcgaaaatctaagaaataaaaaaaatggcagttgataacgttagaagaggattaatttaagcctttaaagggaaataaataaactaagcaaattactactttccacaaaaactaacaagaggacaaaaataaaaaaggcaaagataaataaaaaaaacctgaattaaaaaaaagataccacaaacaaacacatatagtaataaaattttaattttgcattattagaagtacgcatgacttctctctgaaaaacagattggtaataaaaaagaaaaagaaaaacaataaacgaaaactgagagagagattgaaagagagatcgagcggaggaagattcttcctccaattaccatctctctatttttacgggaagattcgtaaaattagtgccatcaacccaaaaaaaaaaacgaaccggatcgatgaaacttacagtgcaaaaaacaccatttccgagaagaagaagaagacgaagaacaagaccttcgttgagaaactttatttgaaaaaaaaaagaaacgatttttattggttaaagggacagacctccttttggtggattggctccgtgatccaatcctcggaattgtttttaaggtgacggaacaaatttgtaaatcttgtttttggtattgacccagatctttggataaatttgaaatttttattggttgtttttgatttgaagatg

SEQ ID NO: 6011 - DNA, 1943 bp, Unknown
  misc_feature (1)..( 1943): cDNA_ID_1829627_gDNA_ID_1620836_Annot_ID_169907 3000 nt of promoter + ATG
caacaaccgtctctccttatttgaccagagtccttctgtttttttttgttttttttttgtggataaataaacagaataaattagggctcgaaatacttatgatatgtattccaaaagacatagctttgatcacttaaacaagccacgcctagctgagaaagaaaaggctttggctggtttataagaaattaataataactttctggcctttaatttagataaatagaacatttaatttgtaattatatattttaatcatgcaaataataaattatctcaaccaacattataattttatatatctttgaggtcattatttttgtaaagaaaaacgctagaattgaaatatttattaatttagacgaatataagttggacaatttaatccatgtaagattaagattttgtatgccatcaatctaacaacttgtctagacaactaatgtttaacaataatttttgatactgcaaaatttgtttatgtgaagttacagaacttgtaggagttagattgttaacgttacaatactatatatagttgattcacgtgtttataggcaacatatcaaattaacatgtttgctttgcagttaaaaaattgttcaagaaataagccaaaattcatcgacaaatttggagctaggggagattcggtaggtacaaattatacaaaacttattcaagtaattaacaagtaaaataaataatcgtttaccacgtgcccatccagctgtgattccacttcaacttctgactaaggaacggaaaggcattccaagtttcctcaattaggctcaacttttcagagatgaaaagaattagtatgtgcaaaataacgtatagattcacaggatgatacaaaatctttcaatgacatggttagtcaacgtaaacaaatttgttttggaagggtccatagagatttttactaaagcaacgtggagttttcatgtgtttgcaaccgttaccaaaacccaacagttagttaacaactttattataatgaataaaaataacacacgagaattaatgacatagtgtcaaaaagaagaagaacaagcatgatattttatgccgactaaagtattgtgaccatttgttgttgctgaatcgtcatctccaactcctaacgttaggcacgttcttgaaaaatatcccataacgcaaattctagattaagcccggtaaagtaaacttgaaaaaattataatatacaggttctttatttaaaggaaaatgtgacatggcagtgaggagaaactaacccatcttcctaatggacaaatgtcagcagagccatacatttataaagtattttaatgattaaggggacgatgatgatgtcatcagtagttgagttgggggtagaataggtaattcaagaaatatgtgattgaaagtggaaacgtaagctttctggcttttgtgtcctctctgagtctcagtgtcgggacaagacatgcatcagcatcacacatccgtgaatcggtgctttatcctcttctatcttttttaacttcacgactagaaaattgatttttaaattttgttttacacaaactgatattaactacaaattaagaataacatagaaattaagaataagtttctagaaatgtacatcaagtattggccgttaagtttcaacatatttataccatctggcctcaattacaatcataattcataaataatcttctgacacttaataagataacttttcaccgagtgatatattcctgaaagtaaattcaacgctttagaataatgttcttatatatttaattatttaccaaatacacactatgcttcaaactccctataaaaagaagaaaccaccttatagcacttctcctcattcctcacttccaaccgccaaagaaaaaaatcaaaaactccaacaaaaaaaacctcccaaaccctacccgagcagtcgccagatg

SEQ ID NO: 6012 - DNA, 3000 bp, Unknown
  misc_feature (1)..( 3000): cDNA_ID_1807217_gDNA_ID_1620836_Annot_ID_169904 3000 nt of promoter + ATG
atacaccctccggttttattttattttatatggtaacttaacataacctaaccgggaaacatggatacaaattgtatttggaaccaaaccaaaccggtttgtaaccctaagtaaatcgtgttgacttgaaccggatataaataatcattccggtaatcaaagatggttatgtgatgtttctcttcttgattgtgttacagaaacaagccgatgtgaacttcttcttgctgcttatgggcctgttgtgtcatttgctgccattattgttaaaatatgcagcaaccggcgaagtatcgacctctatgattaacaaaatgtcgctcactctgtcgcggacaagcagcatagttatgcttattgcttacattgcttatctcatcttccagctctggactcaccgccaattgtttgaggcacaacaggtacctaagagttacgtcatgttttcatgcgaataaaatgtatctataatcaattttattggtatctaggatgatgatgatgcatatgatgatgaggttagtgttgaagaaactccagtgataggattctggagcggatttgcttggctcgttgggatgacaatagtcatcgcattgctatcagagtatgttgtggacacgatcgaggtactgattatgtcgatatacgtttgaatcccaacatgaaaaagaaagaaagaaactcacaagattaataaggaggtttcatgttggtcaggatgcatcggactcatggggactatcagtgagtttcataagcatcatattgcttcccattgttgggaatgcggctgagcatgctggagccatcattttcgcattcaagaacaagctcgtgagttttcttttttcttgctttacaagtattctttgtttgtgtttggttttatgtttagtgtgaatttcttccaaatgaacccacaatatttagcattgaaaaaaaaaattgttgcaaaaatatcttataaaactccaacatgtaacactgcctgaaatctatttttgtggaatggttaattataactacaggacatatctctaggggttgcgttgggctctgcaactcagatttctttgttcgtggtaagttcttcttcgccttttatattatgttgaaatctgaaagatgacaaatgttgcgtgcaatataagaaatctaaggcaatgttaatgtgtgtgtttcatcaggtcccattgagtgttatcgttgcgtggatcctgggaataaaaatggatctcaactttaacatccttgaaactagctctctagctttggccattatcatcacagccttcactttacaggtaaaacgttttgctttaaacacaagtttgatttggttgacctttctagttaatcattatcgtttgtttttgggccggttaggatggaacttctcattacatgaagggactggttctattgttatgctatgtcatcatcgcggcgtgtttcttcgtcgaccaaattccccaaccaaatgatttggacgtgggacttcaacccatgaacaatttgggagaagttttctcagcttaaagttatcaaatgacttgtaaaaaaagaagaagagaagaaatcagcaaattatgatttgattgattcgtcatccaaaaacggagagactttgtcagagggattcctcaagcatgaatgagggagggagcttgatgaagacagaggttcttggtgtttaagaaatgatcacattaatttctgtttgctttctttttctgtttgttgttggcatttttaagtttttcttgtatattatatgttcttttgctgagtaatgtggactatattttctgatatattcgtttaccttacagacttaactgatgatactgtatatgcaactttttctttttgagttaagttgcaaattagtcactttttaaaacttaattggaaaagtagtcactttattatttataatttgcaaaatagtcatttttcattgtttgattcgtacacttagattgtacaccacttttagtgtacagatatatataaaaaatacacagcgtacactttacatttgtacactaaaagtgatgtacaatccaactgtacgaatcaaactgtgaaaagtgactactttacaaattatgaatagtaaagtgactattttcctaattaagtttgaaaaagtgactagtttgccaacacaccctttttttttaatttaccccaagatacatgtagaggaataaaccaaaaatgaagttttccctatcatatatcatggtgcatgaaaaatgttaaacaacttcttgtagcataaaccagcaacagaaacaatcaacaaattgtggaagcattgccataaaaagttatctaataagataagacttccttgcactgcaacaatctttggttgtggatcccaattacactcacatatacaccatcatccccttcttgtccttgagtccatttgagatacacattgttactaatgttgtcaaaaataaaaatcaccatacaagaaagtggcttctgaggttcatcacaaattcagcaaaaactcttgttctgctttaacataatgttagtcttattcatacacacaagcatataaataaaaatgggtgtgttggcaaaatagtcactttttcaaacttaagtggaaaagtagtcactttactattcataatttgcaaaatagtcatttttcactgtttgattcgtacacttagattgtacaccacttttagtgtacaaatgtaaagtgtacgctgtgtatttttatatacatttgtacactaaaagtagtgtacgatgtaagtgtatgaatcaaacagtgaaaagtaactattttacaaattatgaatagtaaaatgactacttttccaattaagtttacaaagtaacttaactcaattataatttggtttataaggaaacgtgtgggaccaatctcaagtagacgaaaccatttcttaaggtttttgaaaacctttgcgtcttatcttcttcttccctctctacaac

SEQ ID NO: 6013 - DNA, 3000 bp, Unknown
  misc_feature (1)..( 3000): cDNA_ID_2135701_gDNA_ID_1620836_Annot_ID_169903 3000 nt of promoter + ATG
agctctagaggtcaaaactacgctaatcattttgctacctaattgtctgccaatatttagcccaatccctctgtgtgcagcagaaactatatcactaggttattgccttattggattggatatttgcattgcattttagaatccaattacaatgttgtgttattcaatcaataatttacatatttaaattgacaatgctgtatttcacaattattagttatattttggtgttattcaatttatgatttttaaatacaagttatatgttagaccaaaataaaaagaaatataagttataagttgctgaaaataactataggtgaaagaatctataaaccacaaaaaataactccaagctcggattttttttctccgaataaaacaaaatattcactaaaatcattaagcagagacgccaacacaacacaactcaactctttgtgtctttgtacagttgtacgaatggtcatgtactatgttattattattattccggaaagctccactactctctcaatcattttgaaattgtctcctcaatattttgtttggctcactagctttgttatacgtatggtatgggcaacgatatgaaaggtatataaatcacacaattaaaattcaagatagtgatatttgaagttgtgttttgcacaaaaacaaagctatcgttgttagcttgtgagataggaaatttcgaggaaggtctttatatgtaattctcgcatgcatgtgagatgttgatcgatcattttccccacaatatttacgagatttctgtccctataaaaaacgattgtgatgataatagtcaagtggaattcctaagcaaactaagtgtatgctttactccctggaaccgaaccctacatatcttgaaatttgttatgtaaattcagccgatcctctagtccagtttcgcccttaaccgttacctatttcaagttttgataagagccatcgtggtatgaatgttaacccgctacttaactagttacaatttacaactacataagttttggagtcacgtgttatatgatttatagacatttgaattattggctaatattggcccagtcttggtctctccgtgataatggatattctcttttgattccatgtcccttgtcaaatctctaacaactacactctgatgatttggaacaagctggaaacaaaaaaaaagttcttacataacaaccctaaatgattgatcagtaaatgttatattctaacttcagatttagttgtatcatgtataaaggaaaaaaaaactaatcatataggattgttaattaaccaaagacatcaatatatgactattaatccaatgcaataagattaattatatagtttttaaatatttaaattaatttaattaacttgaaaagctttcaaattattattagtgtacttgaatgagcgaaattggccaaaatgcaaacagccgcttatcgcctttatgtcttggtgctaaaactgctgccgcttcgaaaagccaaagccaaagcgttaattataaattttttggtacaacaaaagtgataacgagtgatgattctactgctaccacactttgagcccatcacacaagtttacattggaacactcctcttcaagtacacgtgtagtgtacaacacaattaaccttctgtttttcttgtcctatctttcaataaatagccatatcatacctacctaaaacgtaacccactaattttcatcaattaatgtcgagcaaatactatatcttaagtttgaaattatcaaaccaagcagaacaacacatgtagttataatcatataattatctttaaaacatttacaagttcattagaatcttcgtacagatacagccatatgcaactaatgaaagtctcaaactcataaatcaaagaaagcattaaactcaatgttcttaagttaaatatgtcaaatcatcacatataattccgattaataattagtcagttaagctgtttaagcatactctaagcattaataattagtcagttaagatatatcattgatccattctttcaagttaatgtcctttacatacatccaaattcatttgcacgaaaagaattaacatagagatatatagttacataaacacatacactgaccaccatagatttatttgaaccttatatataacaaaagatcgaaatgttaccggcacatatcggtgagaaatgaaatgcaatttattgttatagaatggcaagttaaagcacaaaagagtatatattaaagatttttttatacacgtgtcagtgaggattgcacatcacatgttaaatcacatatgtttaagcaaaatggaattctatatttgcctatagattagacgtcaaaaatagacgacaactttctaataaaccaaaaaatgtcgctcaaaatgatatattatatttattatgtattgtactagctagagtacgaaatcaactaagatcacaaacggatagtcggataccaatcaaaagtgttcaattctgactcttgaaaaactttatttatcttcattttgaattgaatacaattatctaactgtaactttttttcttactcgtcaatctatagaatcaagttaccctttctagagaatcaactaactagtagtctagtaccttcctcaatacaatagtcgtacgaacgcccatttatctaggtaccctcaaattttgtgtcgtctcacttattagttatctattactagttgattactcaatacaaatttccctaaatagagaggatatgagagttgcgtatttaaacaaacctaccaaaatatgattttcgtcaaaccaaagcaaaaacctaccaaaagaaattatttcttaaatacagaaaaaaacaaaaaggaaacttccgggaagctgcgtacatagatggacccaacataaaccaaaacaataacacgtagtcgccacctatatataaaaaacctgacgcaacacaaacagatgtagtagaatcaaaacgtcttaaaac

SEQ ID NO: 6014 - DNA, 3000 bp, Unknown
  misc_feature (1)..( 3000): cDNA_ID_1395806_gDNA_ID_1620836_Annot_ID_169900 3000 nt of promoter + ATG
ctaagatccacctgaacaactatgacaatgaataaaaatatggtaattgtacgtacaaaataaaacaaataattttttggttctaatatgccatttaagattttgaaatgtcatgatagaaacaactaatgatagaataaaaatcttgaaaatgttaccatttaagattttgaaatgtcatgtgctaatcttttttggttctaatatgccatttttagactcataattcataaaacaacaagttatttcatagaaagaaaatactaaaacgaacatttctagtttattttgtaaatctaagaacatagatgcagaattttttcccattgtaaatccagtattcatttgatcaaaaatgagctggccatttcaaaaaaggtatgtaacatgcgaacgtaagtggtatgagcctaggagactaggaggagattgaaaatttgtgatgtttctaaacgatcgtgtggtcaatgtcaacaatcatttgtttggcctttgggaaagtcctttttttttttgttataaaggatttgcattagaatggtacatttatatatctaaatttaattgatttgaattatacactaattactttcgaaatatccacaaagctctacggtgtaaaatgtatcttccaatgtcgacatatcaaagatagtagtatcatatcttctactagaggtctagagccatctacgtgtattatggtagtttaaatggatgtgatctgaggatgtccatctatctaaaattgcggaatttacttcatttttagataggttggttgcatcgaatagttcaaaatgatttaatttctacaacttttttaaaaatgatcatagtttttcaaaatcaaaagtcatctgaggctttttgtcccgcacacatgaatttttttctgggtatcatatatgtcgtatcatgtaacacatagggcggtagataagacgaagtccaaaacgcgatgaagaaacctttggtttagcatgagtaaaatcataacgataaagatacaaacttttttcattcccaaaccctaaataatggtgcttttgagagaaaaccaatttctacttaccatttttggaaacccatcaagatgcgtaaatctagttgcaacgtccaccacatgtcttatttggtggagcgtggttcacaaaaatgtttgaaagttaacaaacgcgcgtctaaattattattatatactattccaaagacgcgttcacatttaacccaatgttaaccaaccaaatctcaagatgtggagatgcattcacacatacaacaagatatatatctacttaacttatctgaaatgcgttcacatcacacgtatagtagtaccaaagacttgccatgaataaagaagataagatgtctagacagatcaatttgtaaccgtcatcatcttccatttttgcatgacgtccaaaagatcacttgaacttttttcatttcgtggtgaagattccattggacaacgtgtgactatatttttggctcatcacttttttgtagtgcgatcatctaccatcttgcaacatagattctcttataattggcaaaatccattaaaccgataacaaaatatcataatgtcacacacactagtgattcctcgtgaacccatccatattctttgcttgaccgcttccataaacaatccaccccgaagcttttacatcgtgatgtctttgtaaatttaggaaaacacagacacagttggtcaatgataatcattacagattctaaaagaatttggtagccactagtcaaagaacttaaaaggcaagatttatcgggacattaggacaaggtaaatgaatgcattataagaaaataaaaaaaccctttaacattttgtttaatagaaaagaagtagaggttgattagttattgttaaagtaaaatgtgttgggcttgtcttttcctcaaatgtcgcgaagctcaatggtataagcgaaagagaaagcatagcatgatgggccatatataaataaaaactcgagtatgctacaaaaacaaggtttcaatgcactcatatctcgtttaacattttctaattttattcttttcatgtgtcccccattggcttggcaataaagttgaatttgtattgatttatatctcattctcagtacgagctaaaattcttaattaaaatgaaaaatatgctataaacaatttaaatgattgcaagtctcaccttgaacaacatcagttaatatttttccgtagcatgttgcatatagcataattttggtcttaagtaacaccaccacctcacacgtacgtacgaccaattatgcatgtctcaaatccctccatgatttctatatggaagaccaaggtttcaagattagcaattttaacggattaaaaccggttcaagattttattttttatttatttttgctaaatcctacaatttggtctcatgacaaaaaaaatataaaaacatagaaacaaataacaatgaatctatcgacatcaacaaaagcaattaaactttccgaatcaatgaagcgataaccggtagtatcttcgagacttcatatacgatcaaaatgctaaagtaactattcataatcttttattaataatgaattatcaaagcttctataattcatacgacaaagacaaaggaatagcaacaagttatgttcatttcgctgtcgtttaattcaacaatgaaacgttaacgaaacgattttgtcgagatttttaaacgtctttttcaggttctacggctaaaattcctaacatttcatcacctgtcgttatcgttaatatcgtccttgtcagcagaaaaaaattgaaatcaggataagttgataacttctatgaaaaaaacattatcttacaaaaatccaaatactccgacttaaccgggtcggatcctggtgagtactagtatctatctcattacaattcatatccttccttcaacattcgatcatcacgaagccaaagaacaatttctccgtcactatcataaccatg

SEQ ID NO: 6015 - DNA, 3000 bp, Unknown
  misc_feature (1)..( 3000): cDNA_ID_1807281_gDNA_ID_1620836_Annot_ID_169898 3000 nt of promoter + ATG
ataattccacagctactgcaaataaaccagtatcgaagcatgaaactatcattttaagaagacactgcacatgaatgagatcctaacaaggatatacctgcaataatgagaacttgaaaccattaatctccactatttgttcagattcgacaaaattagcagcgtccccttcaagattggctcctcttctccacatacgtgtacctgggatgccaattccaataagactgtcaaacaaacatggatgccactgaattttctggcagaactaattaaaccctacctagacgtcgtgtacagcgcctggacattatcgataccacagcaggagaattcttgagctttagctcagcaacttggtaacttaagccttggttaatatcaaacaacatgtattggagtactgtctattaaaaagcatatttgaaaaacgcaacattacatctataaacagtccaagaacaagctaaacagaagattaagaagataaagaaaaggatatttccttgaagtataggaataataaaaccatccagctgccacaataagagaaggttagatcattaacgtttgacaaggaatgaaaatcaattaaatttaaaccacacaacttactttgcattcaattaagtcctccaaaagatgccagttccaaacatatcgagggtcagcctgacaagcaaataaaccttcagcctaactttaacgcgatgaacttaaattcagacactggatccaaagaagatactttttttaaagataaaaaatcatacgaataaacaacctgcttccacataggcttacgattccaaccttcagctagcttgcaccttctttgaagactgtaaaattggatgaatgtatctaactcaagccgcggaactacttaaaactcttaatatcatgagatagtgaaacttacttcaatgttagatctgtttcatacgaaaaatacaatccaggggttgtctcaagtgcttgtaacagagtcctaaaatatgtttcgtcctttttctgcaaaagccagtgaccaagttctttagacaacttaacttgttcataaactccaaaacccctacaaaatcgtatatcgattgaaattcacaataaccttacttcttgagcagtagcaaacctcaaagcctcattgcaaggtaagaatttcatagccgtaactctaaaaatcggtaaaccgagaaaatttccaacttcctcccgagacgttataactagcaagtatgttcctatatatgaatgaaatcgaaaccagcatataaaaatcactgttggatcccaacacagtacatagagaaatgttgaaaaacattttccacctgctaagagcctaatagttcctcctacgccatagatagtagagactctagtaggactcccagaagatgcgttttctgcagtaacaaagaaacagtaacatcaaatacactacaacagcctaatactcttgcttcatatcatctcttgccaaattttgtcttgaaaccaaaacagggaagggagagagctgagaatgaagagtggattaccatcaagaggtttgatattgccatcgcgccgattgacggagaagccttcctcaggcgattcgatgggtttgacgacgtacttgtcaggaaactccagaagctcgaattgatcgtagagcttgaatctacttgtagatggagcaatctccattaacgtaaattatgagatttcaaataaatttttcaaaataggaaaaataatttgaaggatgatgatgatgatgatgctgttggagtttgttcaattaagaactggatcaggagaaacaaaaaaaaatgtcaatgattgttcattatttttcttcaaagttgactgttgccacgtgtctctcaaccggatactagtgggcttctttgggcctgaaatttaaactgtgcccaatagtctttcgtccggacaaattgttacagtagttaaatcaaaggccaccaaaactgttacgtagacatttaaagcgaatctccatcacctaccgactcttccttgatttgattgttccacatgtagtaaaaatagagacttgaaggtaattttgccttgagggaacatgaagagactgaaggttgatatttttattagaaagttaaaaaaattatttcagttaatattatatttataggatatatattaaaagatatatcgcgggcttatatttttatcaaatacatgaattttttgtttttaagatatcaactacaactagatgtatcataatccccttgttagatttattattctttttgtcttaatatcttataatagttaatagtcattaataaagaagtaatagctttcattgaagtgagtctactctaaataggatttccacagtaggaaaactagacatcaggaaatctattcaatcaagacgacttatgtagtagagtaatccccggaggtattgagcaactatagatatatgttattgattatttaatgtatgatacaattcgggatgattttataattaaaagatttgaaatttgaaattatatttattttgttaatattgttagttttggttagcttttaaaattgtgtatttgtatttttattgttaaattttatgatttcacccggtatatatcatcccatattaatattagatttattttttgggctttatttgggttttcgatttaaactgggcccattctgcttcaatgaaaccctaatgggttttgtttgggctttggatttaaaccgggcccattctgcttcaatgaaggtcctttgtccaacaaaactaacatccgacacaactagtattgccaagaggatcgtgccacatggcagttattgaatcaaaggccgccaaaactgtaacgtagacattacttatctccggtaacggacaaccactcgtttcccgaaacagcaactcacagactcacaccactccagtctccggcttaactaccaccagagacgattctctcttccgtcggttctatg

SEQ ID NO: 6016 - DNA, 3000 bp, Unknown
  misc_feature (1)..( 3000): cDNA_ID_1829649_gDNA_ID_1620836_Annot_ID_169896 3000 nt of promoter + ATG
ataattaatcaaattcttgtcactcgtctgattgctacactcgcttctataaactgcagtttaaatactttctcaaggaccctgtcaaatacgacgtcaagtaccaggtaagtcaacttagtacacatgtttgtgttcttttgaaatatctttgagaggtctcttaatcagaagttgcttgaaacactcatcttgattacaggcaagcgcgcagccattcttggtgctcggaatatttgtaacggcattagcatcgcaacactgaaaaaggcgtattttgatggggttttgtcgaaagcagaggtgttgacacatcaaatgtgggcaagtgatggcatcaactagtttaaaagattttgtaaaatgtatgtaccgttattactagaaacaactcctgttgtatcaatttagcaaaacggctgagaaattgtaattgatgttaccgtatttgcgctccatttttgcatttcctgctcatatcgaggattggggtttatgttagttctgtcacttctctgctttcagaatgtttttgttttctgtagtggattttaactattttcatcactttttgtattgattctaaacatgtatccacataaaaacagtaatatacaaaaatgatacttcctcaaactttttataatctaaatctaacaactagctagtaacccaactaacttcatacaattaatttgagaaactacaaagactagactatacatatgttatttaacaacttgaaactgtgttattactacctgatttttttctattctacagccatttgatatgctgcaatcttaacatatcaagtctcacgttgttggacacaacatactatcacaagtaagacacgaagtaaaaccaaccggcaaccgcattacataacataaccgcataccatttgaacggtacaacactgccgttagtacaagccatacatagttatatcacacacatataaaacacaaaaaacctaaacgcgctacattagaccctagttaaaatccacgctgccaaacacggaacctacaagcaggttacttattagatgatatataacagactgttgcagcggacactagtagctcgtaactactatcacttgttggtgaactttgactcatcgatctcaatcccttcttcctccgcacgctctccaccagatttttccatcgtactgagtcctcctttacgtcccatctccttataaccctcgtgccctagctgctccttcctcgcctctcctcctttgtgtcccatctcctgataaccctcgtgccctagctgctccttcctcgcctctccacctttgtgacccatctcctgataaccctcgtgccctaactgctccttcctcgcctctccacctttgtgaccgatctcctgataaccttcatgtcctagctgctccttcctcgtctgccctcccttgctccttcctaacaagtgtacatacatgcattccatgaaacatggagatcatagagtaaactttaggttcgtaataagtagattaatcttatcttaagatattaagatctaatgtttctagccttataaaaccattacttacgaactaaagaaaataaaaagagtgtggaaaagttgtaatttacggcaataccttcagcaagatgctcttgagcttcgaggctgtggccaccggtgccacctgggacgacggtctctccttgcttcgccttctcatcaagctcttctctgctcagttgctttgacgccattttttgaagaaaaaaacacgaacgatatgtaattaagtaagttgcttttaatttggatctatgttccgacacagatacggacgacgtaattattcctataaatagaaacgtttgtgttccaaaggaaacaaaaggagagaaaaagtgaagtgctacgtggaagagaagacgcggcgagactagaaataatgggctttacggagatgacacgttgatgcttactcagtcaacttgctacagttattaacgagctgcttgacacgactccgattaatcttaatccattttctgtttcccccaagaaatcaagataattacccacatttgggattttttataaaactgttttccgtgttaggtcttttcaatatcagttagatagtactattatttatctatttgaaatctaagtgcaatatttcggataaatatgttttaaagttaaaagttttatatttattcacatcataagaaaaatataggtgttattagaagaagagatttataaatcgatcacacataataactgggaagagaaggtagcttcgaggattagttggtttacttgtcgacaaagtcatatctaccatgtaataattaggtctttttcaagttttgagtttggagacatttatttgagtttgactttggtcttattatatgcttgggctattgtacacgtttgactcatgctgattagagtatgtatagttaaatataataattaaaatgttagaatctggtgtggattagactttcgcgacattgttgaaaatttgtgaatgcatctatctaaaagttggtttagtggagtttctatgtgcacaactgaagtacatcactatatttggacaatattgaattatatttgaatttattgtcttgaagaataatttgcaacattacataccaaatgttggctctcttacggagagcgtataagcgccacttgacgtgggcttatatgggcccggttaagggtaaatgtttagtggccacaattctgaaacagcttcccttcttcggcccatactggagtacaaaagtaacgcaattaagaaaaagcgttacaggattaatccaaaacggcatcgttagaagaagagagcacacatagcgaaaaccctagtacctttatttgagccaacactttcatttctctccttctccaccagttttcccccaatcgctcctccttaaaccctaacatttttgcttcccctgtttcgattctcgagagttatcagagatg

SEQ ID NO: 6017 - DNA, 3000 bp, Unknown; identical to SEQ ID NO: 6010
  misc_feature (1)..( 3000): cDNA_ID_3079201_gDNA_ID_1620836_Annot_ID_169891 3000 nt of promoter + ATG

SEQ ID NO: 6018 - DNA, 3000 bp, Unknown; identical to SEQ ID NO: 6009
  misc_feature (1)..( 3000): cDNA_ID_3079205_gDNA_ID_1620836_Annot_ID_169890 3000 nt of promoter + ATG

SEQ ID NO: 6019 - DNA, 3000 bp, Unknown; identical to SEQ ID NO: 6016
  misc_feature (1)..( 3000): cDNA_ID_1829649_gDNA_ID_1620836_Annot_ID_50806 3000 nt of promoter + ATG

SEQ ID NO: 6020 - DNA, 3000 bp, Unknown; identical to SEQ ID NO: 6015
  misc_feature (1)..( 3000): cDNA_ID_1807281_gDNA_ID_1620836_Annot_ID_50808 3000 nt of promoter + ATG

SEQ ID NO: 6021 - DNA, 3000 bp, Unknown
  misc_feature (1)..( 3000): cDNA_ID_1829643_gDNA_ID_1620836_Annot_ID_50809 3000 nt of promoter + ATG
caacataaaaggtttgccaaaagagtaccccagctatgctgtacaagagtgttagaacaacaacatctggcgtaagagtgccaaacaatgcttggccagcccacctatcagtcaagtgagcaagaaacaaatcaatgagatgagaacaacgccatatattattgatacacgagatatcttaccatggcaaactaatatagcttgctccaagtgcaaaatttccaacccatccattttgttttagctgcaatgagatcagttcagatatcgatattcaaaactccaaaacttggatggagtgtcttatcactagagagtggaagttaggaataaaacttaccttaagaggtggagcagagtatatataagatagcaatgatcctcccaaagcaagatagaagacagtgggagtggtatgccctgcctgataagggaagattttagcaaatctgatgtgccctttaactgtactagttaatgtcagaagggccaacttacccacacatctaatattccagcaataccaagacctcccaataatagcacccagacttgtgtaataacctgcattttaaggagtaaggagaaatcagaatcacaaaagagataaaagctcacaatgttctgtctcagttacctctggctctgatattgctccagatggaattggacgatatggctcattaattgcgtcgatatctctatcataccagtcgttgattgtctggaaatcgacaagtctaggttattgtagcaccaagcaaatgcactagaataagaacaagtcagctttttgttgtgtaaaaccagacctgtgtatagccagtaagacaaggaccagacatcatcatgcaaagaatcgacttagcaacatcctctggggtccaatgaaagttccctgccagaagaaacaattggaaggaaaatgaaaaaactttctgtacagtattgcatgatccaaaagaggttcgtatgattacctgaagcagcagcaccacagacgactccccaaaccagtggaggccaagtgactggttttgtaagctgaagacgaatcttccatttattctgaatacagaatataacaacaaactctttttagctaacaaacaacattttcacatcatttctaagctaaaaacaagacttgtcctcaaaagagattacctttagtaggaaaattcctaaactaacacatcattatccacaaatatgataatttaaaagattctgaggagatgaacaaaattacagtttcttgagatgctcctttgataccgagaagctggttaatgcttgaaccaccggctggtgccttgtcaggtgtctgagatttaactgccgtcggaaattcaaacgccacagtgtttgaaaagagaattttgaagagagagaaaataaaaacaactaaaaaatcatacctttatcagtatcagtctccgccgcacgcacaacaaatctccgccctacgagagatccacaacaagatcagtaaaaaaaaaatcgaagaaaacattcatcaatctatccaacagaatgctaactaccgggtgattcgtagatcaacgtcgagaaaccagaacgccggcgagtgaactcaacggaatccgaattccgaagagagaggactccgactcgatcgacggaggtaactctggaagagtggatggtggagacagtgttgagaatcgaagtcatagaaccgacggaagagagaatcgtctctggtggtagttaagccggagactggagtggtgtgagtctgtgagttgctgtttcgggaaacgagtggttgtccgttaccggagataagtaatgtctacgttacagttttggcggcctttgattcaataactgccatgtggcacgatcctcttggcaatactagttgtgtcggatgttagttttgttggacaaaggaccttcattgaagcagaatgggcccggtttaaatccaaagcccaaacaaaacccattagggtttcattgaagcagaatgggcccagtttaaatcgaaaacccaaataaagcccaaaaaataaatctaatattaatatgggatgatatataccgggtgaaatcataaaatttaacaataaaaatacaaatacacaattttaaaagctaaccaaaactaacaatattaacaaaataaatataatttcaaatttcaaatcttttaattataaaatcatcccgaattgtatcatacattaaataatcaataacatatatctatagttgctcaatacctccggggattactctactacataagtcgtcttgattgaatagatttcctgatgtctagttttcctactgtggaaatcctatttagagtagactcacttcaatgaaagctattacttctttattaatgactattaactattataagatattaagacaaaaagaataataaatctaacaaggggattatgatacatctagttgtagttgatatcttaaaaacaaaaaattcatgtatttgataaaaatataagcccgcgatatatcttttaatatatatcctataaatataatattaactgaaataatttttttaactttctaataaaaatatcaaccttcagtctcttcatgttccctcaaggcaaaattaccttcaagtctctatttttactacatgtggaacaatcaaatcaaggaagagtcggtaggtgatggagattcgctttaaatgtctacgtaacagttttggtggcctttgatttaactactgtaacaatttgtccggacgaaagactattgggcacagtttaaatttcaggcccaaagaagcccactagtatccggttgagagacacgtggcaacagtcaactttgaagaaaaataatgaacaatcattgacatttttttttgtttctcctgatccagttcttaattgaacaaactccaacagcatcatcatcatcatcatccttcaaattatttttcctattttgaaaaatttatttgaaatctcataatttacgtta

SEQ ID NO: 6022 - DNA, 3000 bp, Unknown; identical to SEQ ID NO: 6014
  misc_feature (1)..( 3000): cDNA_ID_1395806_gDNA_ID_1620836_Annot_ID_50810 3000 nt of promoter + ATG

SEQ ID NO: 6023 - DNA, 3000 bp, Unknown
  misc_feature (1)..( 3000): cDNA_ID_1829639_gDNA_ID_1620836_Annot_ID_50811 3000 nt of promoter + ATG
tccatatagaaatcatggagggatttgagacatgcataattggtcgtacgtacgtgtgaggtggtggtgttacttaagaccaaaattatgctatatgcaacatgctacggaaaaatattaactgatgttgttcaaggtgagacttgcaatcatttaaattgtttatagcatatttttcattttaattaagaattttagctcgtactgagaatgagatataaatcaatacaaattcaactttattgccaagccaatgggggacacatgaaaagaataaaattagaaaatgttaaacgagatatgagtgcattgaaaccttgtttttgtagcatactcgagtttttatttatatatggcccatcatgctatgctttctctttcgcttataccattgagcttcgcgacatttgaggaaaagacaagcccaacacattttactttaacaataactaatcaacctctacttcttttctattaaacaaaatgttaaagggtttttttattttcttataatgcattcatttaccttgtcctaatgtcccgataaatcttgccttttaagttctttgactagtggctaccaaattcttttagaatctgtaatgattatcattgaccaactgtgtctgtgttttcctaaatttacaaagacatcacgatgtaaaagcttcggggtggattgtttatggaagcggtcaagcaaagaatatggatgggttcacgaggaatcactagtgtgtgtgacattatgatattttgttatcggtttaatggattttgccaattataagagaatctatgttgcaagatggtagatgatcgcactacaaaaaagtgatgagccaaaaatatagtcacacgttgtccaatggaatcttcaccacgaaatgaaaaaagttcaagtgatcttttggacgtcatgcaaaaatggaagatgatgacggttacaaattgatctgtctagacatcttatcttctttattcatggcaagtctttggtactactatacgtgtgatgtgaacgcatttcagataagttaagtagatatatatcttgttgtatgtgtgaatgcatctccacatcttgagatttggttggttaacattgggttaaatgtgaacgcgtctttggaatagtatataataataatttagacgcgcgtttgttaactttcaaacatttttgtgaaccacgctccaccaaataagacatgtggtggacgttgcaactagatttacgcatcttgatgggtttccaaaaatggtaagtagaaattggttttctctcaaaagcaccattatttagggtttgggaatgaaaaaagtttgtatctttatcgttatgattttactcatgctaaaccaaaggtttcttcatcgcgttttggacttcgtcttatctaccgccctatgtgttacatgatacgacatatatgatacccagaaaaaaattcatgtgtgcgggacaaaaagcctcagatgacttttgattttgaaaaactatgatcatttttaaaaaagttgtagaaattaaatcattttgaactattcgatgcaaccaacctatctaaaaatgaagtaaattccgcaattttagatagatggacatcctcagatcacatccatttaaactaccataatacacgtagatggctctagacctctagtagaagatatgatactactatctttgatatgtcgacattggaagatacattttacaccgtagagctttgtggatatttcgaaagtaattagtgtataattcaaatcaattaaatttagatatataaatgtaccattctaatgcaaatcctttataacaaaaaaaaaaaggactttcccaaaggccaaacaaatgattgttgacattgaccacacgatcgtttagaaacatcacaaattttcaatctcctcctagtctcctaggctcataccacttacgttcgcatgttacataccttttttgaaatggccagctcatttttgatcaaatgaatactggatttacaatgggaaaaaattctgcatctatgttcttagatttacaaaataaactagaaatgttcgttttagtattttctttctatgaaataacttgttgttttatgaattatgagtctaaaaatggcatattagaaccaaaaaagattagcacatgacatttcaaaatcttaaatggtaacattttcaagatttttattctatcattagttgtttctatcatgacatttcaaaatcttaaatggcatattagaaccaaaaaattatttgttttattttgtacgtacaattaccatatttttattcattgtcatagttgttcaggtggatcttagatatttcaaagtataaaatttgtgatcgtattttagatgattacacacatatcacatatgtaatgcacataatatttccaaattaaaggtaaaatattatttttaccggagtatgtatatattcaatccagattatttttaaaaaattagattttttttgaatgatcagtcttatcaagaattcaaaagatagtgttgttgtcaatcaaaattactaaaagaaaattgtttagtcaacatatatacgtaccttaataaatatttttcttagaatctaaaggaatttacagatgttaaaataaaatccaataaagtgtaaatttaccaaacaagtaaagaccatttttcaaaaagaaaaagaaaccaaggagaccaaattatgattgagttttacaaaatacagaaaataaagaaattaaataaatatcaaaaactcaaaagagacctctcttctctctctctctctctctctcgctactctcatcttcaccgtacgcttcttcgatctacgcttctctctagctatagcttccattgtcacgattcctcccaaagcgtagaatgtggaaccctagatacctcaaattcagctagagatctatctactttcacctctattactttctacttctgaaacccctcatcagagctacacacagtg

SEQ ID NO: 6024 - DNA, 3000 bp, Unknown; identical to SEQ ID NO: 6013
  misc_feature (1)..( 3000): cDNA_ID_1829635_gDNA_ID_1620836_Annot_ID_50812 3000 nt of promoter + ATG

SEQ ID NO: 6025 - DNA, 3000 bp, Unknown; identical to SEQ ID NO: 6012
  misc_feature (1)..( 3000): cDNA_ID_1807217_gDNA_ID_1620836_Annot_ID_50813 3000 nt of promoter + ATG

SEQ ID NO: 6026 - DNA, 1808 bp, Unknown
  misc_feature (1)..( 1808): cDNA_ID_1829627_gDNA_ID_1620836_Annot_ID_50816 3000 nt of promoter + ATG
caacaaccgtctctccttatttgaccagagtccttctgtttttttttgttttttttttgtggataaataaacagaataaattagggctcgaaatacttatgatatgtattccaaaagacatagctttgatcacttaaacaagccacgcctagctgagaaagaaaaggctttggctggtttataagaaattaataataactttctggcctttaatttagataaatagaacatttaatttgtaattatatattttaatcatgcaaataataaattatctcaaccaacattataattttatatatctttgaggtcattatttttgtaaagaaaaacgctagaattgaaatatttattaatttagacgaatataagttggacaatttaatccatgtaagattaagattttgtatgccatcaatctaacaacttgtctagacaactaatgtttaacaataatttttgatactgcaaaatttgtttatgtgaagttacagaacttgtaggagttagattgttaacgttacaatactatatatagttgattcacgtgtttataggcaacatatcaaattaacatgtttgctttgcagttaaaaaattgttcaagaaataagccaaaattcatcgacaaatttggagctaggggagattcggtaggtacaaattatacaaaacttattcaagtaattaacaagtaaaataaataatcgtttaccacgtgcccatccagctgtgattccacttcaacttctgactaaggaacggaaaggcattccaagtttcctcaattaggctcaacttttcagagatgaaaagaattagtatgtgcaaaataacgtatagattcacaggatgatacaaaatctttcaatgacatggttagtcaacgtaaacaaatttgttttggaagggtccatagagatttttactaaagcaacgtggagttttcatgtgtttgcaaccgttaccaaaacccaacagttagttaacaactttattataatgaataaaaataacacacgagaattaatgacatagtgtcaaaaagaagaagaacaagcatgatattttatgccgactaaagtattgtgaccatttgttgttgctgaatcgtcatctccaactcctaacgttaggcacgttcttgaaaaatatcccataacgcaaattctagattaagcccggtaaagtaaacttgaaaaaattataatatacaggttctttatttaaaggaaaatgtgacatggcagtgaggagaaactaacccatcttcctaatggacaaatgtcagcagagccatacatttataaagtattttaatgattaaggggacgatgatgatgtcatcagtagttgagttgggggtagaataggtaattcaagaaatatgtgattgaaagtggaaacgtaagctttctggcttttgtgtcctctctgagtctcagtgtcgggacaagacatgcatcagcatcacacatccgtgaatcggtgctttatcctcttctatcttttttaacttcacgactagaaaattgatttttaaattttgttttacacaaactgatattaactacaaattaagaataacatagaaattaagaataagtttctagaaatgtacatcaagtattggccgttaagtttcaacatatttataccatctggcctcaattacaatcataattcataaataatcttctgacacttaataagataacttttcaccgagtgatatattcctgaaagtaaattcaacgctttagaataatgttcttatatatttaattatttaccaaatacacactatg

SEQ ID NO: 6027 - DNA, 3000 bp, Unknown
  misc_feature (1)..( 3000): cDNA_ID_1807967_gDNA_ID_1620837_Annot_ID_50818 3000 nt of promoter + ATG
ctcttcgtcaaccacaaacgcgtttcactcttcgttcacgtcggggaatttaaaaaaatctccttcgtaacaaaaaagagaaagatcaagaagattgtcgtgatggctgccggatccatggacggaatattccgcaacatctttgaaggttgcatctctagctgtgactcttccatccaacgacgtccataccacaagaactgcggttgtgcccttcacgagagatctcgcggtggaggttcagcgactccttgtcgtcatggaaggtctgaggtcgttatgttccctatccaacgatcttggagtgaaggaaacagtttggctctgcatcttgcctcatcttcttcttcctctaacctccagtcactttcgtcgtcttcgtctatttctacccttgcatcgttatcttcgaccgtgtctgatattgattctcccatttaaggcatgaactattattagttcccattcattaattttttgtcttttatttgtttgtttcgaagagagtcaaattatgtttggtgtgtgattggaaaggtttcatgagtttccttggatatcaaaggaaactaattcaaatgttgtaatataatggtcaattgtagggaggcttttctataaaatttgtacagaatcatgtatttgagcgtaattatagttttttttgtatgatgtaaatttatacataaaccgtttgtaacatcgagagatgaaatttggattggaatgcgagaaaaataattttattttaatttttgtaatatgatcttcaagctatttcttcttattttatgttcttcggttaccactgtcttcatattgttttgattatactacgctatcatttgcccaaatctcttgacattctaatgtagagttgttgagcgacttgctaagattgttttccaagaaaaaaaaaattgtgtattccatacgtctaagagaaaatatttgtttactatgtgacttaaaaaatatataaatttaattattttatagttatatttggtaatgactaatgacattcaatccgaatatctgatcattgacattcaatttgaattttggctcaaatagaggttagcagagataatccgtctactggattagctatactggaggagaatgtttttttttggttattgttctttcattgatcggtatttggagaaaaaatataatttttcaggatattgttcgaaagattaatataacgaaacatcaaatatgagtttgtcttcaacggagcctacttccctgcatacaaatatagaagcattaatttgggcgaagtaatgtctaacggccaagcagaagaatatagtttctttcgtcacgaacttttatgaactcataaaaatggtgacatggtgtacatgtcttcaccaaaagagtggcccatattttcgtcatatctcgaggaaatcgtaaagtgtaagtaaaaattttctcttgtttttctgtttcatttgtttcttatcgagttaatgctagaataggcacatgtacactagcataaaatgtccgcactaatccacaatttgatcatgcacgtaaatattgttttctcaggttgcctacctacttttgtttgttatatccttgataacattatcatgttctaacattttcaaccttgctactattgtaatatggtacaaaagaaattgaaatattttatgcatgagatgagacaaccaaaagaaaataaaaatggttaataaaatatgaaaagaattgttaacaaaaaaaaagtaaaccgcaataccttttttcgtctagtaaaatagtaaaactggagaattctctttctttttctctagtaaaccgtaatagtaaaatccgtcccaccatctaatccagtttggtaaaattaaacattttttttttgttctaataatatttttattaaaagaattataattcaaatcaatttaaaaagttttcttttgaaatggttatttaattttatagatttcatatattatatatattctaaacgtttttcgttaaatattctaaacattttagaaactttaaataactataatatttatctttaataaaatcctaagattttttctttttaaaagtaattaaaattgatggagatatattaaataaggaaatgctaataattaggaatattatttaaatgataataattaatgttaatgacattccttgtaaataagttccaacttgaggatttatttacaaaaatggttgcaaaaatatatatgtagataacatgtagataacatgtatttttatttcagttgtctttgatgtcagattgaataaccagtttgagtttttgtctcaagaacagtggttttgtaagatatttctttcataataaagaaacagtaaaaaagaaaaaccgcaatacttttcaaaaaacaaatatgaaaagaattaaataaagatagtaaactgaaagccttgtccctattgcattttgccatctccgtccgattggtgaggtgtgatggtgtttgtacttgtgtctctggttttagcatcctcttgattttctctctgtcggtttgctactggtttgacttcgatgtaaggtctatccaattttattggtgcttccgacgttcacattaggaaagtttggtgagagtttctgatccttttgctcatttttagtgcttaaatcttgtttttctcatagtttttgaccttcattagaattttgtctcttggtttgatttctttgatttaaattagttttcccatatctgttgggttttttcttccctcttttggattgagtttctggagacaatccattgatccaccgatttatatattttaacttgtatcctactttggtttttaataaaatttagaggacaacaaaaaaatagtaaactgcaagcccgacccagtaacctattaaggtccaaaacgacatcgtagaacatagcaagtaaaagaagaaaagatatagagatagagacaatgatatcatcatcatcatcatccaac

SEQ ID NO: 6028 - DNA, 3000 bp, Unknown
  misc_feature (1)..( 3000): cDNA_ID_1829692_gDNA_ID_1620837_Annot_ID_50819 3000 nt of promoter + ATG
tagtgagtcttggagatttggtcttcattccaccaccatgtgggctttgtgtagatttctcggtggtgaccggggatgatggtaggtcgtcgggaatgttgtcgtggtggtgatgattggtcgtacgaaaacatccggcgatgcaaaaccttgatttgagtttcttttgtagagacaagttggtcattgtttcgcttcccattttttttttacaaaaccaatgtttgttggttagatcaacaaaggaatgcaaaagagaaggaagacattgaaagaaagatcaaatctgtattagaggaaagaaaaacaaaacagaaaacaagtgatcgacgagatatttggttgattttcatttattattttttcttgaaatgaactgtttaaccaaaacttcggaggagaagttgaaattctttactattttaggaatatttgaatttccaattaaaatgaggttcaattttgtttcacgttaaatattaatgagtcttttgactttgtgagcaaggggggacatatttagggtaggaaaaataatatttatagtaatttattaaattagttaagattataaagttaaaaggataatatgaaaattttggaccaattttgatttgtgaatatagtaacggcatagctaaagcctaaaaacatttaatattaaaagacctcattggattttattttctcgactgtcacatttttgttttggcagaggtcttttatccatgtaactctattcagtatccacaaacagttttggaggatcaatatgggccttagaaatgaattaagatcatacttcactagagaatgtgcactcaaagaatgtgttgcgaggtttcatcgttaaatttgcattaaaggtaaggaacttgaagatcccatagcaaaattccatctctttggtgaagtcgttgtctagttgtcaccgaagctataaaggcatacttggaaatccttcatttgaaccaaattatttgctgccaggctgccagcagtgcctgtcttgtgaaaaatgaggctcaaaataactttttttttatgggtttatagaagaattttttttttttgagaccaaatcttaaaatgttatgaaaatgaaacctatgtattcaatagaaaatagataaaaattaaaaattgagactaaatctaaaaaatttagaaaatgaggcaacaaatatttttgaggtataattttgatactaaaaaccttaaaacttttggtggctcaatacccatgtttcttagaaatatgtcatgggccgggcctgactgccagtcaatggaaggaccatgagggtgtagataatgctatatatttgagattgtaaatatagctgataaactatatttacaacgaaaaatatttaaattctgacttagttaatgtaagtttaggcataatggaaacttttgtttataaatacgataaaataagccgtgggaaaatcgttttcgcactttcgctttaaacttttactcataattggtttgaaatttaaatcaatgaaaaaactaagttaaaactttaaattgcttcaaccttagttggttttttgtaagttcttcttatttttttcttgtttatgttagatatgatttttcatcaataaaagtagacgttaaaaaaaaaaaattacaaatcatttatataaaattgttgcattttcgaaagaatttttttatagtttccatttgatttttgtttctagaagtgtaataagaaaataaatccacttttaagttttgatgaattggataaccggtttgaacgaaacctggttttgatgaaatttttcccgacactgtaacacgataattagatttgttgagttataacattacgtgtcgaattttaattggatgtcctgcgtggccgtcttattagtcacatcaccgcagctaataacactcgacgagcgacctcatcgtctacatcgccgtcgcctgttaccgtccggtgctattctccttcacaatctcacatttttcgtaccggttagaagatgagaatcacgcagatcttgttatgtctggtaatagtggcattgtcttcaagctcccatgtctggtccgatcagatcttcccagctcatctaggtctatatcatttcctctcttctcataattttccgatcaatttcgagttttgtcttgattcaatgttttatgtatagttggaacattcagcagaaacaatcgtgaaccaaagtacaagattgagttccttcctgaagattcaccttttcacccggtaataacgcaatcttaagatagatttcaaaaagcttaatttttgcactaattgaatattaatagtagagattctctgtgattttggtgtttgatctctaatattgttattagtcacactttagatagatttgaagcttacgttttctctatgacatgatttactatgagtagagatagttgtaacatagagattgtcactaacagggttagaatctggaatctatggttatggtggattagattagcttttttaaatcacaatttagattgatttgaagcttatttttgccatgtgacctgagttacaatgattagtgatagttgtaacatagagatcctccgttgttttggtgttttttattctctaatattgttgtttatatggtggtaatctggaatctgtggttacgatggataagagtatagtagttttgaaacttattttgcactttgatcttaagttacaatgagtagagatagttttaagttagagatcctctgtggttttggtgtttagattctctagtattgttttgtatagggtgagaatctggaatctattgttatggtcgataagtgttggcttttttttttatcacaagctattgatttaaagcttatttttcactttgacatgagttacattgagtagagatagttgtaacatagagatccctctatgattttggcgttttggttcgctaatattggcttttatagggtgataatctggaatca

SEQ ID NO: 6029 - DNA, 3000 bp, Unknown
  misc_feature (1)..( 3000): cDNA_ID_1829684_gDNA_ID_1620837_Annot_ID_50821 3000 nt of promoter + ATG
cgagctcctatctcaaaagatctttttgctctcccacgagcgcacatctccaaaatcgtcaagctctcccacgagcgcctatctccaaaatcgttgagctcttccgtctcttgcgagcacatacatccaaagatcttaaagctcttccacgagcgcctatatccgaaatcatcaacctcccacacgagcgcctatctccgaaattgtcaagctctcacacaagcgcctatctccaaaatcatcaagctctcacactagcgcctatctccaaaatcgtcaagctctcccacgagcgcctatctccaaaatcgtcgagctcttccgtctcctgcgagcacatacatccaaagatcttaaagctcttccacgagcgcctatctccaagatcgtcagacactcttgctagcgcctatctcagaagatcttatagatctcccacgagcgactatctccaaactcatcaagctctcccatgagcacctttcttcaggatcttcaagctctctcgcatgcgcctatcttcaaagatcttccagctctcccacgagcgcctatctccgaagatagtcaagctctcctacaatcatctatcttcgaagatcgtcgagctctcaaacgagcatatatctttccacctattgcgattctccgactcttgcaaaaatccacacttgctcaaacaaagaatttttctttggttcgggccaaattggcatgtttccggtttcagaaaaatattcgccaatcgcaagaaaccttctctcgacgaactcgggggggactaattatgggatacgggctttgccctctatgcccaattcggcccaaacacaaatagaacaagtcaataaggctcctaacaaggaagaacggcccatcagaacaacggcccatcagaatgactgctcggcccatcacggctcggcccagcctgataaattcagaagggcaaaacggagatatcgcaagagagactaagagaaccctagatcagcttcttgcctataaataagaggagatccactactaagaagggattggagaacctaagtcaccacttagagaatttaagagagaattgttgcctagctctttatctcttactttttggttttccgttctgtattttcaggttttccgaccattaatattagttttccgacttgtactttcggttctccgttctgtacttacggttttccgttctgttaattactgtctttccgttcgtcattaataaagaagttactccgttctccccaaaccccttagttatttattgttacaacctcggtacaaacaagaggaaagacaatttagatttaatttcaccttatcattgattatcgtttttattataatcgcttcatatgctccaactttctaatgcattaccttgatgatgagtctttagatttgctgacttctttagcagaattggcagtaaaaccctgaagttgtttggaaagccaacagatagacgaaacagatttttaaacaccgagattacattacggaagacatctgaaaacataagaaaaaatgtaaaactctgaacttaagtaagatgctctctggctttttctgttgatcaaaactcgaccatgggatcattggttcatgggtctattcaagcgtccaggtaattggttcagtttgtaagtgattgaaaaaatctcttaaacaaagaaacctgataataaaatggatgatgagttgaagttgatgttcgaacttttttgacaaattttttccggtgagtttccggccaaattccggccaaacggctgaacggatttgtcgggtgattagtgcattggaaagctggtaaagagttttacaaaatggtatactcatacgtcaaaaacggagttgtattgaatgagaaataagggtgtaaagtgggacacttgggccaaaccggaccgaaccaaacaaaaccaagctgagccgggctgcgggttgtcgggacgtcccgtcatcggctcaagggctgtcgggcttgcggaccgtcatgcttgtgagttattgggcttgctgagttgaatcttatggaaatattttcaggatagtctcaaaatattctcagaataggatagtctcagaatattctcaggataatctcaaaatatatcatgcatatcctgaaaatattctcacaaatcttatccccctctactatataaagagatccagcgtctcattatttctcaagctctcaaacacaaaacactctaaattctaaagtctctcctctctctctcttgcttcttaaaagtaagttcttagtttagtagtttcgagagtatatcgtagatctagttcgcttgagtctaatacttgtgtgctcgggtattagttcgtgatcggttgtatcctgggattcaaaaatcgtgatgtccaaaaagcacgtacggccgatttattgaattaaggaaaaagatatcatatcttgcctccgtgatttactttctgtccttaattactgttactgtaattttattgttattgttatcttaataaaattcgtacttgtttctcaattcggtttttgggctcctacaatcttaattcaataaatccgcttttagcttatcgctctagacggattgagaaattttcgaattttttaaaacgatttcaaaatcttctaaaaattgtttccgctatcatctttgggtgcttacgtagaaggtttatagaagaacgttattacttctttctttctcctctttctaaactgcttcgcaaacgctacgtagcgattgttgtgaacagtttcttatataaacttctctagtttccacgaacactcatacttgaggagtttgggaaacgcgaaacaagtttctgcgaatgcttcttaagcgagtttgcaaaactaattcggtgaacagaatgactgatatcggtgaaatttgcaaaacaagtttctgcgaacgcttcttaagcgaattttttggttaatatactaatcagatctttttttttgtgaaccga

SEQ ID NO: 6030 - DNA, 3000 bp, Unknown
  misc_feature (1)..( 3000): cDNA_ID_2135207_gDNA_ID_1620837_Annot_ID_169928 3000 nt of promoter + ATG
ttgctgcctcgttaaaaaccttttcatggaaaaatcaagtgggataaaaaccatgataaggaaaaaagagtacagccacgctcatcatcatatgtctcctcctggaagcatcttcttcaaaagatgaattttgatatgtgaagaagatttctgaatgttgtagctcgaagcgcttttctgctacattgtgttttgggcgaacgtactggaaatcaatttcttgatttttcttgaggtcttgaatgtaacagaagaatcttggagaaatatttcttgtcatgtcgctcttgacatagcttcctttgaactgggaaacatatgcaacattgtcttgttgttgactcttcattggtgactatattgcttgcttcttatatatgttgatgacgttaatctaagccatacatctttttgacatgcttcatgaagtgcaataattttggcatgacttgagcaagctacgaccaaagtctgctactagaaacaccgcgagcttgttgttttgcgatatatttttatatggtttgatataaatccttcatctataaaacttattaaaccaaaattcgagatttctagaataaaataagtccaactcaatctaaccttgcagattataaaggacatgttcttacttatctcgatgtctagccgagggagatgagttaatcctgcaagtagatcaatagcaaatgctagatacaattcacaaaatatataaatactcgtcagcatttatatatagtgtttcatgaccaaatatatagagtcgacttcctttagaagtgactaatataacatcaattactttagatgtttagttggaatatctggagacacttttgtctttccaagatcttttattccaattaactctttaagagttttgatgatcaaaatcattatgtttataaattccagggaatataattataatatatatctttcaaggattagttctttagacatcccatgaggcgtagttaagttatttatatagcatcaattcaatatcgagtgattttgacaaatcccggcgcgacacaccgttttgtcttaagtatcataacactctttttgatgtttggaccatatgtccagaaattactcgtttcttatacgagattaatatagacttgactctctttatttattggccaatatatctctttacgctcacagagcggagattcatgatcctcattaattacattacacgctagatcattataaatgattttatttaggtacctgattttgttattaaccatgtcaatcggtctctttactcttcttcaggagtctctttactcttctttaagagtctatatgctcctcttttaagagtttaatcctctatataacaatttgctcttttttcttttcgagggttttctttatatttgaaaccaaaaatgtttatcacgttctttaacgtgttatagacaataatatgtcatctgccagagacatattttttttttggagcatttttagctgggatatgagtttttctatgaactctctaagttcatatttatttgtatgaggatcaataattttataaaatctcattcatcagctgtttgcatttgatttgcaatatactctgaatagtgatcattttgaatttttgaactcttaagttcatatttatttgttcaaagatccaaactattcaataaatcttccatagtgatggagaatttttatcatcaacattatgatttgcaaatcttgcaattggcacatctctaaaagatggctcaatattaatagagtgaagatttatctccaacatctctaaatttcatcctctttggatgatatttttatgtggtgcagaagagcatttataatatatatctcacacccataaaatttaaaatgataaatatttgatctctaatcatgtataaataacatgagagaaatatttcttatgaatcgttggccttatatagaatcatcatgttccatataaaaacatggagattaaatcatcataaattgttttgcaatcacttggatttgcattatgaacgatttattaaagctcaatttgagagtaaacatcatttttagatgttccactttatgttaaagtgataacttttaggatatgacttcaccagagttatctcgctctagggcgtcaaattcaccaaagtttatcgacttattatcgatgtgggattcctttaattctccccctcgagataataactcttaaagtttattcatctcgaaatgaatctcactttaggatcaataacatgtatgaacgggatcatatatttaaatttggatcctcttaaaaatgtgggacttgtaattattcctcccaagattatggcttttcaagcctatttctcttgtaccggatctaattttagatcggttatattttagatttaatttggagaatatttaggaaatcgaccatcatatactatgagcttattaaaaaaatggtgatttggccaaaaatcatatgattctggaggcatagcctaccacaaaatgaaggagaaggtatacaaccatcgaatccataatatataaataaatttaccatatattaaattttaccatctttatttttgtatgatataatcatacatgtgtgtgtctccattgtggtcaaacatttgacaccatattaatttatagtctcaatataataataataaatatctttaaaactgtacgagtttccttggagactttggaaaacacaaaacatcgattattatgaatctgatgtatttggaagtcgagagactagctcatctagatcttctcattatttgtgcactttctaaacatacatcgacaagtgcttcatatattctcataagaaaactatatttttaattttaaaaatactttaatgtttttaaatattatgtaacacatattaattttttacgaataaaaccaatataaataattaagcatatatgttcaataacaatttgtagaatagatgaatgaatg

SEQ ID NO: 6031 - DNA, 3000 bp, Unknown
  misc_feature (1)..( 3000): cDNA_ID_2135234_gDNA_ID_1620837_Annot_ID_169937 3000 nt of promoter + ATG
gattcagcttggtaaaaagtgttaggttcgtaacgacagagatagtgtctcatgtagttctagttcgcattttttggactagataggactgggtgggcgcttatactttaggttgggatgtgtttaaaagaaaaaaaaggggttgattcattgatgagaaaaggtaaaagactctaggtgaagtaagctaaagaagcagaaaaagtctagtaaaggttttgggatttgtaaaaaaaagaaagagttcttgttagctattgaagatgggcaaaagccctcggttttaaaatgttaaaaacaggaaccttagttgttaaagaaatccaaatccgctagatgtatcaaagtgttgagaaagcttttcctagagttaagagaaaagaaaagaatgattagaaaaagggcttaaaggattcatgaatgcaaagggtagaggtaagttcttatactgggattggagatgggattaccattaaagcttcatctgatatactctaggtagatgggattttatctctgcatgcatagcttgggacttacctttagcattctactaaagcttaatcattttttgagagatcccctgttactgaagcctattctgtaagggaccatctttgtctcttgaccttttaccttagccaaatgagttcattgatgatgcattgcttgattcacgttccagaactaatgaatgttaaagggattggtagatttgaaaacatgtgtaggtcgagcatatgagtcggattgattgatagtaaggcatggctaaagtttttcagtagaattcgatcatatcgcagcttagaactatcaacttggacattgatttcatttggtttatctagtgctttggctctgagtccccgatttcaaacctcacctctagcttgttcttaattgtttgcttgagggcaagcaaagactaagtttgggggagttgataagtgtgtattttgcatgttttaagcatccatttgtcatcactttagcaccatatcatcactattttataccatttctcatcatttgtcatcactttgcatgtttaggatagttttgcatgcatgtggcatatttgtgttgttttcaagtgattcggagctgttgaagaactaattggaagaagcggacctgatcatgccaaaccactcgacctcaggtcgagtagacgcttcacgacctcaacacaccactcgaccacctggtcgagtataggatttcaccacttcacctcatcactcgaccccctggccgagtaccccacgagagtcactcgatcacttcactcgacccccaggtcgagtgtcttcacctccaccacctgaccatcacttgatcacacgactctacctggaagtcgagtatcaccatcaccaccactcgactacatactcgatgtcgagcttcagagtcttctccattccgcactcaaccagacactcgagcacaaggaaaaaaagaagattctagcttatcactcgacctctcactcgaccacctgggtcgagtacagttcttaatccgtctcaatactgcgtcgttttgagtattagggtttcggaatatttttgctataagtagcacgtactttacattttcgagaacaagttttttctaagttttatttcgcagacactgtgttcttgaccttttgtaatccggatttctctttatctattcagtattaaatattcggtatttgttcttgatttcgtttactgttgttcatcctgttatcaccttgctattacattgttgttatcatgttttcactccattcaacgtttatgttttcttcaatgatgtctcagtagtgaataggtttctgaggatggattagagtagtttagaattctcagtatgctaggtggttgagtttgattgatagatcccttctggattagttgttcttaatgcctattgctttctgatcaaccagaatttgagcccagacatttccgcgcccaaaaggtgttcgatgaaatgtttaaacaactaattccagagattcgtgtccctgtaccaaagtattggttgcagggagcgttttgcctttaacttgttgattcgtaatgcctgttaggttagctctcgtcaatggtgattgagtctgggactaggttaacttgagggtctctgttgcggtggtacttagatttggttaatgaacttgttgtgtagggataatttattgagccatgtcaatcacctgtaaactgaggaaacaaaactactcaattaccccatcctcgagaattctttatctgattaattttattttttactctaccgttgtttactgcatcttgtcatctgttgcttagtccctgcaattctttgctgttactcgacctgatactcgaccacccagttatctggcaacagactctgcagtcaagtatccctgttacattttctgtccgttactcgacctgtcactcgaccacaccctgtgttgagctgcatcgagctgtgttggtcgagtgttttattgtttctacttgattttctgttttctgcatgttcacttaggactgctaggacacaccaaaatctgttattgcttggcttgacttagtgacttctgatcacatcttgattgttagcatcacacccatttggattgatacctaaaatactacaacgacatgattggtgttttaggataattgactaaaaacctattatcaacccagaacatgtgggggaaaactttgcttaccactaactacatccttaataggataccacataaggtgactgcaaagtcaccacattaactttggaaaggtacagtaccctcgtacaaatacctaaaagtgtgggggtgtctaacaaaagtggctgtaccacctcccaaaaaggtcacaattgggcctaagactatagactatatcttcatcggatatgcgcacaacagcagtgcttatcgatttcttgtttataaatcggatattccagatatccatgaaaatacagttatagaatcaaaga

SEQ ID NO: 6032 - DNA, 3000 bp, Unknown
  misc_feature (1)..( 3000): cDNA_ID_2135271_gDNA_ID_1620837_Annot_ID_169951 3000 nt of promoter + ATG
ttatctttgtgtggatggatctattgggggaagtaccttgtatcctaccacagacggtagtgaaggtattagcgaagaatacgattacaacaagtggaatgatgtaatagtagaacaatatgtacaaggaaatcttgaggaagacgtcagtctcactcaacagactgctcaacatccaggggaattcagtcgtttattggaaacgtgtatgtacacgggtgttagtgtacctggcggagatacaggggaattcagtcgtctcttggaaacatgtacgtacactggtcttagtgtacctggcgaagaaacaatttctccattgggtttatggtacacgctgcgaagggcaaagggattccaatcttatttgtatagacgaagtcaccgcggatgaagtgatcgacggtattggagcttcctcaactgggacactgaatgataatggggtagttaccgcagctgaggcttaccaagtgtataatgaatttcctaagttacatggtggcgagttggcgaatctcggtaacgatgctgctcctgtgttcgatgacttactcaattttcgagctgatgagacacaggctgaaatcagcaccacatgcgaaactttgtttgttggaagtgtttttaagaatagaaaagtcctgcaacaaacaatgtctcttcaaccgataaagcaatgcttttgcttcaagcaacctaagtcatgtcctaaaacattgaagatggtgtgcgttgatgagacttgtccatggcatttgactgcctgcgtcgtgaaggattcagaaagtttcaaaatcacttcgtatgctacgacacatacgtgtaacatcgactctcggaagaactacaataaacatgctaattataagctcctcggagaagttgtgaggagcagatacagttctactcagggtgggccgcgagctgtcgatttaccacagctgctcctaaatgatctgaatgtgcggatttcatattctaccgcttggagagcaaaagaggttgcagtggaaaatgtaaggggggatgagatagcaaattacaggtttttgccgacctatctgtatcttctccaattagctaatccgggtacaataacacatctacactatacaccagaagatgatggtaaacagcgcttcaagtatgtctttgtctctcttggcgcttctatcaaaggtttgatatatatgaggaaggtagttgtggtagatggaacgcaactagtcagaccttacaaaggatgtctccttattgcatgtgcccaagatgggaacttccaaatattcccaatagcttttggtgttgttgatggtgagaccgatgcttcttgggcatggttttttgaaaagttatcagagattgttccagacagtgacgatttaatgattgtctcggacagacattcatctatatacaaaggcctaagtgttgtttacccgagagcgcatcatggagcatgtgctgttcaccttgagcgaaacctctccacctattatggtaagtttggtgtgtctgctttatttttcagcgctgccaaagcttatagggtcagggatttcgagaaatattttggactgttaagggaaaagagtgctaaatgcgcaaaatacctagaggacataggatttgagcattggacaagagctcactgtagaggagaacgctacaatatcatgtctagcaacaactctgagtccatgaatcatgtgttaacaaaagcaaaaacttatccgattgtttacatgatcgagttcattcgggatgtcctaatgcgatggttcgcatcgaggaggaagaaagttgctaggtgcaaatcttctgtgacacctgaggttgatgagagatttctacaagagttgcctgcgtcaggtaaatacgctgtgaagatgtctggaccgtggagctatcaagtgacaagtaaatccggtgagcattttcatgtcgttctggaccagtgtacgtgtacgtgtcttaggtacaccaagctaagaatcccatgtgaacacgctctagcagctgcaatcgagcatagaattgatccgaagtcttgtgtcggatggtggtatggccttcaaacgttttctgattctttccaagaaccaattctacctatcgcggatccgaaagatgttgtcatcccacaacatatagtggatttgatactcattcctccatacagtagacggccaccaggaagaccactgtccaaaaggatccaatctagaggtgaaaaccgggtatgtactaacatcgttcattcatctacttgtattttgagtattaccatgcggagatttttaacttcctatgtacgtcacttcagaaaaagagacagaaaagacttttaccaaatcagtgtttcacgctgtcgacaagcaggtcataacaagaagacgtgcaaaaatccaatctagttctggtgacaagtttctgagccggccaatatagtgtacgcttctgtgttttctcggtgtacgtaagtttatatataatccacctaactatgtacgttgtgtacgtacgtttaaactctacgttcgtataactatgtacgtttttgtctgtgtacgtgttaaagttcatgtaataagggtacatagaggtggttgctcaatattttgagtaatttgaaataagttttttgaaaatctaacttattccccctcttaaatgaacggagttggagatatggttgggtatattgtggttatgttggtatttaatggaaaggacgtaactgttgctgtttattgtcaaattaacgttataattaccctatatgacggttaccaagctattaccaaaaatttgaatcaagtgtagttggaaccgcattaataactgtagctgttccagatttcttctatttaagtctcctcccttccttaattttatccacaatcctcattctaaatccatttcttctgccggcagttatatcattcacaaaaattttttttgtctttcgattcgcttgttcttgctatccgtgag

SEQ ID NO: 6033 - DNA, 3000 bp, Unknown
  misc_feature (1)..( 3000): cDNA_ID_3079216_gDNA_ID_1620837_Annot_ID_169950 3000 nt of promoter + ATG
tcagcaactttatagagacgacaagggcttcatatgctgcccgaccccatggataagtcttcatggctttgtcgtcgaaaactcttttggcactctcaaatggtatcctagagttagtatgcaagccaaaaagtctaatggatagaagagtcaataacccaaaccatctacgcttttcagtaggccaagctctgcacgttactaagccctgcctaagttcatctagattaggaccttcaccggttggcacatgcaattcactgaagaacgctttgtagtcagctgcaggcacaaacttttctgtaggcagttcatctatatttaaacccgtgatatgatgaaattcgttcaatccaaaccggatgggtttaccagccacgatacaccaaagctccttcttcagtattctcagttgtctgcatagtagataatgtacggtcttaccagaccatagaaaataactatcaacaagcttagcaattaatctaagctctgtctctttcagttctgcccatatttcttttcctattgattctctaattgcagggaactctcccagctttatattatgattaatgcctttaccctccagattagaatccccctcttggtaaagtcttggagggtactcccttgcttggtcttcagacatctgtataaccataaatcagccgtaagcattccataactcagtcataacataaaacaaactcatccacagataccataactcaggcaaaacataaatctaactcagccatagataatataactccgtcataacataaacctatctcagccacacataacataactcagccataagataaatctaactcagccatattttaacagaaactcagacatcgatgtaaggttaaaccataactcagtcacagcataaaacaaactcagacacggatgaattgataaatcataaatcagtcggcaaacaaatagtaactcagccgtcaaatcaaatagatctaagaaatcggccaccatatgtcaatcaacgacgacgttaaaacccagctttaaaaaccatcgttacgcatcggaaaacgatttcagtgacgggaatcacttgagattgaacttagatgtcagagtcttacttaatggaaacatactcactggaacttagatgtcagatgtgacttcgcgcttacagaaatgcgactccggcgtctgaatttcggccggaacagacgagaaaagagcaaaacggcgaaagaaatcgattttgttccgtcgagagagaaagaggaagaaagcgacagtttttttttttttgggagatgatgaacagtaaagccaagaaataaaaaacccaaacgttatgcggtttggagatgattaatgacgtggattatcgtaatgacatggaatgatgacatgtataatcactgttttttaatttaatttttagttaaaaacgaattaaataataataattaattaaaactagttagggttgttaattgtaattacacaagaactgaaaacatctgagtaataaaaaaaaaatgtgttctattctaggaataaacatacaaatgtgttctatcttaggaattatttctatataatatgtatatgttcaattgtgatccaaaaataaatgtttcactacatattatggaaacaaattcgaataagtgttgatgcaaaatcacttaataatcagataactgaataaattttagaacaaaaaaaatggatcttataatgtcattgttttctagcaaaataatatgatctaccggggatcccatcctcggtggtgaactctactgaagtgtggttaactctgttgaagtgtgatgaatagtgggggagtagttaggtgacgactctgcttcaaatgtgatgaagtctggtgacgagtaacatgagctatttcacttatccctacaaacccatctacattaataacatcttgagagaaggtcaatctctactcccccactattcttttcggttaacttagatgccaacgcttaaaataaggtggatagttgagtccaatataactctaatatttttgaaagtgctgttacgagtttttttgaatgcttgtttccgagttcatagattgcatggtataggttattaatagcatacatgttcatcctacagtagtaagaaaataatgacagataaaggaaattacgtcacatattattggttcttatttgacttttcagcattttcccgttgttgttttattttagggtaaattgcaggccacacctgttgaccatgttttatttccatggattgtcaaaatcaaatgtggttttcaccatttatcttttcgcctgcaaaatgacgcttctgcccttgcgcttctctcttagtaactgttgaaatgtacggtttagtttagcaggtttagttacgtacactgttccggttcagttgaagattttttgtttcacgttgacgcgattcggttccgttacaagtgagattatttccattattccgaagtgacatcaacatttaatgcccccaaaaagtttagacgtgactattgtcacaattaatgcaaaatcatcattacatcaaataatattaaaaaaattattgataataattaataaaaaaattgttgagataaagaagatgaacccaggaacaaagaattattgagaacgtacattgctgctgaagaagtgttgatcttgtttttgtaccaagtttggagccaaaacaagcattgttcgtgtaagtaatgaagttcttttaagaagttttttgttatgtcatattaggatcttgattgtgttcgaactccatttttttatcagaaaatttgcaaaatctatatttgtttgtttaaaatagtcaaatgataattggtatttaggtttataaatgtgtagtatcgacattccatttgtttttttatatgtatagtatttttcagttgcatttaatgtgtgtctcctgaatttatgatgcaggtgggttatggatattcccgtatttact

SEQ ID NO: 6034 - DNA, 3000 bp, Unknown
  misc_feature (1)..( 3000): cDNA_ID_2135224_gDNA_ID_1620837_Annot_ID_169934 3000 nt of promoter + ATG
aatctcgtccatctcatagcacacatagtcttatgcttgctaattagctcgtcaatccgatatacatgcccgtcaacgctgatctcgtcaatttgacagttcgtgctcaccaactatcaggtcgtcaacccgagaattcctattcgtcaactgtcagctcgtctatccaaaagttcctgctcgtcgaatgttaaatcgtcaaccccgacagttcgtgctcatcaactgtcagctcgttaatccgatagttccagctcatcgactgtcagctcgtcaatccaaaagtttcttctcgtcaacagtcaactactcaatctaccagttcttgctcgtcaaatgccagctcgtccaactaccacatcgggctcgtcttcaagcttttcacatctcctcagcaactatctcctcgtatacatatcggttcgttacttaattgcaaagctcgtccagctcgtctagctcgccgacccagttaagaagcaatgccaaccttagaagaagtcttaccgaccaagtcaagtaacctcatcgaccttttactcggagaacttgcgatcgagtaacttaaagaccacaccaatcaggtgcaagaggccttgccgactcgaccaactagtcgacccgacgacttgaagttgctccaaccttgggaagtaatagcgtaaaaccagtcaaaaggtctcaccgaccagagaagaagtcttgtcgacaaggcgccaaacacaaaaatctttgaagtacaaactcattggagcaacgacaatcggcaatatcacatggccaaacatctcaaaagaaagagggaaagattattcgcaaccaaattgtcaaacccgttccccaccatgagacgatccagtccaccatactcgctgaactctccctcatggtcgctaagatccaatccattgagctccgcattaaatccgcgataactggaggtggaacgaatctctcaacctcgctagaccgcacatcatcttcgccgagctccgcttctggctcctcaagctcgcctctccaacgaatctcgccaactcgtcgagcatcctctaagccgagctccacacttaacagaattgtcgcaaaggatagctcacggtgatcaaagtaatccgcaaaacaaacttcttctatgacgagcttgcttctccctgtgtcgatctctccactatcctcggtgtgttcacctcatttagatctcacgctgaactcatcgcctagcatgaagacaacccacccagtccctaaacccaacttaccaacgtccctaatcctctttggcagatcaacatggctaagcgtgacaagccttgtgttggtttcctgaacctgaatttccgcgacgacggatacgctcagctctaagcgcatacatcaaaattaaaaaaaaaaaaaaaaaaacgctcgcttccgagctcatttgctatatagacaacaattggtttaatcccttctgggtgatacatatgcaacttcttctaaacgttatttttctaacgcgcacacaagttactactacaagtctaacttttacgagtaacacttgtcatccccacatcgtctccctggccaggagttcgattctaaaacgcgttcccacatggatgcagtggtgctcgttagataggtctaaaaaacctgttttcgaagaaataatccacatctttacttaagtaagctaaaacttacacttaaagatttaaagccgacccagattcgaactaaataagctgatagtaaggcagaacaatataagccgagtccgctcgcacgttctcgcttacctagaggcatccacagggtaagccggacaccagcgtcgcacctacaaagtacgacgagtcagtctcgcatacttcatacgtaagccttgtgattcgagttcaacgtatacaggataagtcaagggacgccttgccctataatacgtttcgaaatcaagcttaaacgccaaggaaaacctcgcaaaatataagcttaggataaccttgcacaaaaaactcaagaacaagcttcaagtcatcactaaattctccgtctgtctcatcattgtcacttcgtctctaagacaaactcctaattgcgtatttagataggataagccgagctgcagatcgcaccgaatctaaatttcgcaacataagccaagcccagccttgcattctaatctgaagtcaagcttagtctcgctcccaaataacaaacaatatcatgctgaatcaaactaccagttacggttaagccgagctcgatctcgcacatacaaagatcatttcctttactaaaatgcatgacgaagacatgatccacgacataacttaaagtcgtgccgatctccccatgcctaaaagaagatccgtaaaatcaacatcatcactcagtcttacgtcatctcctcgctcgccaaaacaagtttgccgcactcacggccataacaatccatcgtaatgccaaccaagtttggtaccacgcaaaatcaaccaacattcacactaatcgttttcgacgattgtgctaagcggacctacttccttgctactcgacacggatccacaaaacctaatgccaatccccgtaaatctatatccactaagcaagcgttccctgtcaagcgttccttgtagagcattactcaccaagcgttcttaacaaaactgtcaaacgttcctagctcaaaaacctcgaacgttcaatccttgcctaacaagcgagcgttacttaccaagcgttcatcgcagaaccaacaagcgtttctagctctaaaacacagagcgttcagtcctcaccgaactacaaagcattctcatcgccgaaccaaacgattgagcgttcttcaccaagctacaaagcaatcttcatcaaatcgccaaactaatctccagtcttgctaagcatcaataatcataacgagctacacctttgtcgatgccacactacatttatcacttacaaaacgttcaacctccaccgaaccttctcactatacaaagccatcac

SEQ ID NO: 6035 - DNA, 3000 bp, Unknown
  misc_feature (1)..( 3000): cDNA_ID_2105868_gDNA_ID_1620837_Annot_ID_169927 3000 nt of promoter + ATG
tttcgagatcctctaaaactgacaaaaatgagtttttattgtaaccctctgcctattccatattgctttgtggaaatgcttcattggatttgattctctcgaataccaacatttaagtgcaattttagtggcagtggacatatatgcgcaagtgtgcacatcttctcggcagtggatgttacagtcacttttcgagagattttcagttacatggccttcctcgatcgatgttttctaatcgttattgtgtcttctcataacaattatttcgtctagtattgctttccacctacaagctggtggtttttactcatctatgatcgatttgcttcttttcaacttaacaagtggtctttttggcatgcatgtacagagttttggaataattcatccatccattcttctttacaatatacacatgaccatgaaaaactacattttctatatcgtctattctggttctggtacaagagttcattatgaaacttctacaattctttcatatttctctatgttatgatcaacaaaaaaatttgaaacgacgacattagcattggcatgcacatgtcaaatagtaaacactgtccgatcccaactattattatatcaacaacaagttttttttttttttttttctcaaaacaacttttgtatttacatttgctaaaaacatcagattatttggtagatagaaatgtgtgattcattctttaccgcaaaaggttttgaaccgtatacgaagaatccgcggccttggccgaagaaggcggtgaatgaggcagcctagcggagaagttacgtagcggaaaacggtcgatattgtcatcctcatctcctttatcaaagttaagcgcatagctcgacggatcgtaatgaaagtcagcagtatggcggcgaatatgcttcccgtgaccgccaacgccacctactccaccgcccattcgatggatcagactcttacatttttcatgtgacttggacaacgtcctagtgagtcttggagatttggtcttcattccaccaccatgtgggctttgtgtagatttctcggtggtgaccggggatgatggtaggtcgtcgggaatgttgtcgtggtggtgatgattggtcgtacgaaaacatccggcgatgcaaaaccttgatttgagtttcttttgtagagacaagttggtcattgtttcgcttcccattttttttttacaaaaccaatgtttgttggttagatcaacaaaggaatgcaaaagagaaggaagacattgaaagaaagatcaaatctgtattagaggaaagaaaaacaaaacagaaaacaagtgatcgacgagatatttggttgattttcatttattattttttcttgaaatgaactgtttaaccaaaacttcggaggagaagttgaaattctttactattttaggaatatttgaatttccaattaaaatgaggttcaattttgtttcacgttaaatattaatgagtcttttgactttgtgagcaaggggggacatatttagggtaggaaaaataatatttatagtaatttattaaattagttaagattataaagttaaaaggataatatgaaaattttggaccaattttgatttgtgaatatagtaacggcatagctaaagcctaaaaacatttaatattaaaagacctcattggattttattttctcgactgtcacatttttgttttggcagaggtcttttatccatgtaactctattcagtatccacaaacagttttggaggatcaatatgggccttagaaatgaattaagatcatacttcactagagaatgtgcactcaaagaatgtgttgcgaggtttcatcgttaaatttgcattaaaggtaaggaacttgaagatcccatagcaaaattccatctctttggtgaagtcgttgtctagttgtcaccgaagctataaaggcatacttggaaatccttcatttgaaccaaattatttgctgccaggctgccagcagtgcctgtcttgtgaaaaatgaggctcaaaataactttttttttatgggtttatagaagaattttttttttttgagaccaaatcttaaaatgttatgaaaatgaaacctatgtattcaatagaaaatagataaaaattaaaaattgagactaaatctaaaaaatttagaaaatgaggcaacaaatatttttgaggtataattttgatactaaaaaccttaaaacttttggtggctcaatacccatgtttcttagaaatatgtcatgggccgggcctgactgccagtcaatggaaggaccatgagggtgtagataatgctatatatttgagattgtaaatatagctgataaactatatttacaacgaaaaatatttaaattctgacttagttaatgtaagtttaggcataatggaaacttttgtttataaatacgataaaataagccgtgggaaaatcgttttcgcactttcgctttaaacttttactcataattggtttgaaatttaaatcaatgaaaaaactaagttaaaactttaaattgcttcaaccttagttggttttttgtaagttcttcttatttttttcttgtttatgttagatatgatttttcatcaataaaagtagacgttaaaaaaaaaaaattacaaatcatttatataaaattgttgcattttcgaaagaatttttttatagtttccatttgatttttgtttctagaagtgtaataagaaaataaatccacttttaagttttgatgaattggataaccggtttgaacgaaacctggttttgatgaaatttttcccgacactgtaacacgataattagatttgttgagttataacattacgtgtcgaattttaattggatgtcctgcgtggccgtcttattagtcacatcaccgcagctaataacactcgacgagcgacctcatcgtctacatcgccgtcgcctgttaccgtccggtgctattctccttcacaatctcacatttttcgtaccggttagaag

SEQ ID NO: 6036 - DNA, 3000 bp, Unknown
  misc_feature (1)..( 3000): cDNA_ID_1829680_gDNA_ID_1620837_Annot_ID_50823 3000 nt of promoter + ATG
agaaacatagtcaaccttttgccccaacaaccactcgatgactgacgaaaagaatcaacaaaatggccatgtcaacattggtgctggagatgcaccaagggaccatcgttagaagaaaggaattgcacctcctgctatccagaacaacaacttcaagattaagagtggtctcatctcgatgattcagggaaacaaattctctggtttgccaatggaggatccactcgaccaccttgatgaattcgataggctctacaacctaacaaaaatcaatggtgtcagtgaaaacggattcaagctccgtttgtttccattctccttgggcgacaaagcacacatctgggagaagaatctgctccatgactcaatcaccacctgggatgattgcaagaaggcttttctatcaaagttcttctccaacgccagaactgcaagactcagaaatgagatctccggctttttacagaaagctggtgaaagcttctgtgaagcatgagagtgttttaagggttataccaaccaatgccctcatcatggcttcactaatgcctctctgctcagcactcattatagaggagttttacaacgcatcagaatgcttctggataccgccagcaatgggaatttccagaacaaagatgttgaagaaggctgggaattggttgagaaccttgctcaatcagatggtaattacaacgacgactgcgataggaccgtcagaagcacaactgactctgatgacaaacacaggaaggagatcaaagcgctgaatgacaagctagacatgattcttcttagccagcagaagcatgtgcacttccttgttgatgacgagcaatatcaagtctaagatggggaggataaccagttagaagaggtcagctacatcaacaacaaccagagtggctacaaagggtataacaacttcaaaaccaacaaccccaacctctcctaccgcagcaccaacgttgctaatccacaagaccaagtatatcctccacagcaacaacaaggtcagaacaaaccttttgttccctacaaccaaggtttcgttcccaagcaacaatttcaggggaactaccagcaaccaccaccacctgggtttgcacctcagcaaaaccaaggtcctgctgctcctgatgctgaaatgaaacacatggtacaacatctgctacagggacaagcatctaactcgatggaaattgctaagaaattatctgaattgcaccataagctgacctgaatgccaaaatggaggcattgaataccaaagtcagatacttagaaggccaatcagcatctacctctgcacctaaagttacaggacttcctgggaagtcaatacagaatccaaaggagtatgcaactgctcacgccatcaccatctgccatgatcgagagctaccaactcgacatgtccctgatttaatcattggggacaatgatgttcaagaaggggaggcttctactcagattgaagtctctgttgttgaattcaaccattctgatggttttcgccatctcattcaatccacctcggaagagaaggccgccactatcaagagaatagtgaaacgattcaaacctactccattaccctcacgtgctcttccgtggacattcaggaaagcgtggatggagagatacaagtctgctgcaacaaagcagctggacgagattgaagcagtgatgccactgatggaagttctctacctgattcatgatcctcacaaagatgtgagaaatttgatactggaaaggatcaatatgtatcaagatttagatgatgaaagtgatgccactccatctcgagctgctgataagaggattgttcaaaaaaacttagaagatcctggatctttcactctaccatgttccattggggaattagcttttagcgattgtctttgcgatctcggagcctttgtcagcttaatgccactctctgttgcaagaaggttagagtttattcagtataaaccttgtgacctgactttgatccttgcagataggtcttacagaaaacccttcggcatgctgaaagatctaccagtcatgattaatggagtagaagtccctacaaacttcgtggtgctggatatggaagttgagcataaggatcccttaatcctgggaagacccttcttagcttcagtgggagacgtggtagatgtcagggaagggaaaataagtctcaaccttggaaagcacaacaagttgcagtttgacatcaacaaaattccacaagagtcaacagaagatgaaaaaacctctaaagactatagagtgatcccaggagaagggtatgagactgagaaaataaaaaaagcttaaaaagaggtctgataagcaaaaagaaactatagagaggctagctcactctgttgaggaacttaggagtaagctgaatcagatgcagaaggaaactcaacctaaaggcgggattaacactatcccgagaaaaaagttcacttcaagatggtctgaagagacagattaccctccagaagagaaagaagcttattttgaagaaatgagaattaagtattctgctggagacctctctagggaagacgttgagtatgatgatgatatcagagaggattatgcagaccctctctatcattcactttcttcttgataagtgtgaggagtcaagctagagactttaaacaagctcccttgggaggaagtcccatgattatccttgtaaataatttttactttcttgttatttttgatttgttttagttgtgtttgtggttctcaggaaaaaaaaaaaagaataacgtgaaggtagagtaaaaattcaaaacttttactctacttatggcctagagatcgagtacattggtcgagtatgagtgatgtttaaaaactcaaaaaaatttaaatcatcattttactcgaccaacagaagctacagagtcttacagagagttcattaagtttagagatgattgtaggatttcctgagattttcctagtgaagatagagta

SEQ ID NO: 6037 - DNA, 3000 bp, Unknown
  misc_feature (1)..( 3000): cDNA_ID_1829676_gDNA_ID_1620837_Annot_ID_50825 3000 nt of promoter + ATG
attataatgatggttggtttctagtaacaatcgtaggtcaagattcgaacaacagaaataaaaacttaaaagccctactcgatcattgggtcgagtagaaccaacaggcaacaaaattaagaattaaaaatgcaatcaacaggtgacacaaataacaggtaaataaaagtgcaatcaatgggtgaatacaaataaatctaagaagaatagaagtcctaaggatggattcattgataagggcaactttagggttcatcaggtggctaacaggtcaaaggtagataccctagacgatagattcaagaaccgagtcaatccactcccactctcgtgacagagacccccataactctaccacttcctaatctcaactctcgttgatgaaacatagcaaaacatggtttaagcaacaaactaccaaagccaataaacatactagccaatctcttggtctatagcctacaaatttctggaattcatagatcaggcatccatttgaacgtcttttggacgctggacgtctatggtcgaatttccacattagccaccgaaaaccgcataggggccaacgaatccacaagggatctaacctaatcttaaccacctgactaacctaaagattatcctaatctaatccatcctcaagaaccctaatgactactcaagcaacataattaagaacacaaactcagaaattactgaaatcataccaaaatgtagatctaaagaaactaaacaactttactcaaaactaaatacaaaaactaaatagattaagagtaattaaattttgaagattcaagaacataaagaaaaactaaaggataaaagctagatcctttggacaaatcccaaagtgatctatttatagtaaaatgttgaaaaccctagattcactagacgacaagagacttgaggcggtttgggcgagtgctcgatcttggagatcgagtaaagagggtgctgcaaagtctgcgcctttgtgtccatgctccgagtgatcaattggtcgagtagatgtttcttcctctcctatctgtatgctcagatgtctggttgagtggggaatgaggaggatccgaagacgctttgatagatcaaaaagtctagtagatttggtcgcccttggtcgagtagaagatcgagtaagaggggcgagtataccgatctgctgcttcctctatggctgtctggatcgagtaagtgggtcgagtgaattgatttctcctctgtgcctacctggatcgagtgaactagttgagtagattgctctgctgcttccctcctggttggatagagtagagggtcgagtagagtccttgtaagctccttctacacctgaaaacataccaaaacatgcaatatgtatgcaagatgatcctaaatggcgaagtgtgcaaaataagctaaatgtgatgcaaaatgatatgaaacaatgagtgatcactaagctaaatgatgataaacacatgcctaaaataagtaaaataaagtgttatcaatagcgctcgtgagaccctaacggacgcagatgtagagacacagacaaaggatagcgtggatgagatgcagacgctggagaaaaattaaggattggttgaagtatttcaacaactgagttttcaatatgatatatgaaccttctgctagcactacattacttaccacactactcaaaaatctcgatatggaggcatgcttagacaaaacaaaatattctctcccaatggacatgagaagaaatctcaaaggcagtgaaggaaagatcattagaacattataggtggtttatctcctttcaaactcagaactcaaaactcttgtctctagtgggtatgattttggttgttatgtgtccttttgctatgattttgaacacagctagaaatctcatcataaacactcatatatcattattgcttcgttttttcttttcagccattatcttccgtagatgtagagagcgttgaccagaatgaaatttatcaaacagtagtaatgtttccaatgttttttttttgttatataatagggagattaactgtgatgggtaggaaattaggtgttattaccagaacacgacagaactttttttaattactgttatattatcgaattttttttattacccagcgtgcccctactaaacgttatcggaaaaaacgtaattacagggaatgccactgccacatcagaatttgttgacgtggattaaatgaactcagccggctgagttacggtatgttatatatgagtcataacgaaacggcgaagtatgagtataactcagccagacgttacggctgagttgtaaaatgttgcctgagttattgtataactcaggcaacggtatggttgagttaaggatggtcggccgagttataagaagttataagataacccagccaacaatatggctgagttatgagaaaaaggctgacttctttcctcgacgcggccgagttatagttttgattggcttagttatggaaagatgtgacggctgagttatggtcgagtgctataaatcagccgccaatagctggattacgatataactcagccatgttatggctgacttatttttaaaagattaattactataatatcatgcagttatggccgagttgttgaacgttacggttgagttagttgagttacgacatacaacggctgaattaactttgttttttttcctgttttaattactgtaatagtattcatgtcacggctgacttaaagatttgcttcatggctgtgttatgaactgtttgtttggtggctgacttgccacgtcatcacttcaaaacggcgtcggctgtaataatccatgtcatcattccatgtcagcatcctcgacggaaatacgaaacgtcccttgcttctttaaatcgttttcccagactgtgtccaccgcctgaacgttacaacatcaccggaactttcttttcttcattcatcttctcatacatcttcaatttctttcatctttctcttgat

SEQ ID NO: 6038 - DNA, 3000 bp, Unknown
  misc_feature (1)..( 3000): cDNA_ID_1829665_gDNA_ID_1620837_Annot_ID_50829 3000 nt of promoter + ATG
cactctcaaatggtatcctagagttagtatgcaagccaaaaagtctaatggatagaagagtcaataacccaaaccatctacgcttttcagtaggccaagctctgcacgttactaagccctgcctaagttcatctagattaggaccttcaccggttggcacatgcaattcactgaagaacgctttgtagtcagctgcaggcacaaacttttctgtaggcagttcatctatatttaaacccgtgatatgatgaaattcgttcaatccaaaccggatgggtttaccagccacgatacaccaaagctccttcttcagtattctcagttgtctgcatagtagataatgtacggtcttaccagaccatagaaaataactatcaacaagcttagcaattaatctaagctctgtctctttcagttctgcccatatttcttttcctattgattctctaattgcagggaactctcccagctttatattatgattaatgcctttaccctccagattagaatccccctcttggtaaagtcttggagggtactcccttgcttggtcttcagacatctgtataaccataaatcagccgtaagcattccataactcagtcataacataaaacaaactcatccacagataccataactcaggcaaaacataaatctaactcagccatagataatataactccgtcataacataaacctatctcagccacacataacataactcagccataagataaatctaactcagccatattttaacagaaactcagacatcgatgtaaggttaaaccataactcagtcacagcataaaacaaactcagacacggatgaattgataaatcataaatcagtcggcaaacaaatagtaactcagccgtcaaatcaaatagatctaagaaatcggccaccatatgtcaatcaacgacgacgttaaaacccagctttaaaaaccatcgttacgcatcggaaaacgatttcagtgacgggaatcacttgagattgaacttagatgtcagagtcttacttaatggaaacatactcactggaacttagatgtcagatgtgacttcgcgcttacagaaatgcgactccggcgtctgaatttcggccggaacagacgagaaaagagcaaaacggcgaaagaaatcgattttgttccgtcgagagagaaagaggaagaaagcgacagtttttttttttttgggagatgatgaacagtaaagccaagaaataaaaaacccaaacgttatgcggtttggagatgattaatgacgtggattatcgtaatgacatggaatgatgacatgtataatcactgttttttaatttaatttttagttaaaaacgaattaaataataataattaattaaaactagttagggttgttaattgtaattacacaagaactgaaaacatctgagtaataaaaaaaaaatgtgttctattctaggaataaacatacaaatgtgttctatcttaggaattatttctatataatatgtatatgttcaattgtgatccaaaaataaatgtttcactacatattatggaaacaaattcgaataagtgttgatgcaaaatcacttaataatcagataactgaataaattttagaacaaaaaaaatggatcttataatgtcattgttttctagcaaaataatatgatctaccggggatcccatcctcggtggtgaactctactgaagtgtggttaactctgttgaagtgtgatgaatagtgggggagtagttaggtgacgactctgcttcaaatgtgatgaagtctggtgacgagtaacatgagctatttcacttatccctacaaacccatctacattaataacatcttgagagaaggtcaatctctactcccccactattcttttcggttaacttagatgccaacgcttaaaataaggtggatagttgagtccaatataactctaatatttttgaaagtgctgttacgagtttttttgaatgcttgtttccgagttcatagattgcatggtataggttattaatagcatacatgttcatcctacagtagtaagaaaataatgacagataaaggaaattacgtcacatattattggttcttatttgacttttcagcattttcccgttgttgttttattttagggtaaattgcaggccacacctgttgaccatgttttatttccatggattgtcaaaatcaaatgtggttttcaccatttatcttttcgcctgcaaaatgacgcttctgcccttgcgcttctctcttagtaactgttgaaatgtacggtttagtttagcaggtttagttacgtacactgttccggttcagttgaagattttttgtttcacgttgacgcgattcggttccgttacaagtgagattatttccattattccgaagtgacatcaacatttaatgcccccaaaaagtttagacgtgactattgtcacaattaatgcaaaatcatcattacatcaaataatattaaaaaaattattgataataattaataaaaaaattgttgagataaagaagatgaacccaggaacaaagaattattgagaacgtacattgctgctgaagaagtgttgatcttgtttttgtaccaagtttggagccaaaacaagcattgttcgtgtaagtaatgaagttcttttaagaagttttttgttatgtcatattaggatcttgattgtgttcgaactccatttttttatcagaaaatttgcaaaatctatatttgtttgtttaaaatagtcaaatgataattggtatttaggtttataaatgtgtagtatcgacattccatttgtttttttatatgtatagtatttttcagttgcatttaatgtgtgtctcctgaatttatgatgcaggtgggttatggatattcccgtatttactatggtcggtgagtggaaatgcaaagaaggagaatggaaatttgaacctgaggaaggcatctttggtcgttgtgtacgagttcaggaaacc

SEQ ID NO: 6039 - DNA, 3000 bp, Unknown; identical to SEQ ID NO: 2575
  misc_feature (1)..( 3000): cDNA_ID_4254803_gDNA_ID_1620838_Annot_ID_50836 3000 nt of promoter + ATG

SEQ ID NO: 6040 - DNA, 3000 bp, Unknown; identical to SEQ ID NO: 2575
  misc_feature (1)..( 3000): cDNA_ID_4254803_gDNA_ID_1620838_Annot_ID_169983 3000 nt of promoter + ATG

SEQ ID NO: 6041 - DNA, 3000 bp, Unknown
  misc_feature (1)..( 3000): cDNA_ID_3079288_gDNA_ID_1620838_Annot_ID_169978 3000 nt of promoter + ATG
aaagcaaatatcgtcatatttagtttttgaaggaagttttgtcgaagaatattgataactgttaaccaaatctagtagatatttttaaattcacttgccaagaacgtcagaaaaacaacgtggtcattccatcaagtggtttccattagagaaataaattttattaacttaaatttaacaatgcattagttgctaagaagaaaaaataaaaaaatgttctataaatactttcttctatggtatataaacagataaatactagagacaaatttatatccacggatttgttggcggtccgcgggctacgaatatttaacaaaaataaatataaaatatgaataaataaacatttttatataattttaaaaataaaaatgtaaaatatgtgattgtgtaatgaaatttaatgtataaaattataagatttataaaaataataataataaatattttttaaattaaaaattgttaattaacgcattaaatggaaattacaaatggatttacaaaaatttaaaatatccaaccagtctcacatctttaggtgtgagtacaataggtccaaatacatttcttttattgagtgaatcaggttcagcttatattacatctttccattttatctagtcatgtctcttttgacattaatatacatactttggttctcgatcctcattttcctcatcaatttcctttgacaaaaggtatgagaaaacatcatcaacatcatccattttattttgatcctagatctttccattatggataaagttgataaaaatctcataatttccttcagtctcatggtgctcatcattgtcattagactcttgatttgcttcttccaaaatgctttctactattctaggaatatcatgctttccaacttcctttcattttctaggattttatccttagaaccaaatggtgtaccacgtttcaagcgtgttatggactcaattgtagtatctatattccacattcttgtggtatttcaattcgagcagaaacatttgcagctggtatatatgatgttgctaccttttggtatctgcaaaaagcatcaggaagttgatctgaaatactttgcaaatgcataattcgttgaacttctatttctgattgttttataagaggatcaaggtgtaacaaggatgatacacactattagatttcttttcctacttgcttattttcttttctaggaaaagaaaatatgttctcatcaaaatgacaagcggtaaacagtaccgtaaagacatcaccggtctgcagttcaaggtatcttgtaattgatagagaatcacaaccaatatatatctccaaccttctttgtggtctcatctttgtacgttgtagtggtgctatacgcacatacactacacacccaatatttttaaataggatatatatatatttggttctcaaccaaatgctaactagcatttcatcatataatctacatgccaccaacaatgtggtattccttttttatccttaatgaactgatttagataaataaaaaagaatttcgaaatagaaattaaaagaaaattaaaagaaaaaaaaagaaaccagtgttaaaaaaaaagcttcgccatcgttcttcttcctcttctgctttttccttcctccatcaccatcgattccaaacatccaccatcaacccgccgacctggatatccatcgcaacaggcggtcgaattaggtcagtttcttctcctctatcctctgtcgttgctgcattgtgatgttagtttaggtttttgaaattatataagattctcatatttcatatgaatgtttgatgttcgggttgtaaagttaagataaatcgattttaggttgccgaataggtattttcagtgatccttaatctaatgtataggttgaattcgagttgaattccatgatttcatatgaaagtttgggatttgggtttgcaaagtttagattaaccgactgttatgctaaataggtatgtattttcattggtaatcaattgaatggaaggttgaatcgatttagaatcgaggtggaggacagataggtttcatgtatacgtatgataagattacaagtggtataattggtacaatcactacaagaaatatgggcattgatagcacaaaagcatagcaaaattattgtaaatgctttaacagtattttatctggaaatgagactatataatagtagttttaaaacgttaaaccgaaatatatctttgcgggaagctaaaaagacagttttccgttaacacttagaccaaaaattaattaagcgccataacaaaataatatttcccaacacttagacaaaaaagtgatatttgcagaaactcaaaagttggaaggaatttgtatttttcccccatcagtcgttcttcgagctctcgccgacgagtacctgatttcatatattcatcggctttgtcgacttcatttccatcctcgtcgcatcggcatctcacaatcttcagctctgtcacaatatatgtatgaatctatagccgttgttatcctttaattcaattaattttcttctcaattagggttctcccaattttcaatttcatttcctttgatattagggttctttcgagttagtgtacgaattagggatctttactaatttcagttctatgtatttcagatcttgctaagaacttatataattcaacgctttctttcaaaggtttgtccaagtcgatagatttcttatgcctttgatttcttacacaaaaactttattgcgaatgtgattgttttttgtatcatacatcttgtgtgttgctgtctgacttgttttctttcttatacatgttttgtgttgctgtctgattcatgcttgttttgggatactgtctcaacggttcaaaataaggataacagataaaattaggcctcgacataaaaaccgtactcgcatacccgaaccggaaccgaacaaaaaaaaacgattcagggcgggtacgagtataaggattttacactgatg

SEQ ID NO: 6042 - DNA, 3000 bp, Unknown; identical to SEQ ID NO: 2574
  misc_feature (1)..( 3000): cDNA_ID_2113272_gDNA_ID_1620838_Annot_ID_169964 3000 nt of promoter + ATG

SEQ ID NO: 6043 - DNA, 3000 bp, Unknown; identical to SEQ ID NO: 2576
  misc_feature (1)..( 3000): cDNA_ID_1829711_gDNA_ID_1620838_Annot_ID_50837 3000 nt of promoter + ATG

SEQ ID NO: 6044 - DNA, 3000 bp, Unknown
  misc_feature (1)..( 3000): cDNA_ID_1829753_gDNA_ID_1620839_Annot_ID_50847 3000 nt of promoter + ATG
acaaaatgatgctctcttactttagtttcgccctcttttattcgtcctcatttttccctttcattgacgtcgtttgtttgttttttactaactatttttatgagttttcgaaaacaagtaactaattcattgacatgcatgttatttttgaatgttatttactttaatagtagtacattattaacaattaaattaagaaataaggtacaagtcaacatgcattgttaagtaaattattttctccctctctcacttttaaccttaaaactgcaacaatgatttaaacaaagaacataaactttaggacaaacaatcataggtttaaaatacatgaaatatcattgatcgatgaactttcttaaaatctttaaggacgctctaaccctcggaaagaaagggagtttaccaccctttcccaacctccacgtccacttatccaatctggttgatcagcgtgtatccaaacattagatcatacggaacaactcaacactatctagtaatatattttttctaaagtttatgatcaattataacccaaagagttacggatacaaatcctagtattttgatacattattgtcaatgataatttgcatataaatgcattgcattgagtctacaacgtaactactttttcctcctaacaaaatgcatgattaatttacagctcatttctagtaatggcaccaatttgaacgatattagccaaaccattggaccaaattgatggccaagcatttgatctacttttgtctttttcttggtttttatagctattgatctttcaccacttcgttcatttcgaaaaatagtcctctcaacaggaccttggaagaggcaagtcctactctcatgaacatggcttctcgaagataaaaccaaagtcaatgtcaacctctctccaacttgaaaattttaaatgctcaatcatttgaaaggcggcgaattcttttgtatttcccattacaaactatacaaaaacatcaccgtgactatataattttctatgcacataaaaacatttaacttatgccaatatatactttttagtttttacaaccaattttagtccactttcgactacgcaaagatgattttataaaacttgaaaatgacagaattaagaggttggcatcggctaattgattgcatgttataaaaatataactggatgactttctcattacagttttttttatcgacggctaattcgattttatccactgcatttagtttcttataagttctttactgcatatatatatacgtaatatatgtatattataatttttctttcttcctctactcgtcctaataattttgatgaaatggttttgtatttaaaaaatatactaattatattttcaggatacaacgacatttgggtagtgtaaatgcaaaataccaaaacaaatatatactatatgttatacaaaaattgtttaaacatgtaaaaaatgatatgcataagacaaaatcccattttaattgaaaatataatatatcattcgtgacgcagctgacgctattattaaaattgaggtgatgatctatgagattttttcctcttacaacaaatatgtcaaaggagacaagccagttgtatatacaagggattgagtgttttttccgttgtaatgatattcttcaattatgctattgtttgtatgatttcttaagactcgacttaagctagtagctttatataaataaaatagctttgttgtaaactaatcatcatgaaatttcaaataacaaaaaaaaactaatcatcatgattgtatttttaaaaaggaaactctctttcctataatacgataataatgagaacgcatctcctatcataatatacgtttctaaacacttattgttgttctcgtgtagaagcatgctcgaaattaatcaaaattatctttgtttttgttttgtttcacgttagactagcctcatcgatgtaagattaatgaaagattacccgttacaagtcggtaactagtaacattagtgtgtatataaataagaatattagtggttacgcgaccaaattattgcatagtggaaacatttaaggctatttttccaccattactttgcgtacttgaattgaagaactctttacattctcagcacatcaaggtgtctcctttgagatcaaaaaagtaggaaaaataaaacgaaaaagtactataaatattaatttcgtttacgaacaaaaaagtattaaaattccgtagacatttttggggggacaataattttagactcgtacaatgctttcatggaaatgagtttgttgttgaccgatggcttccctttatttttctttccacttttttattactaattaggaaactagtaatatttatactcgatgtataattcactaatcatatactttccaaaacgtagcaaataattcgactagaatatattgtccgtgaattaagtttcctcttttctttttttatgttaaccatcatgtttctgttatttgttgattttaataaccatactattttatacttttttaaaaataattgaaaataaattcagattacaagtctacgataatgattcttcttctttttcattgtagataaatttcttaaaagttgactacttttctgtcagtatatgtcacatttttctatctatcgttcgagaaaaaaaaaagaaaaaaaaaagtttacaagtgttacctctaaagtcttaaccaccatttctttctattttgtaaaggaatcaaatagttatttactatgtttgagttcatctcttgagttttctgaataaggtggtcccataaaaggtatcaattaattcacccaacgattataaaacaaaagtgtttacaccagaatatcgccaatcatagtttctctcattttataataattttctccatcttcttccttcctcttcaagcttatagaacctccaagaaccataaaactctctctgcaacaatctatactttcttcattacttttataaaaa

SEQ ID NO: 6045 - DNA, 3000 bp, Unknown
  misc_feature (1)..( 3000): cDNA_ID_1829749_gDNA_ID_1620839_Annot_ID_50848 3000 nt of promoter + ATG
ggcggttacagagaaagttagcgaatgcgaaggtgttgtctctctctctctctcagggaactttgccaatttggtctcctcacgccggcgatgataattgttttcccgcctcctcaacacgtgtgggcgctagagtctgattaactttatgaggcctttaaacctaatgagcccatcaggttgttaaggcccatcatatagttaaggcccatgagtcatagtccaaagaaatgttagtggaatcgaaactctcttttaagatgcatcttatatgactatatactttttggagctataaagttataagttgagagagagaatgttcaatgtagcccatataaatgttctgagtttcgttatatgtaagggtatgctattcttttggcattttatttccctaccaatacagtgatgtcttttttgctggagacaaatccattctaagatccgatttggatctgaagccttcaaaaaacatatagttctcatcaaacctgactatgggttgataaagaaattcgaaatcagatttcagcaatccgactctcttaggcgacatgcgttataacgatgcttaccaacactagatttactctcgagactagttatcactgattcttagaaagctttaaaattttcagaagtttttagagtttacttttcaaacaaacttagcacaagttgtaaaaacgtattttttcttttaaatctaatttgatattatattaaaaaaaaaaaaaaaactaactatcgtatcgtgatcttgtttttattatttttaccaaaattataatattttaggtaatgttctccgtaatatctttcactttcattttattatttcaatgatattaacattcataacaaaaaaaagaaaacatatagttggcatcgtaatttgttcttggttttctcatcctaccacggtgtgggatggttcattagttaaaaaagaagaaggtagatattgaaatctaaagagaaagtgtgtacttgattataaatcatgtagatctagcaaacgaaactgtacttgagttgccaaaaaatcattttgattttataaatatgggaggtttcattattcgtgcatgggaatcgaatgggtcaaggagtaaaaaacaaagaacgtaatggtggtgaatggtgtgatacgtgggttttattttatttttaaacgtcaacattattgatatctacaacaaatataatcattgtgtaagtataagaaacggtggtggtacgtgatcatttaaatatagttacgctaaaaaaagacgttcaccgacaggattttgtggagaaacgtacatatattcattacgcaccacggaaaaatacaacgatatgtccttagttaacaccttcatcccaagtttacaattaattccccaaaactttcaactttatgtagcatcctattaatgttccaaacattgcaaggattatatgtatatatatatagaaaatagattgtatataataaacaaacaaaactatcgaaggtagttagctcaattggtaaagatcctacgcgaagcttaaaggtcatcggttcgaataacgtttgagacaaaattaatattacatactgtgattttgggcttgggaagattacgagtttcggttctagaaagattataggtttcgctccaaaacctcttaatattaaaaaaaaaaacaaaaaacaatcaaacaaaactttacattttagataaaatgcgaattgtttttggaaatcacctgttcaatggtaaaatagtagtttactagttttttttttttgaattttaatagtttacttagaagtttaaataaaaacttggatgcatcaaattgaatgaagatgtaaatattaaattattaataaatccagtgattaaaagtacatagtttagtggacgatagatagcaccgtaccggtttgggagtgtttattttgtaagagcgtaacatgtgcatcggatttacaaacagccccaccactctctttcttcttcctctctcagccattagtttcaaaccgataaattatgacaattattttggttagtcaaagagttttggatttattggcctaaacttatcctggacaaggaaacgagaataatcctatattttttcttacaacaattactaattttgaaaagaatgattcaaattaagtaagagatctatattccttgtgcaggatctattggtacagaattccttaaatattttaaattttatttgccactctttgacaaactatatggttgtgtattaatttgacatccttgattactttagactcaatccaaacaatgatagtatgtgttgaaatatcttaaaagaatgttttaaatccaaattacatgattaccacttccgtaattatcgctcatgattttattgcatcctggaaaccattagatagattggtaggtgtcggggataaaaaaatcacagataaataatatatattaatattgtttttgataatgattttttccaatgcgtgatttagaaaatatcataaacatcaataatgaaaaatcataggtagatatcacaatttatatagttacctcttgtgtatgttgatgtgtgtttcaagtatgaaaccaaacaaaaagatggtctccttgttttacgacgaatgctaaattagttataattagtagtttagtagtactactactattttctttaattaaagattagtgtaattgtaacttttaagtataattaattaagacaatcgaggtaatgagattccaaacgtgaatccagccataaaatctcttttttaaaacagtcttcttcacttcacttctctgctctgctcttgcctctgtctctttcttcttcttcttcttcttctcattaaaagctgaacacaaagatctattctttcactaacacattaccagtttctgcatttgtattatatccttttctaaaacttttaaccattctttctccattcccagttcttagaaagagtcaagagcaatg

SEQ ID NO: 6046 - DNA, 3000 bp, Unknown
  misc_feature (1)..( 3000): cDNA_ID_1829745_gDNA_ID_1620839_Annot_ID_50849 3000 nt of promoter + ATG
cattgctcttgactctttctaagaactgggaatggagaaagaatggttaaaagttttagaaaaggatataatacaaatgcagaaactggtaatgtgttagtgaaagaatagatctttgtgttcagcttttaatgagaagaagaagaagaagaagaaagagacagaggcaagagcagagcagagaagtgaagtgaagaagactgttttaaaaaagagattttatggctggattcacgtttggaatctcattacctcgattgtcttaattaattatacttaaaagttacaattacactaatctttaattaaagaaaatagtagtagtactactaaactactaattataactaatttagcattcgtcgtaaaacaaggagaccatctttttgtttggtttcatacttgaaacacacatcaacatacacaagaggtaactatataaattgtgatatctacctatgatttttcattattgatgtttatgatattttctaaatcacgcattggaaaaaatcattatcaaaaacaatattaatatatattatttatctgtgatttttttatccccgacacctaccaatctatctaatggtttccaggatgcaataaaatcatgagcgataattacggaagtggtaatcatgtaatttggatttaaaacattcttttaagatatttcaacacatactatcattgtttggattgagtctaaagtaatcaaggatgtcaaattaatacacaaccatatagtttgtcaaagagtggcaaataaaatttaaaatatttaaggaattctgtaccaatagatcctgcacaaggaatatagatctcttacttaatttgaatcattcttttcaaaattagtaattgttgtaagaaaaaatataggattattctcgtttccttgtccaggataagtttaggccaataaatccaaaactctttgactaaccaaaataattgtcataatttatcggtttgaaactaatggctgagagaggaagaagaaagagagtggtggggctgtttgtaaatccgatgcacatgttacgctcttacaaaataaacactcccaaaccggtacggtgctatctatcgtccactaaactatgtacttttaatcactggatttattaataatttaatatttacatcttcattcaatttgatgcatccaagtttttatttaaacttctaagtaaactattaaaattcaaaaaaaaaaaactagtaaactactattttaccattgaacaggtgatttccaaaaacaattcgcattttatctaaaatgtaaagttttgtttgattgttttttgtttttttttttaatattaagaggttttggagcgaaacctataatctttctagaaccgaaactcgtaatcttcccaagcccaaaatcacagtatgtaatattaattttgtctcaaacgttattcgaaccgatgacctttaagcttcgcgtaggatctttaccaattgagctaactaccttcgatagttttgtttgtttattatatacaatctattttctatatatatatacatataatccttgcaatgtttggaacattaataggatgctacataaagttgaaagttttggggaattaattgtaaacttgggatgaaggtgttaactaaggacatatcgttgtatttttccgtggtgcgtaatgaatatatgtacgtttctccacaaaatcctgtcggtgaacgtctttttttagcgtaactatatttaaatgatcacgtaccaccaccgtttcttatacttacacaatgattatatttgttgtagatatcaataatgttgacgtttaaaaataaaataaaacccacgtatcacaccattcaccaccattacgttctttgttttttactccttgacccattcgattcccatgcacgaataatgaaacctcccatatttataaaatcaaaatgattttttggcaactcaagtacagtttcgtttgctagatctacatgatttataatcaagtacacactttctctttagatttcaatatctaccttcttcttttttaactaatgaaccatcccacaccgtggtaggatgagaaaaccaagaacaaattacgatgccaactatatgttttcttttttttgttatgaatgttaatatcattgaaataataaaatgaaagtgaaagatattacggagaacattacctaaaatattataattttggtaaaaataataaaaacaagatcacgatacgatagttagttttttttttttttttaatataatatcaaattagatttaaaagaaaaaatacgtttttacaacttgtgctaagtttgtttgaaaagtaaactctaaaaacttctgaaaattttaaagctttctaagaatcagtgataactagtctcgagagtaaatctagtgttggtaagcatcgttataacgcatgtcgcctaagagagtcggattgctgaaatctgatttcgaatttctttatcaacccatagtcaggtttgatgagaactatatgttttttgaaggcttcagatccaaatcggatcttagaatggatttgtctccagcaaaaaagacatcactgtattggtagggaaataaaatgccaaaagaatagcatacccttacatataacgaaactcagaacatttatatgggctacattgaacattctctctctcaacttataactttatagctccaaaaagtatatagtcatataagatgcatcttaaaagagagtttcgattccactaacatttctttggactatgactcatgggccttaactatatgatgggccttaacaacctgatgggctcattaggtttaaaggcctcataaagttaatcagactctagcgcccacacgtgttgaggaggcgggaaaacaattatcatcgccggcgtgaggagaccaaattggcaaagttccctgagagagagagagagacaacaccttcgcattcgctaactttctctgtaaccgcc

SEQ ID NO: 6047 - DNA, 3000 bp, Unknown
  misc_feature (1)..( 3000): cDNA_ID_1829737_gDNA_ID_1620839_Annot_ID_50851 3000 nt of promoter + ATG
catcggatcgattcgttgtgatagatttaatttagtcttagtaagtatcgaccgattttctgaaatgaagagagaagtttgttagccaaatgaaggaaaaaaaaaatagcaccaaccaatattatggtgacacgttctgtttcttccagtatcagaaaaatgtcttctcacagacatcaaagccacagtgtctctcctgttcagcgcattaattcccatttttctattttttaattttattaaaatttgaagataccctctaaatttgtccgatggggatggtctaatagatttttcgggttttgaattatatttgattaagaagatgtatttatttatttgaagtttcaattcaatcgtctctttatgaagtcatcttttattaaaagatatggacacgccaattttattgtatatagaattttcatttttcttaatttgcgacatcatagtttgcccattctagttgaactaattctcagtaatcatttcaacaacattccctaatattaactcttaattttgcattttattggctctaattagtatattatattagggtaaacaatagaaacaaaagtttttttttgttttgagtccaaaggcgattgcaaattataaaagccgagctaccaacacatagagtagttgaagcttttaacatgaggcccgagattggccgtccgcagcaaagaccgataagccccggatcacatactattcccaagtcatgtgaacacggtttatcggacaattccatgaactatatcactaaatagaatctcacaaaccaaaatatactaaacggtgcaaattcactttattaagaatggctaacactgaaacttagatgccgaagaaatgaagaaactattttctatttttgttttgaagttgaaaaacaaaaaccaaaccgtaaacaagaatgtacacccctctaatagaatattataaaaatgctaaagaatcacaaactgaaaccaaatatagagaataaagccggcgtaactactcctttatcgagatccgtttcaattttggtaacttttgcttgggacaaacaaaacaacaatggcaagtataaaacgtgttcttcatcaaaaccagtaataagattttatttttcagtcaaccaacaataataataagaaaaaaaacagtaataataataataaaatttccatataaaaacagcgatatacccgaatctaataaaataatactaaattaataaaagtcgttaaacacacaattaatttgtgagagccagcgaagattttttctgattggggaaaaacctaagtgaagaagagagacaatacaacaacaacaacaacaacaacaacaacacaaaagcagacctcaatttcttcacaattctgatctgggttttgagaaattcggaatctttctttttctcgtttggttaatgcctgggaatcacagtgagatttcattgaatgaacaaaacagagtcgatgataacgataccaagacgaagacgacgacaaggaagaagaagaagaagaaagatgtaacaatcgttgatgatgacgataatcaattcgataccaccaatcaattggtaaagagtaagaatcgatttttaggtaagtttcgtaagaaacccaaatcgccaaaacgatggtctgggtcgcgtaaaggtgggtgctttcgtgtgatgagacctcgaaggagagaaggaggtgatgatgattcttcggtttcgtctccagtttctgatcctaatgatgaaaggtttagtcatgagatgttgagagttatgttagagactaatgatttctgctctgatgagtgtaatccacatcggtgaatattttgtatgtttcgttattgggatttggggttgcttgattcttatatttatagattttttggttttgggtttctttctttggatcaatctgtatagaatctctccatcaaatggctatgagtgttttgtttcttatgttttagaccagtgatgattctttaaaagggcaattgtgtattgaatcagatttgttatcggtagatttcatttagttgagttagctttgtgggagatgatcaaacttatagtaagttcaatgtatttagattaagattggcttcagtgcagagtaaatttagatgatttttttgtctctctaatgtgccaaatgtgtaagatgatagttcaagacagataatgtgtgtattcgaagaagtttaggtgctcaagacttagtctattggtctactaaaactagcctaggactgaatatagcctgttgtgacttggtttacagagattttagtgatggctaggtttataatgatgtctcggtagattgtttaggatgtgtggtgtgcacatttggttgagagttgattgatagtctttctggtttcgtgaatcgaacaaaaagcaggttaagcaatgaccttgtccaaagaagagggaccatttagcattggatttcagtggtattgctaaatgagtatctggttacttcccattccttagttctattggcacagtgtttatctgtttcgattttttcctatatgagtctatgagagattttagttcaaagatttgtattgccttttagcttttctgaattgcctctgcattggagctcccatgaagtattctctcttgaaaagagaactgcagagacactgatacagaaaccagtcacataactcatataaccaaggatagttttagtatagtatgattctccaaatgatgtgtacataccaatttaactacttattactctaatccaagttgagttaaaaaaaaaaacactatgtaaagattgatactttatggactaaaaattgaaaaagttgacaacttggagccgcccacagttaaaaaagtaaaaacctaatcctaagacccgaaaccactcaaccaaaaaactagggttctgtttctcgtctctctctcaaacccacattgcacaatccatttctcgtttctctgatttagatccaaagatg

SEQ ID NO: 6048 - DNA, 3000 bp, Unknown
  misc_feature (1)..( 3000): cDNA_ID_1829733_gDNA_ID_1620839_Annot_ID_50852 3000 nt of promoter + ATG
ttgtgaaaggcagttgcaccacaagtccacaaccattggttagagataccatactacaacatattgatgccttcatgtagctacatataaaacaatatcatgtcaaagatgatacatcttcaaaaaaaaaaaaaaacgattataatgaatgagaaatatttttttaaatgtaaatagtagattaagaaaaacattatttacaaaagtaaaatgggtgtattttaaaaaactttatgaaactataaaatagtagatgaattttgtcataccaaattaggttgaaacatgttataatatttttcaaactttatgaaaaattatttaatatgtgtcattttttacatctaattggtcacatagattattttttcatgcaagtaatctgttactttaaaacttatctttaacatttaaattgttgttatagacattaagttaatattaaataaaatgttcttaaaatactttaaataatattgtaccaaaaatgttttcaatattcttttttcgttaatttattgctaatacagtcgaccttaaaagcaaaagtagatttatatagctgttgccgacaaaaaacatttccactatattaaaagaaaagtagaatacaagatagaatacgattctaatacacgaaaccgataaaagttgaaacttttttaaaactaagctggtgaaaactaagtcttaaaaagaagcaaagtaagagaaaaatgaagtaaatgacaaaagaatctaataagtaaatcttaaattcaaaaccatcaaaacccgcaaacaatctcagagaaacagttggcgtcgaacctgaacaaaaaaatataagcttaaaagaacaaacaaacagacaatttccaatataccataaccatagaaaacttaaactgaaagctcaactagtcacaaccgagtagaactgagagaatgaataatccaaagacattatcctgcaaagatataaaaaatgactacttctaattagaaaatctcataagaaatttgagtctctttggttgattaaaaaaatcacataatttttttatataatatacctttgtcttagtaatacaacgaacaatatagtatttgaccttcattgagacatagccaacgatttggtcaccaaaacaccatatgaagcaatgacatccctatggaatatggatctgcctctcctttcctcaattacacatgtgataatccccaattgggatctacaaccaaacaaattacccatcttgtttttggcaaatctttaccaaaaatgatcaataactccaaaaccatcctcattctcattcttatggaatacaagtctctcaaaccaagtataggatcttcattctattttctatggaataaaacataaatctttaaaaagggtgaattttttcatagcagaataggttgaaacattttatgactctttatttcagccctaggggtgaacctctttcattcaccttctcttaattaaccaattaaaatttatcatgtcatctaattaaataaattaaaacaattaatattaaataaataaataaatttattaaaacccactaaacttatttaattattaaatctaatctctaaccatttttttataaacccaaaccgatatataatcccgtttaattacaaaatctaaaccataattctcttttgtaaacccaaactaccatttaaactcgtttaatcgtaaaaaatctaaaccttaatcgtattttctaaacccagaccaacatttaactttgtgtaattataaaatttaaatccgtttataaacccaaaccgatatttaacattgttttatcataaaatttaaagtctaaccctttctaataaacccaaaccgatacataatttcgttttaataaaaaattaaaatttttaattaaataaattattatttttattattagatgataaatcctgattggctaaaattaagagggtaaacagttaacccaagtatttttcttttataatcctttttgaactttatgacataaaatatatgtttcaccttttacatctcatttgtcacatagatttatcttacaaacttgcaatctattattttaaaacttttcctttaacattatacatctacaccaacattaaattaaatattcttaaaatacaatcactaatcttataccaaactgtttttcaatattcttttctcctttgatatataacaaaatactaaaattcaacgatatttctttctttatttgctattgcaaaccagaaaaccttatgtatcctttgccgacaattttaacaaactaattaacaattgtaatcattgaattgggtaagacttgtgaataaataataatgttaaacaaaatagattattccaaaaaaataaaataaaataaattatgaaataatttagggtttgaagttcacaggctgtattggatggacgttgaatcgattccacctcatctaaataatctcttcacaaaaccaaaattaaaaatcattcctttttaacaatcttctgcattttcgaacttgctttgctgtgataaagttctctcctttcctttctaaaggaagaagaaaggctttatctctcaaaaccctcatccacaaaatcccctttaatccgctaatcagagggtttttctgtttttgtgttgcttcgttactacggttacattcttctcttccccttttgatttcaaaggtacgaattttatcctcaattgcgtttcgatcgtatctcaaattctcttcgatctctgacagaaagtttccaactttagtgaatcgcgaaattgggttcgtgttcttgctctgatttcggtgtaacccttcaatttcagaaccctcttgataccttaagaagaggcaatttgaagttttcttcacagatccgtcttagctctttctagaggtttgttgtataccaaagatctctttttttttttgcatttgctttgatgagtttggtcatggagatttatgtgtgtttgcagaatg

SEQ ID NO: 6049 - DNA, 3000 bp, Unknown
  misc_feature (1)..( 3000): cDNA_ID_1829731_gDNA_ID_1620839_Annot_ID_50853 3000 nt of promoter + ATG
ccaatacagcctgtgaacttcaaaccctaaattatttcataatttattttattttatttttttggaataatctattttgtttaacattattatttattcacaagtcttacccaattcaatgattacaattgttaattagtttgttaaaattgtcggcaaaggatacataaggttttctggtttgcaatagcaaataaagaaagaaatatcgttgaattttagtattttgttatatatcaaaggagaaaagaatattgaaaaacagtttggtataagattagtgattgtattttaagaatatttaatttaatgttggtgtagatgtataatgttaaaggaaaagttttaaaataatagattgcaagtttgtaagataaatctatgtgacaaatgagatgtaaaaggtgaaacatatattttatgtcataaagttcaaaaaggattataaaagaaaaatacttgggttaactgtttaccctcttaattttagccaatcaggatttatcatctaataataaaaataataatttatttaattaaaaattttaattttttattaaaacgaaattatgtatcggtttgggtttattagaaagggttagactttaaattttatgataaaacaatgttaaatatcggtttgggtttataaacggatttaaattttataattacacaaagttaaatgttggtctgggtttagaaaatacgattaaggtttagattttttacgattaaacgagtttaaatggtagtttgggtttacaaaagagaattatggtttagattttgtaattaaacgggattatatatcggtttgggtttataaaaaaatggttagagattagatttaataattaaataagtttagtgggttttaataaatttatttatttatttaatattaattgttttaatttatttaattagatgacatgataaattttaattggttaattaagagaaggtgaatgaaagaggttcacccctagggctgaaataaagagtcataaaatgtttcaacctattctgctatgaaaaaattcaccctttttaaagatttatgttttattccatagaaaatagaatgaagatcctatacttggtttgagagacttgtattccataagaatgagaatgaggatggttttggagttattgatcatttttggtaaagatttgccaaaaacaagatgggtaatttgtttggttgtagatcccaattggggattatcacatgtgtaattgaggaaaggagaggcagatccatattccatagggatgtcattgcttcatatggtgttttggtgaccaaatcgttggctatgtctcaatgaaggtcaaatactatattgttcgttgtattactaagacaaaggtatattatataaaaaaattatgtgatttttttaatcaaccaaagagactcaaatttcttatgagattttctaattagaagtagtcattttttatatctttgcaggataatgtctttggattattcattctctcagttctactcggttgtgactagttgagctttcagtttaagttttctatggttatggtatattggaaattgtctgtttgtttgttcttttaagcttatatttttttgttcaggttcgacgccaactgtttctctgagattgtttgcgggttttgatggttttgaatttaagatttacttattagattcttttgtcatttacttcatttttctcttactttgcttctttttaagacttagttttcaccagcttagttttaaaaaagtttcaacttttatcggtttcgtgtattagaatcgtattctatcttgtattctacttttcttttaatatagtggaaatgttttttgtcggcaacagctatataaatctacttttgcttttaaggtcgactgtattagcaataaattaacgaaaaaagaatattgaaaacatttttggtacaatattatttaaagtattttaagaacattttatttaatattaacttaatgtctataacaacaatttaaatgttaaagataagttttaaagtaacagattacttgcatgaaaaaataatctatgtgaccaattagatgtaaaaaatgacacatattaaataatttttcataaagtttgaaaaatattataacatgtttcaacctaatttggtatgacaaaattcatctactattttatagtttcataaagttttttaaaatacacccattttacttttgtaaataatgtttttcttaatctactatttacatttaaaaaaatatttctcattcattataatcgtttttttttttttttgaagatgtatcatctttgacatgatattgttttatatgtagctacatgaaggcatcaatatgttgtagtatggtatctctaaccaatggttgtggacttgtggtgcaactgcctttcacaatttcaacaacagaagttaaaatgatttttttttgaaagaaaaagttaaaatgatcttctacttttcattttacctggtggataatttaacactaaagattgaaaaaataaaaatctatttaaattttcggtgatggatttatcgatagatttctaaataacaatgattaacgagatttagttcaataattatcaacaaggtggaagaaaaatagtgtttaaggagggtgagaatgagattgagactagtacatccaaaatatgaaaataaatatctctataactatatccatacctccaatgatccaaacatggccagaagcccagaatcagaataataaaagccatacaatggacctaaataaacatagcccaataacggcccactaaaatctgatattttacatcaacttgagtggtagaaataaataaagatagggcagaagcagagaagcaaaatcgtggaaggttacaaagcctttcaaaaacctcactctctcaactctcaaaccttatctccttccttctcttctcctctcctctccgtcgagcttactatctccacaaa

SEQ ID NO: 6050 - DNA, 3000 bp, Unknown; identical to SEQ ID NO: 6048
  misc_feature (1)..( 3000): cDNA_ID_3079329_gDNA_ID_1620839_Annot_ID_170026 3000 nt of promoter + ATG

SEQ ID NO: 6051 - DNA, 3000 bp, Unknown
  misc_feature (1)..( 3000): cDNA_ID_2105085_gDNA_ID_1620839_Annot_ID_170024 3000 nt of promoter + ATG
gaatgtaaatggatcagcattgtcgtatcaataaaaaaaaaacttaatataatgctacatcaatattgttttagttaaaattttctacttgtctagttttcatatctactttttatttattttaaaatcaatgacttctaataaattaattttctacgacaattttacaatccattaaaatccaataatccatagaaacttagaagatgatagataacaacttaagtaaggcagtatgaaaagttgaaatgcaatataatttttatttttgagttctaacctaaacaagttttcaataactttgaataaaaacaaatttaggttagaactcaaaaacttgttttcaataacaacaatggaaatatgcacaccactaataaactttcttgtatgaaatggctaaagaacgagtagatcgttgttgaccattccaaaatacaactttctacttggcctctaatcgatttgaaattgaaaatgatctagattttttagactattcatatcgagatcagtatcctgatcttgaaaaagcctcttaattatgtttcattcaatcgccaaaaagtaaggtcggtttggttttacagagtttgtctttttcctgcaaggttcatctttccgggaaaaaaaaagtaagttttatatttttcttaacttcttgttagactaagaaaaccaaattttaaactaacgagttaatttacatatacattttttgagccattttagctaataaatcctaaacttgaacttatttacaataatgccattagcattaaatcttttttccaaactaattaattttactttacattcttaatttaaattgtcaatcacattatcaatcaaatttaatccaaacaaacttcacatcaatcccttaaaattagcataaatatatttgttaacaatattttaaaacaaagttttttgtttaaataaatattattcttactaaacgtttttgtttaaataaataaatcatgtatttgaacttatttacaatgtcatgcttaattatttaggaatgaaaatatttaattaaagatctaaatcttctaaatccttgcttttagatttattatgtcattacctaaaaggtaaaaaatattaactttttaaatataattatttctatatttaaacttaataaaacgttatcaatatttaaacttttaaaaagtttaatatatcacaattttttaacatcattatataatatatagagtttaaaaaaaattcaaatttttttccgtcatatcttgtgattcgaaattttaaaaatgaacatattttaaccaattggcgaaaaatgtgtgggttcaacgtcccgcatcgactaaaatatttagacaaatgattcgtaaacatatcataaataagatcagcattaataaaataaatggtgtttttatatatactaactttaaaaataaattgtccccgcggtacacagcgggttaaaatctagtaatagtatataataagatgacttgagacaaagaaaacaagaaaatattcttttcactttatcatgcaacttaaaaaaaaaatacatgaattatcctgatgctgatgtcagtttcactttcaaccatccttttaagcagttttagttccaatttgttttcgggatttaggcggcgccatgactgcgactgcgatttttgcattgtccaaccagaacaaacaaacaacagtgtaattgtaaaatcatgatgtggataataatacatatgttatgtggtttgcagaatgatatcgttgtttgctatgacaacatagatatacattatccacgcatctatggtttctcttgaaattacaaattatttttgtgcgattcacaaatacaaactaaaacatgatgggattaacatctactcttagcgttgagagaattggcgggaaattattgtgatcgatgaatgcaaaaatgttgtacatgatatagaagatacaattgcaactaatcgaaaaatctttgagaaccattcttcaacttttatggaagccattagaattcaacaaagtgactatcaatggtcttgagcttctccaatacctctccatagcaatttaattatcaacgtacaacatatatatgtatatctcatcataatattccccaatcatactcataccgttttctaccgtcggagacgtgaggatatcttctaagttctttctcttatgttctagaccaataatgattcttttaaaagctaggtgtattgaatattgattctgattcacatagcatagttgttatcgttagttttcattgagttgtgttttcttttctttacctttgtaggagatggtcgaactcataataagttcaatgtattagattaagatttgtcttctgtttgtagtaaatttggatgattttttaagattgtaattcaagtcggacattggtgtatttgaagaagtttatgcactcaaactagcctaggactgaatgtagcagattatagatgatagtctgttgtgacttttgtttataagagcagctataatttttattattttattattttatctcagattagtcgttgacaatatgagaaagagattatttatgtaattgctggagattaagcgtgactaataaagcatcaattaaggaacagaaagaaagaaaaaaaaaaagcaagaagagagatagcatgataaaggagatgataactttacagaacataaagactttacaaaacagaatgtgatgatttgtgacaaccacctcgttttttttaaataatatgtgctataatgagaagcaacacatttaaagattgaagcttgtctgtaaagtaacaaacttttttggtcactttgagagaatcaagaggtatcattataaagctgtaaagggttggtgaaagccatcacattttctgccaagcttttaaaagaaactgatgtgacaagtagaaagaattttgaagaagcaagaaaggttatatgaggagtttggtgtataggaagatg

SEQ ID NO: 6052 - DNA, 3000 bp, Unknown
  misc_feature (1)..( 3000): cDNA_ID_2135381_gDNA_ID_1620839_Annot_ID_170020 3000 nt of promoter + ATG
aatctcacattaacagagtttgattatctaatcaccaagaagaaggtaagaatcggttgatgcatctctacatttgattattgttttctctctcaaaatcactgatttgtttgtttttgctgcaacacagctggaagatgatgatgaagttgctgattttgtgaatcctaacacaaagaaggaaacattggcacttggtgattcgaatatgaggaatctgaaatgtggagatgtgattcagcttgagaggaaaggctatttcagatgtgatgtgccttttgtcaaatcttcaaagcccattgtcttattctccattccagatggaagagccgctaagtgatcaatgaactatttttgagtttcccattttatgaacattgtgttgagaaatttgctctttaggttttaaaacaatgaaaacaaagctttttatcagttctttagtttcatctcataatagttttaaagttgcaaactttatattgattcattcttctttgcttagtgtttacaatataaacaaaaacaaactcatttcttgggtgcgtatctcagtttgatcttcttaacctgtttgtgtttgagctggaatgacttggccagaatgtcatcgggaagagctccaaagagagaggcgacaagtgattgtgttccgggcaattggctatcgaaggctgcgagtacagatgctggactgttggcaatgttcttctggaaatggatgagtcccttggggaaggtgaaaacgtctcccttgttaaggttcttggcgatgagttttccagcggttgttacaaagccaacatagagctgaccttcaaggacgaaaatgatctcggaggcacgtgggtggacatggggtgggtttaggccgtttggggcgtagtcgatgcgggacatggagaggccgagagtgttgagtcccggtagcttttctacgttggctccggtcacgactgagccggtagaggtgtttgtggcggcaatgttggctaagcctttgaagtagaagtcttctggtgttatttgtgttgagtccttgcaagtgtatccgttgaccttgaccgcttcatttgtgatcaaaagagagcaaaacacagttagataaattttgacaagaagaaacaaaagacaaactaacttcaaaactctattattatttggtatgatactattgaaaaagaatgttgtccacctactttatattttaacattttgataaatactatatcatttataaatcctgccaaagttcgaggaaactcttgaataatataatacaaaatcgagaaataaagtatagtataaatgagaagatttcgtttcataatatctcaattggtggcaaatttcttaacatgatataattttataactagaagaggacaaaaaaccataatatcatgtggaaattgggatctataagaaaaaacaataaaatgtttttaccaacgatgaacaaaaaaaaagaggtgaaaacatgtcacgggtaaggtaaaattgattgaaacaaaatgtgttagtgaggtaaataccattagacaaatcagcaacacaaacatcttgaagcatctccgcggaggccatggctacaaacaacattgtaacaacaacaacaagatgggttgcaaaagacgccattattgttgttgttgttattttttttctgaaaagagtttgtttttgatgaatttataaattactaataaattcacaataaaaatgccttgaatttggtattcttataaacaccgaggatgctttacaatgtttattattaggccaattgtgagaggtggagtttaattcttaatttagccaaaattaggtttttaaattttaattgttggtgattaacaagagttgtttattggtgaattgagacatctcatctaatctatttggctttagtaccgtacgaggaaactctcctaaattaaacgtggccacaaaaaaatcgttgtatggattaataaaatagaaactagatgttggcttgtaatttcgttataactcagctagctttgttttgtttttggccaaacgactcaaatctaatacaaactctcattttacttgaggcttggataaataaccgaactgagaaaaccaaacaagaccgaaccgagatttcgtgttttggatcggtttcggttctttcggctgaaccgatcgacaggactttaattttggttagggtcaggtcgaacctatctatttctcagatacttaagaaaatggattataccaaaattaaaccggttttcacaaaatttagaccgttttcagcaatagccgaaccaaaccaaactgaatttaacccaaaacccagaatttagtcaaaacataactgaattaacaaattaaccggaaaccggatcgaaccgaatttattttaggttaatatcgacatctgtataattttgttggcgataaccgaactaaccgacccggagaaccgaagtcgcattcctattgaattttacatttgtaaccaaaccggggagatttggtgacttgagatttggtttctgggtcgacagagattgtccgctaaaatgtcactgtcattaacaagtacacaacatataatatgttaaatagatgaacaagtgaacaaatggtttaagacttatgactaacaaataccctcatggataaactcacaaaagtcccaagttcagcttgaatcgatatttagatatatattatcaactatgtaaaaacccaaatataatatgtaactatattaatataagtgtagacaaaatgtatagactacataaaatataactagagtaagctcgttgacgcaacagtttgggagaaagacttaaacgaagtcaagtcgcttttatttaatgaagatgttgagaaatgaagacaataagaaacaactcaagtgcttctttcatcaaatctctcctatttatatgtttctaatttcttctcctctattcatatctaaatcccataatccttgttaatctctccatcatg

SEQ ID NO: 6053 - DNA, 3000 bp, Unknown; identical to SEQ ID NO: 6046
  misc_feature (1)..( 3000): cDNA_ID_3079341_gDNA_ID_1620839_Annot_ID_170019 3000 nt of promoter + ATG

SEQ ID NO: 6054 - DNA, 3000 bp, Unknown
  misc_feature (1)..( 3000): cDNA_ID_3079362_gDNA_ID_1620839_Annot_ID_170009 3000 nt of promoter + ATG
tgccaaaagtagttatcaaatttttttttttctagcgaataagttcttaggtttacatgagctcaattagttcattgatcattgttattcaaacttaatgaagtgtttagtttccaccaaaaaaaataaaatgaagtgttaagtttgactaccgttatgtttaggttagtgacaaaagttatgttattaaaattgattagtgtcaaaagttaaaccatgttaatcttttatttgataaattagacgtacagatagaaaaagtacgcatctcataacagttgaaaaacaataaaatcattgaaaaaagtttatgttcctatttaaataatttttagtttaatttttacaaaatttgttacgttttcttttaaagtgaaaagctttacataaaacacaaggataaaaattaattacaattttaagaagacatagtttttatagatatttttttgaacatgctataattattcgtttgaactttttttttaacgtgctcgaatcaataaccagccaaatcgtaatgtaatttctcgatctatgctattgaccatccattcgaaacacatcacattttataaaccaagaaacataatcatctaagaatagtgctatcccatatttcatgatttggtctaaagattcttcaatagggtttatttatgcttagacctacaagaaataaaagacaagctagagtaaaagtaggctataataattgtatacaaattgttctgaagtaacagattcatgatttaaaaatcaaatcaagcccatcaatttggctttgaaacgctttgtgtcaaaatggacaagacatgacttccttcgtgtctttcgtattagaaccaaccatctaaaagctctcttcctttttctctaccaacttttgtcttctatttaatttaccaaatcatgggaattaaataattagatgaataaaggatcggaataacaagttctatcgtacactgtaagagcaaaaagaagaccgaaatcttggttgaaattgttgtcgaaagatctcattcacgagatcacttattaacttacgtcaaaaaattatatcgaatcgaaagatctttgtgatattgagtaacgtgaggattttattttggttaaagactaacatatgttgatctttgataatcaaacctagtaaaacaaaacatactaaagggaaagagagacgatacatgcaattaatgatttcaatcctccgtttaagaaactctgattttggttagaaactattagctattcattttggatatcgaaaattcgtttagatctcaatgcaactaagaataaatgtgtgtaaaacagaaaacgatgaaatctcaagtgaagtgatatatcaaggttttaatttttaaccgagtttttggtgttttatcattgtgtttttattcgagtttttagtgttttaattagtatattagaatgttttcaggtaaacatatgaaaatgatgcaaaacttgagtcaaatggtaaaaaggattaattttcttgaacaagacattataccggtccatgattaatcaggctaagactgatccactcttcaaaacttcagaccggtctaagcagaccaattccaaaagcatttatgaacagtctatcctttagcaagccttccattcaagccataaggccggtcccaaagattgcttcgtctaataagaacacgtacgggtaaagacacacctttgaagaccggactaagacaccgaaaccagctccgttgcaccagacccgtccagtcctcatgaagtctaatccaaacagtccgaatccaatagacctgtcccaactccttcacgcgggactagttcagtccgagaaagaaagagaaggtattcctaatctgtttgggacttcgccaaactaccgactctaagaagatctaggcctattagacggatttcaaaagagatgatttcatactcttaaatttagagaagagttccataacactcctttttaatattttcgatttatttatgcattattctttatatttattttcatttttttaccaattatgagtatatagtttcattattggattttagggattcaaaaaggattcatgaatcattagtttagaatcattagattaagtaagcatcttaagagttatatgtctactgttattcgtaatgccgtaactagtttgatcacccaactacttatcttatgtgaattaacgcagtaaaagtggtggaattgttggaaaatatcctagccaacaaaagcattgtttacgaagttttgtgaacctatcaaacttaaacgtttataaataaatattttcatgaaatccaaacgaaactttaggcttttaattggttagatatcttgactgaactgtcaaggaaacgctctctgacccgataatcgatatcttgattggttagatggagctcgactgttctctcatctcttcaacctctgttaacgattctcctgctgttttggcaccccgaagagccaatccttaccaattatcccttatccttcgaagctgcaacgtatgggtttgctcttcgcagatctataaagtttggtacgctctcgactccctctgatgcccatccccaacggaaactaccggagcaaaacggcggcggcggcggcggcggttctaacctaatccttctccaagtcccccgcttgggccatttgtcttgccatttgggcttaggcccaaaccgtttatttctacggcccaacttcaaaaggtgctcttcaatttcatttttacaaaagcccaggtattgcgtgaagcgtctgttgtcctctcttagctttaagttgtgtcgattcatggagtcaatggtttgtggacgccacttgatctcatatcatacctctttgctctgtttgctcaacatttatctgaaaacctgccctttagaatcacctagaagttctatcaaagtttcccaaagcttgaagaagactctctcggatagcttacattatcacggccgtttgca

SEQ ID NO: 6055 - DNA, 3000 bp, Unknown
  misc_feature (1)..( 3000): cDNA_ID_1829890_gDNA_ID_1620841_Annot_ID_50886 3000 nt of promoter + ATG
attgaaggaattgagaaagttgcaccgttcttgaaagtcattatcgaaaagtgagttctcttgttctctaaaattgttccattcttcatgacattaaatatgaggaacattttgactaacagtggacctttttgttcacagagatttcataaaatcgctgatacaaggtttgctagccggtattgcgttgaagcttttcctcatctttctgccagccatactgatgaccatgtccaaatttgaaggctttacttcagtttcattcttagaaagacgatccgcgtctagatattacatctttaacttagtgaacgtctttcttggaagtgttatcgctggagctgcgtttgagcagcttaactctttcctcaatcaatcgcctaatcagtacgtgactctctatctctgttaatctttcgttctttttgggttacaggcttttctaaggactcttctttttaaaaatctgtgcagaatccctaagactattggcatggcgataccgatgaaagcaaccttctttatcacatatataatggttgatggttgggcaggagttgcaggagagattcttatgttgaaacctctcattatataccacctcaaaaacgcattcttggtgaaaacagagaaagacagagaggaagcaatgaacccgggaagcatcggtttcaacactggagagcctcagatacagctttacttccttcttggtcttgtctatgctcctgtgacaccaatgcttcttccttttatcttagtctttttcgctcttgcttatgtcgtataccgccatcaggtaaatgtagtttctttctctcctaaatttgatgaaactggctagtttgataacttgaaccttctgtttatttgttttcttattctcagatcataaatgtgtataatcaagagtatgagagcgctgctgcgttttggccggatgttcatggacgggttataacggcattgatcatatctcagttgcttctgatgggtttgttaggtacaaaacatgccgcttcagctgctccgtttctcattgctcttcctgtgattactatcggtttccaccgcttctgtaaaggccgtttcgaacctgcctttgtccgttaccccttacaggtcagtttcttctacgttatctagatttattatttctgtttagttcgatttttgtcactgtttggatcggttttacgagccccagaaatggcaaaatgttgattattttacaggaagctatgatgaaagatacattggaaagagcaagagagccaaatctgaacctgaaaggttacttgcaagacgcttatattcatccggtttttaaaggcggtgataatgatgacgacggtgacatgatcggaaaattggagaatgaagtcatcatagtgccaacaaaacgccaatcgcggaggaacactcctgcaccgagcagaatcagcggtgaatcgtctccatctttggccgttattaacggtaaagaagtctagtttaacggtttcaattcagtaaaagcatctgcatacgatttaagtatgaatatagttcgtgtatgtatgtacttttatgtgtacatagagaggtttgtgtttttgcttagacgttgttgatgggttttaattgttgaagtattgaagtttcagggtatttttagaataatatcattttaattgggtgtttttcaaacaatgaatttgtggcaatcttgccaaacaaaaatatacgaaatggtcgaatagttgaggcggttagggcggacaaattcatttgcgatttaaaccatttttgtgtacctttcataaactatataagccatgctagtgtaggttgaaaaagatagaacaagttgaactacagaccggttttacttaaagttagtccgtggtggtttattgtccgattcaaaaatagagtggtttagtcgattaacggattagtctgttttctcatgtcatccattgaaagccgaagagtttgtagaagtaaacaaaaagatataaacaataataaaacaagaattgcataattttgtattcaacagaaattataaaaaaacttatagaaagccacattacagtacaagaaatcattcttatatctaataataggagaagtacatgatttttcatcccaaaaaaaaaaaagaggtacatgatttacacctcgtcgatatcctaacgattaaaaaactgtaactactgattttactacagtatatatgtatcgacaacataacaatgtcgtgacttatatactgttgagctcctaagaaaaaaataacgctattattgatttcacaatagtagcaatctcaactccatagcgaatgacgtagagaaatgtaaccaagacattttttcagaaactatgatcgatatatttcaagaaaggtagacaaaaagtgagaggctattatgtgaatgaagtaaaaaagtagaactattgaggctaatttatagagaatgaattgtaaataagcaatgcgatgggctgcaaactcttctcgtaaatctgcaaatttattaagacagtgcacctaaatattaatgaagagagttaatgaatcaataaatttgaacatcgtgacttgttaagtttggtgagaggggaataaggaacgttctatatgtaaagcaatgataattaagagttaaggagttcatagttcatgtttttctctagtttggacttgagtccaaaatccaaattaatccaaaacaatgttgagcctaaactgtcccaagactcccaacaactcaggaagctcttgctgttttccttttaatcattgtgatattacattcttgatcgtcccacagggaaaatattttagccgttagaccaaatgataaaaaactgtaactgttgatgggaacggcgtcgtttcgctaaccttcgttttaactgatctcaattctcaaggttcaaaagagtacacacacacttatctcaattatccactgaaacattcgtctccggcgaaacaaaaccagaatg

SEQ ID NO: 6056 - DNA, 3000 bp, Unknown
  misc_feature (1)..( 3000): cDNA_ID_2138640_gDNA_ID_1620841_Annot_ID_170039 3000 nt of promoter + ATG
ttaaaaattagggatttcgcttaagtttggaatgggttttgggtcgttgggcatggatcttaattggatcggatactttgttgggtcgtctgggtttttggtcttttgccaattatttgaattttctctcatttatttttaattcgataaaaaatgggaattagaagagtggcattcctggttactttttcgcagatagtggcattcctgccatttattcgttcaattccgtgattacaccatttctctctaccaacaggtttcaattctacaaatcttcaaacccaattcattcaaacgtctttctttagctaatatagatcagcgatactagatttactcagattcatgattaaagtgaagaaagtgtgaatctttatgtgtgaaattgttgtggttcttacaagttatgatttctagggatttgaattgtgtaaaggtttgaacttcagattcatgtgtttgttttagtctgttagatcattgttacaagttatcatttttagggatttgaattgtgtaaaggtttgaactttagattcatgtgtttgttttagtcgtttagatcattagtttggtttttgtttttgtgaaggggtttttggatgatcagtttactgaattgaagaagcttcaagatgatggaagtcctgattttgtagctgaggttctgtctcttttctttgaagattgtgttaagcttatcagtaacatggctcgagctttgtaatttcgatctttctcttatctcactcataatttttgttagatcatcattgctttgtgttgtcttaaaacttcttaaaactgtgattgtgtctcaatcacaaagtctggctagaatcatcattgcttgtgtatataactcagggataagtcgacgggaactgtagattttggtcaggtaggtgcgagtgtgcattaattgaagggtagtagctcaaggtatgttttgtgtctcgcttatatcctaataacaatcaagaagtatactctgtagtagcagaagttctgtgttgttgatagatgaagctcttctcttgtactcttgtttttgatagatgaagctcttctcttgtactcttgttttcgatacagtgttggtgcgaagagggtcaaagctttgtgtgttagcttcaaggaatattgcgaagctcagaattacgaagggtaagcttgttcaacaccgcttaaggactcatcggttgagatgtttgcagcaagtggatattgagtataagaccttgacgacaaagcttcaagatatgttcaatgtgagtagtgatgacatagaatccaatttttggttcattttatgaatcattttgttgactaatgaacaaatttattgccattgttgttgttattgcagcttgagaaacaaatcattcaagctggtggtagagttcctcaagtggatattaactaaagagagactaatccataagaaacaagatgatgacttcaaatttggattgttcagtttctccttttttaaatttattttggattttggtgttttgcttaaaaactcaatagaatgtgtggaaaaaaagagacaagtgattgttgttgataaattagtagtgtgtattggttctttgatcttattcgagaaaatttaacatctttggaccaaattaatgtgattgatgatatattggttttgcttctggttttagtttgagtaagatatagcaattaccaagtgagtcttttttggctagtggtgcttctaggactctccaaaggttgtggtttttaagatccttagttcgattctctcttggaataggtaggtatgtccatttttttggatcgcaaatccgtcctgactcgtatccgtcccgaatttttcatcccattcaaatgattatttgtttgggacaattaaatatgttctagcggatacatgaacggattagataagagacaaggtatccgaattatctttaaaattttcaaaatatttgtaacaattttaaaattattcaaaagtttcccaaatttgtccatgatttatcatagttttccgaaattatccatttgaaccttactcaaattagtgaaagtttatgtgaagaaaacttaaaagtaacggttgcttgaaaaagaaacaagcacaaagaaatttgatcaccgagttcacgacttagccgctatgttccggggaagatttcttgctccccactttcactatgagaatgaggttactgacaccacttaaagtgtgatgttgtcttttggtttcagatacaagcgatagaagaaccaagatcaaagacacaaagatgataaagaacaacttgctcaagaagctcgcgtttctctcactcttgttctatatacctaaatttctcgaacctatattgttatctgaatttttcgtcccgtattttatgaagaatattttggaaaaatatgattgattatccaaattagctgctctaattacatgttacttcctatctcgatatccaaaatagacaccctagaaaaaatggtgattcattcacgataaatcacaaacctgattctaatcaatgtagattagaagtccaaaggatactctccaaaaaaaaattaaaaaaaaaatagtgattagagggagcacaaagataaatgtaaacgcgagtgtagaagataactatctctttacaaatagtctttataccttccgcaacaagtaattgttctcatcagtctctctatgagtaaaaagctaagcgaaagcgagactccacactctcagcgattcaggcgataatacctaaactcaagtaagggtttttactctggtaagctaatcaacgctctcatctttaacaaattgcgacctttatatttctctcttcttatgattcgtcctctatgttctcaaaatagcttagaactttttacaaatttcagactttcttgtaatgattcttatgggtttaaacgtatttgatgatgaataggatttgctaaggatttggggatctttgttcggtttcaatg

SEQ ID NO: 6057 - DNA, 3000 bp, Unknown
  misc_feature (1)..( 3000): cDNA_ID_3079406_gDNA_ID_1620841_Annot_ID_170055 3000 nt of promoter + ATG
taaagctgtttaagatcaaatgtgggagtgggagtcaccaattttagtaaattacgcttttaagtaaaagtaaaacttggatttggatggatatgaaatttagtggatcagcgatagtttttgagagtggaaacacatttaagatgttgaaaaatcatttttgaaagaaattaagtattttttgggggtttgaattgaatatttacaagaaactagattttaatccgctgaatatcgcgggactattttggttttttacaaataaaaatttaatttgttaagcctgttaacggctgttaacttatatgtccgattcgaccaataattaaaatacagtgttttatttggcaacaatttattaagtgatgtatttttatttcaatccaaaagtattgagtattaaacttccaaattaaaatttgtttgggattttttaagcatttttgcctttaatgttttgtattttctgaatgtataactcttactatgtttgatttttactgtttaaaaatataggaacaataatgtacagttcattaagttaaaatctagattattattaaataatttaaattttaattatgtttattttattaataatatttattttgttaagtttttaagataatataattatattttgattgttatatctaggatttcacccatggtataacgtctcgtattactatcaactcaaactcgtcctaccatgtaatctcgttcactgaaactaaacatatctaatagatttcactcttggtatatcatctcgtattacaatcgacccaaatctgtcctaccatctaaactcgttcactgaaattaaacattttgtttttgttattttattttaataatactttaatttaaaagatatataattcaaattaatttaaaaatcttctttcaaatggttatttaattgttgtaaaagtcatacattataatattctacatccgtctctccatctaatctagttcggtaaattaaacattatttttttttttttgttctaataatatttttattaaaagatttataattcaattcaatttaaagttttcttttgaaatggttatttaatttaatacatttcatatattatatatattctaaacatttttcggtaaatatcctaaatattttataaattttaaataactatattatttatctttaataaattataatgttaataaaatcctaacatttttcctttttaaaagtaattagaattgatggatatatattagataagtaaatgctaataattaagaatattaattatttgataataataaatgtcaataacatttcttgtaaataagttccaacttgaagatttatttgttaaaatggcagcgaaaatgtatatgtagaagatggagatcatatgttggtggttgctattagatgtaaaacataacgttgtactgtgaactatatgccatgtatttctcctccacaaaatctattctctggaaattaacctaaatttttaaatatctgtattttgcctccttttcattctattttgtttgatacaaacgattgtggtttgtaatgttaaaattaggaatgttattgaatgatatgtatatttcataaaaataataataataaaagtaggatgaatagtaaaattccaaggcatttcataatttacccattacatggtcaaaatttatcaatattttaaaataataataatcatccaatcaagattttgggaatagaatatcttaagaacttagtataattacatatatatatatatattcccttttaaatgtatcaaaaacaaactaagaacatacaaggaatttgatgtagtactatacaatttacatgcaaacagatgtagtactatttgatgacaaaaaaaaaaaaaaagatgtagtactattttatcttttcatcggaataattcggtcatgaagctattaattggttttaatgagaatttattataacagttgttgccacactgtcgaaatactaacgcctaacggctagttaaataattaacacgcggtgagaagtgagtgagttacacgaaccactaagaatctaatataggaagataagataagcatttcacacgtgtggtgtggacaatttaacagtgttaacacgcgcatggcatgtgatctagaaattagaacattaattttagcgttttgactttgacctttgaatcactaggcgtaggtatttacacgtgtaacaatataatttttttcaatatgtgatgatcatgggccaacgtttgtgggtaaaggtgtggtgttcgatcatgatccacttaaatttactgaattttagaattataacagcagaaggatataagtaatataccaaacttaactataatctacctctccttgtctatgtatactaaatgtctaacatgtaacacaaagctgtacaaaatttttaactctcaaattttttgaaataatgcaaagctgtaaaaatagctgtacgagaaaactgtacaataaaactgaaaataaaaaaatttgtaacgtttttgataaaagttttgtaaatgtataaccatcaaaactgtacaacttccagctttgataatgaattaccattcaaagctagagtttcgaattttttcattgtatacaaccatttgaacacaactcttttcaattatgccatacatacatttagttaataaattttaccgattaactagtactgacaaaagaaacaaagagtaattatatttttttgataaattgttttattagaaaaatacttaaaattgataaaaataaataaacccaattgatatatttgatattacaataccagatattgaaacaaataagacatgttttgtctatatacttccaactagaagatatttatttatccatatcctagatattttaatgtgtgaatctaatacattctcttatatacgaccaaatagtaaaacaatatgcctctcctgcaatttttcttcatccaatatttct

SEQ ID NO: 6058 - DNA, 3000 bp, Unknown
  misc_feature (1)..( 3000): cDNA_ID_1829886_gDNA_ID_1620841_Annot_ID_170053 3000 nt of promoter + ATG
tacaagaaatgttattgacatttattattatcaaataattaatattcttaattattagcatttacttatctaatatatatccatcaattctaattacttttaaaaaggaaaaatgttaggattttattaacattataatttattaaagataaataatatagttatttaaaatttataaaatatttaggatatttaccgaaaaatgtttagaatatatataatatatgaaatgtattaaattaaataaccatttcaaaagaaaactttaaattgaattgaattataaatcttttaataaaaatattattagaacaaaaaaaaaaaaataatgtttaatttaccgaactagattagatggagagacggatgtagaatattataatgtatgacttttacaacaattaaataaccatttgaaagaagatttttaaattaatttgaattatatatcttttaaattaaagtattattaaaataaaataacaaaaacaaaatgtttaatttcagtgaacgagtttagatggtaggacagatttgggtcgattgtaatacgagatgatataccaagagtgaaatctattagatatgtttagtttcagtgaacgagattacatggtaggacgagtttgagttgatagtaatacgagacgttataccatgggtgaaatcctagatataacaatcaaaatataattatattatcttaaaaacttaacaaaataaatattattaataaaataaacataattaaaatttaaattatttaataataatctagattttaacttaatgaactgtacattattgttcctatatttttaaacagtaaaaatcaaacatagtaagagttatacattcagaaaatacaaaacattaaaggcaaaaatgcttaaaaaatcccaaacaaattttaatttggaagtttaatactcaatacttttggattgaaataaaaatacatcacttaataaattgttgccaaataaaacactgtattttaattattggtcgaatcggacatataagttaacagccgttaacaggcttaacaaattaaatttttatttgtaaaaaaccaaaatagtcccgcgatattcagcggattaaaatctagtttcttgtaaatattcaattcaaacccccaaaaaatacttaatttctttcaaaaatgatttttcaacatcttaaatgtgtttccactctcaaaaactatcgctgatccactaaatttcatatccatccaaatccaagttttacttttacttaaaagcgtaatttactaaaattggtgactcccactcccacatttgatcttaaacagctttatattctcaactttcccctttccataatttaaaaatagatcttcttttacattgagaatcagcatgattggagatggctagtgggcataaaatgttaggaatagaccacataaataaagcataaatcatataattataacaataccttttattggtaattggcatacactttcaagtttatatttggattatttcattagcttttttaaaattaaaatgtagaaaaccacttcctacaattagaagaattttattttaaaatctacgacaaaagaaaatatgttccttttcaatcattctacttaaatctttaggaccaggtttaaacaaacttcatgtcggtatgtctctcattgtcaagatctgaagatttgttttttttttttttgaaagaaagaaagaaagagacaaaacttcaataatttacattttttattctagatgaataaggagtgaaaattcgggtaagcgggtcgggttcagataaaatttgatcggatacggattcttcggttaaaaatgtttaggacccaataggataaatctaaaatattggttcgattttggttcaggtccaattggatttgggttggttcgatatagattttcaggtctttttttaaaccgatactcgaattttcgggtaaataccagaactttcggataaaatttcggatttttgattaaatttaaattttcgaataaaaattcgggtatatttggattcggatcggattcgaattcgattttttggataaagaaatttagaagtcaataaaataaaccttccggttgatttaagttcagataattagattttttggataaagaaatttagaagtcaataaaataaaccttccggttgatttaggttcagataatcagttccggttttttttggccaggcctactgatgaactgttattttggtaacttctaaatatcaaaacggtcctgaatcaggactgataaaacgttaaaaaagaaaaaaaaaagatctactcgtcttctttgtttgttcgttacagtttttacaaaaaccgacagacactttatctcaagagactgggtcaggcctctgttcaatctctatcaaaatccctttcgacatcattcataaacactgacgaatcagtgaaacaatatctcaaacccagaaaccaacaataattcatagattactactatacaaaattctatataactataatctgttctcttgtgtgtttctcgcgtggcttgcgtgttacttcattcatcactgctttagcttctcctcatatgaatctcgaggcaatccagtcactgacttttctcactccccatctctagggtttctctctttcccttattttataatttatttcattgaatctctgaatttcattctcttttgtggagtacatttgtgtaaagcttagatttttatttgggtttcaagcaaaccgagaaaagaaacgattagatctcctttttctgggtttgttctcaaagatttgttctgtttcagttcttccaatttggggggattttatgttggatccagtctctaaaggttcgattttgatgtgtttccttgatatgtaatcagatttgaatcttaaagtttctatctttatgactcctttcaggttaaaactgtgagcatttggagtagcaaaagtaacaaagcatg

SEQ ID NO: 6059 - DNA, 3000 bp, Unknown
  misc_feature (1)..( 3000): cDNA_ID_2138720_gDNA_ID_1620841_Annot_ID_170064 3000 nt of promoter + ATG
ttgataaaaagatagatgagttctcataagagattacaaggagtttataaagaaagaagtcttggaacacactcacaagactaccttggaaaatacagactagtttgaaagtttaaaaataacccttccacttcttggctccaaaatgactcttgatatgctattttcgtcacttctcttgaccagcaaattatccacttggtttggggtcttcttgagcttgtgatggtcataaaattggttggacttcatatatattacattgggccaacttctgaatgttataccattgtttggattatcaaatgggtgatttgaatgtgaatcatttgcctcattaaaaaccttgtcaagaaaaaccattgggacaaaacttgacaagggaaaaatagtacaaatgagacatatgcccatttgatgatcatgtatcaaaaccaatgaggttaagataacatctttcccatactctttctccgttataagttcattttctgtttcaaaatgctcctcaggttcaagctgctcctctgcttcaagctcttccgcggctacaagctcttgatcaaattccatgtcctttgtgctttccatgatcacatcacataactccaacgaatccactataatacgaccaacatcttcggtctacatgaagtctttcacgaattcgataaagttcttgtcttgtcagagttttaatataaatttaatagagatggaaattaattgatttcaataatttttgatttgactaaattaattgatttgattaagttttgaaaaaaaattcatataatcatattaccatctaatataaatatactaaactataatttaaaaaaactatagtaattttgtatatcttcaaaagtttcctttctcgttttaataaatgtatataaattttgattagtaaatactatcacaaccatttatttttcactaggttaggcccgcctaaataggcgggtttaaaaaaccaattataaatttttactgatgatatttgaattctaaatagtaaatgatacttcctatttttaaatatttaatttagtaaatttgcttaaaatcaaattttaatcttacaattttgattttgctgtacacttaatgactttaacggtattttattgatgaaaattaaattttaaatagtagtcaacacatatttttctgtattttgtttagtaattttctaaaacccaaaattttaatcttacacattctattttgctatcaatttaactatctatttcatcataatattcccgattttgattatgcacatattattttaatgaataagtgttaaattttatatcaaaataatatgtatatcatatcaaatcaatataattacttcatatgaaaataattaataaataacaaaacataatgaaccaaaaaaaagaaaaccacaaaatattttggaaaagaaaaattgtttaagatatagttttgctatattttataatctcataaattagttttacctaatgtcaaactcatattagatgacttcaaatttatgaataaaacattgaaattttatattaacattttcacaaataataaaatatcaatccctctaaaccctattttcctaatttttggtggtttctctaatgactacatgcattaaaattcttatattaaaaaataaatataactatacaaaaattcccagtgggtattcaaataaaatactatattaattgaaaatacaattttatcgaactaaattaatgttaaataaattattttgttattttatacttcagtgggttcttaattagttattatcattactaatggttttgtttaaattaataaatgctagattaatttaattgaccaatatcgcatgtaaaatcaaagtttttaattttatttttgattaataaaaattattatgtatatatatagagataaaaattagtgtatgtaaatttgtttactttttttaggtttctattttcttagagaataaaattttttaaatctttgatgacacatgtaaacatcttatcgttaaactttccatctatcatgatctcgtgagttagtaatttttgaaaccgtactttatataataagatttgtaaaattttctatgatttgattaaaatttaatactgatgttatgaatataaaaattaaaatttccaaatctccactccctcatcaaatctccctcagccttatcaaatctccactccctcatcttcactcccccatatattcacttccattgacattttaagaaaaaggattgtcaaaaggaaatggtatacattgttatattaccaaaatttgataacaaaatatagtactaaaaaaagaatttgttgtctgccttgttaaattttgtttttttgtatatctagtctatatatacatttttacagcacttttttgaagataatgttgaagatttgaggaataattcaacaattaattcaaatgggtgggttttaaccggtttaactctgtttggatcctagattgcataattttaaggaataatgttatcctgatcttggattgcagaagtttaaggaatatgtttcaatgaatattacctacaagatttcgtaaacataattaatattctcgagtgcaaatatattctcttatataatctttcaaaattcttgcaatctctacaattatgcaaataacaacctttgattcctaatatctcgatacaatatatatctcaatgacatcaatatattctcaaaatcttctgtgtaaactaaccaaggtttaaatccgtagcaaacttttcttttccctcccaaatcatcaaacgatctaatatctaatactcctattacaatattttcaatagatcttctcacacttgcagttacggaaaatctcaacaattattctcattaacataactagatcatgaaaattctgaatttaaaacgcaataagatcattttaatttaaaacttactgaattaaaaacattcagagtggatacaa

SEQ ID NO: 6060 - DNA, 3000 bp, Unknown
  misc_feature (1)..( 3000): cDNA_ID_3079398_gDNA_ID_1620841_Annot_ID_170058 3000 nt of promoter + ATG
agtggctcacctgagagtaacgacatagaatgatcaaagaatgtggtcaacttacaatcaaagagacatgagtccagagaaagtaactaaccaggaacagatggatgaaaatatccaaagcatcgacggcctattcccaatcttcttttaagatccaagaggttgctgattggatgcaccgccttataaataatgcgttattagacaaaacttttaacattctgaaatagctgagattactataatggagactagtactgcatacctcatatgcaacaattttctcaagcaatgaagcaggatcatcccaagtaatttgatgaagctctaaagtggcaggactaagccacataccgagtttctccttcagaaaagaatctaatgttcgcaaagacggcgtgttctcttttctatacattagaaacaaccatcagtgtcagatacaaccggaaatgttttaccaactgattcgaaactatcttcaaatatttgagtttccagtcacataacaagaggacaagaaacattacgagagtatcgacagaagatcagctcggaggatggacaaaaatctcaaccctccaggatgtgtattcaacctctcaaataaaacttcatatgttggcctaagagcatgcctcagattcctctcaatgcgatagaaaacagaagataaagcccccttatcatcatcacctaaagaaaagtactcgcccatcaatggagaatgtaacgaagaatcacacaagaaaaaacaagaatggcacaagaatgactctcactagctggagtttcaagtccaagatattgcttaacaagttctcggacttgctctcggttaacatcatactccttggctaaaacaagcagtaacttctcgcggtcttcaagcgaaaggctaaagtaaccctataagcatttttaaccatatatgtaatcagattgaaaaggttaaacacatcaaagatcagaatcaagaaacaacaatgtgaagatagttttacctcttgaaaatcattaagagtaatgtctaatacaccagttttactagctgagatagctgagtgcattgtctctcgaacaacatcataaaccctaaaacaaaaaccaaactcactactgcaaagatcaatggtgctaaatcaatatctacaatgagaaattaccttccagtggtaccaaaatcattagaattttgcacaatgtgatctctagaatgattctcttgaggattagattgaatttccttctgacaacaaagtcaacaaaccattattatagagtcaaattagccttattatattcttatcttcttaaaaacattcaagctccgattaaagccatagccaatttctcactctctctctctctttttcatcaaaagatgtaaacttttcattgcccatgattacaaattgtgtgaatttggacagaatcgcaaaattatccaaaaaattcaaacagagaaaaagaaaagcttacaggaaattgagagagggaaaatttggagggattgttggatctcattctagcacgcaacagaatcgctagatttttcttgctcatatctgtttcattatgatcatcatcatcacggttaaaatttcatcggagaaaaaaaggaactcaggaagaagaaaaaagcgatttcgcaatcagacatgacaggaaccttaaaatctggccgttcaagtatcggaaaaaaaaatcgagactttgtattcccttttcaacggatagcgtaaaggcactggcttttaaaacggcgtcggttttactttacctgtcgcttcacttgccacaaaaatttgaataaatggcaggaatgtcactttctccaaaataataatcacgaatgccacttattctttataattttatttttttttataattaaaactgatgtaaatatccaaataactttttaaaaaattaaaatatacagatccaactaaaataatccgacccaagtacaataaaataattaacttggcccaaataatactatatttttaatatgtaaagtaacagttttatccaaatttaaaagcattattcttaataaataaaaacaggattcatatttagaagaaaaaaattaaaattaaataaattttgaaatataagtaatagatttttttttaaaaatctctattgataaattcgaaatgtatgtattattcgaaatatgttttagttgttgataacatttttaattatttttgaaataaatatagtttatttatctatttatattaaaatttaacaatttaatatctaaatatattttaaagtttatcacttaataaatatagtttatatatattattttaaagtttatcacttaatacatatagtttgaaataaatatagttttgaaataaatatagtttatatatattattttggacaaaattttgtttaaaatatttaagataagaattatcttttaaattatagttaaatcaaatattaacttatggattttttctgtttaaagttttaattatattaaattataatgaggttattttattaattttatatataaagtaggatatagtatttttcaaataaaaactcataaaaaaggcattttccaaatttactcatatcatacgcccgaaaaatcgattggaacttattcaattgaacaatttgaactatataagttgaactcgttcgattgaaccagatgaactagatcagttgaactatttgaactagatcagttgaaccatttgaactagatcaattgaaccaatttcagttataccattttattatgcaacaatggattggtttggggagcaacgcgattcagttactacattgtactgactaccattgcaaatatctaaacagccatttttgtttcgttcattcactttcttcaatcgagatctatagacagagtagaacaaacaaagcgcttgtaaagaaaagaagacgttgcgacggaagaaaaagcgaccgatgaaatatatgagtcgaccggag

SEQ ID NO: 6061 - DNA, 3000 bp, Unknown
  misc_feature (1)..( 3000): cDNA_ID_3079402_gDNA_ID_1620841_Annot_ID_170057 3000 nt of promoter + ATG
gaggagacgctgcaaaattgctaataagggtttctagtttgcttagtgggggtatatatatatatataggatttgtgaatcatggctcgcaaatttcggagatcgccgctgagtagtggagaaatcgaagaaaggaaagtgaattagggttctaagtctcagaaatgcttatatatgttcgggttagttcggatggggttcgattatcgggtaataaccgattgggtacgggtaaccaaagacatgaaatctataaaccgatcgggttattaatagaatccatacccgtactgaaccccttaattcgggtcgggttcgggttcggggatcgggtatgggtaatgtgcccagtcctattctcaattatagatgtggagaaaccttattggaattatcctcataatatatttttggagtcccagtcaagaatgtcactgaaccagaaatttgaatccggcatgccactttttgatctgtatgccactttatatgtgttattcctattttacccttaatgaataattttttatttaatttcaaaaataaaataaaaataagaaaaacataaatattctatatataaaccctacaaaaacgttggatttaatttagtgactgtatttactcaacatatggaccccactaaaaaatattttatctttttgcggtagaagatactcgtagttataccgttgtaccatcgtattcatagttgaactttccacaattttcataatttacagttgaattagaaggtaaataattaattataagttgaacgcacactttttctctattattttgtatttccaaagttttcataatatgacatcggtgaaaacttggttttttacctattttacttcatataaggtgctcatagactaaatgtttcttatattagaaggggtgttttatatgaaaacaaaattggattttagaaaatattaaattttattgcattgatctaaaattatttatttataatttgggatattcgtatataattttacatgtataataaattatcaattttacaaatttaatcattttaacgttatttagttgaactagttgaactaattatattaaatgttaccacgaaaaccaaagaaagacatttgaactagctcaactaaataaattaaaaagtaccacgaacacaaatacatatatgtttttaatctaatccaataagttgaactagttgaattgttcatacaaatccgagaaatacaaattcaaaatacatgaattaattttttcatgtgcaacaaattgttcaagtgtatcccaggcatagtcttgttcttcctcttacgacgcttttctctggttgatggaaaccagtttttttttttttttaaccattttttggtgtataaattcaattggctctgtcgactcgggaaaaaccatctctggtcggctcatccatttcggcagccgtcgattctcaggtgatgtgtcttcctccatcgatattgttggatcgaaatctagatcgatatctcgatatttactttgtccactctggaaacgttcctcctttagagataccatctccggtcgactcatatatttcatcggtcgctttttcttccgtcgcaacgtcttcttttctttacaagcgctttgtttgttctactctgtctatagatctcgattgaagaaagtgaatgaacgaaacaaaaatggctgtttagatatttgcaatggtagtcagtacaatgtagtaactgaatcgcgttgctccccaaaccaatccattgttgcataataaaatggtataactgaaattggttcaattgatctagttcaaatggttcaactgatctagttcaaatagttcaactgatctagttcatctggttcaatcgaacgagttcaacttatatagttcaaattgttcaattgaataagttccaatcgatttttcgggcgtatgatatgagtaaatttggaaaatgccttttttatgagtttttatttgaaaaatactatatcctactttatatataaaattaataaaataacctcattataatttaatataattaaaactttaaacagaaaaaatccataagttaatatttgatttaactataatttaaaagataattcttatcttaaatattttaaacaaaattttgtccaaaataatatatataaactatatttatttcaaaactatatttatttcaaactatatgtattaagtgataaactttaaaataatatatataaactatatttattaagtgataaactttaaaatatatttagatattaaattgttaaattttaatataaatagataaataaactatatttatttcaaaaataattaaaaatgttatcaacaactaaaacatatttcgaataatacatacatttcgaatttatcaatagagatttttaaaaaaaaatctattacttatatttcaaaatttatttaattttaatttttttcttctaaatatgaatcctgtttttatttattaagaataatgcttttaaatttggataaaactgttactttacatattaaaaatatagtattatttgggccaagttaattattttattgtacttgggtcggattattttagttggatctgtatattttaattttttaaaaagttatttggatatttacatcagttttaattataaaaaaaaataaaattataaagaataagtggcattcgtgattattattttggagaaagtgacattcctgccatttattcaaatttttgtggcaagtgaagcgacaggtaaagtaaaaccgacgccgttttaaaagccagtgcctttacgctatccgttgaaaagggaatacaaagtctcgatttttttttccgatacttgaacggccagattttaaggttcctgtcatgtctgattgcgaaatcgcttttttcttcttcctgagttcctttttttctccgatgaaattttaaccgtgatgatgatgatcataatgaaacagatatg

SEQ ID NO: 6062 - DNA, 3000 bp, Unknown
  misc_feature (1)..( 3000): cDNA_ID_1841673_gDNA_ID_1620841_Annot_ID_170056 3000 nt of promoter + ATG
tttttaaatatctgtattttgcctccttttcattctattttgtttgatacaaacgattgtggtttgtaatgttaaaattaggaatgttattgaatgatatgtatatttcataaaaataataataataaaagtaggatgaatagtaaaattccaaggcatttcataatttacccattacatggtcaaaatttatcaatattttaaaataataataatcatccaatcaagattttgggaatagaatatcttaagaacttagtataattacatatatatatatatattcccttttaaatgtatcaaaaacaaactaagaacatacaaggaatttgatgtagtactatacaatttacatgcaaacagatgtagtactatttgatgacaaaaaaaaaaaaaaagatgtagtactattttatcttttcatcggaataattcggtcatgaagctattaattggttttaatgagaatttattataacagttgttgccacactgtcgaaatactaacgcctaacggctagttaaataattaacacgcggtgagaagtgagtgagttacacgaaccactaagaatctaatataggaagataagataagcatttcacacgtgtggtgtggacaatttaacagtgttaacacgcgcatggcatgtgatctagaaattagaacattaattttagcgttttgactttgacctttgaatcactaggcgtaggtatttacacgtgtaacaatataatttttttcaatatgtgatgatcatgggccaacgtttgtgggtaaaggtgtggtgttcgatcatgatccacttaaatttactgaattttagaattataacagcagaaggatataagtaatataccaaacttaactataatctacctctccttgtctatgtatactaaatgtctaacatgtaacacaaagctgtacaaaatttttaactctcaaattttttgaaataatgcaaagctgtaaaaatagctgtacgagaaaactgtacaataaaactgaaaataaaaaaatttgtaacgtttttgataaaagttttgtaaatgtataaccatcaaaactgtacaacttccagctttgataatgaattaccattcaaagctagagtttcgaattttttcattgtatacaaccatttgaacacaactcttttcaattatgccatacatacatttagttaataaattttaccgattaactagtactgacaaaagaaacaaagagtaattatatttttttgataaattgttttattagaaaaatacttaaaattgataaaaataaataaacccaattgatatatttgatattacaataccagatattgaaacaaataagacatgttttgtctatatacttccaactagaagatatttatttatccatatcctagatattttaatgtgtgaatctaatacattctcttatatacgaccaaatagtaaaacaatatgcctctcctgcaatttttcttcatccaatatttctatggagtcatcttcttcactccttcatcactcttacctctcttaccttaatccaaaatttggaaaaagacctttggtttcttatccattaatgcagagttcgcgaaaatgcaaacaaactcgcatttgttctaacaagatgtatgttcccggtatgtaacaatatgacatattcatcacaaaatgtggtttttattcatacagaattgttctatatagattaatgcctatttttctaatgttttttttgttatataattgaattaggctttggagaagcttcaccggaggctaaggcagcgaagcatcttcatgacttctttacttacgttgcagtgaggatagtgtctgctcagcttgaggttgatttgacgatttatttgattttttaatttaggtgttttgattaataataagtatgatctatatattaattaatgacagagttataatcctgaggcttatatggagttgagagaatttttagatacaaactctgtaagtgacggtgataaattctgcgccactctcatgcgtcgctcttcacgtcacatgaacttaggtaccaaaaataacacctttatatcaataatttggttataaaattctagtatgcgttttctttttgtgaaacttgttagttggaattttaattctaggttcttaaagttatacattatacttttttaacaaatttggttttcttctagtaatttagacgaaatctctttactttttccaaacattcttttcgtacattggaagttgaaacttctcactaaaataactagttatgggagttcggtttatatattcggtttcagttatatccattcgcttatcgtttttttttttgttttaaagtttagtatcccttcggttaatttgaaagttcggttcggtttcgattatttcggttttaaaatttagtatccatccggttattttgctttaaatatttttggatatttcggttattttcggatatttttggatattttcggatattttgagatattttttttattatttttgaatatttttactattttatatatattctcaagtatttttaattatctagtctagaaataactaatacttttgtaaatatatatttatattttagatatttttggttactcaaaatatttcggttggtatccattcggtttcagttatttcgattataaaattttgtatccattcaattagtttctggttatcggttctgtttacttcggttttggtttggtacatctggttcgggtaatttgctcaggcacaaaactaacagtataacacaactaatctgtgcaattcttgtaaagaaaaactacttcaaaaattgcgtgacgaaatacaattccaccaatttgcggattactaacgaaatcactttgtagatccataagtttcgtatatcttttaggtatacatatacttgatatgagataagtaaactaaaaactttgctttttttttttggtatcatggcca

SEQ ID NO: 6063 - DNA, 3000 bp, Unknown; identical to SEQ ID NO: 6058
  misc_feature (1)..( 3000): cDNA_ID_1829886_gDNA_ID_1620841_Annot_ID_50887 3000 nt of promoter + ATG

SEQ ID NO: 6064 - DNA, 3000 bp, Unknown; identical to SEQ ID NO: 6062
  misc_feature (1)..( 3000): cDNA_ID_1841673_gDNA_ID_1620841_Annot_ID_50888 3000 nt of promoter + ATG

SEQ ID NO: 6065 - DNA, 3000 bp, Unknown
  misc_feature (1)..( 3000): cDNA_ID_1829882_gDNA_ID_1620841_Annot_ID_50889 3000 nt of promoter + ATG
agaaatgcttatatatgttcgggttagttcggatggggttcgattatcgggtaataaccgattgggtacgggtaaccaaagacatgaaatctataaaccgatcgggttattaatagaatccatacccgtactgaaccccttaattcgggtcgggttcgggttcggggatcgggtatgggtaatgtgcccagtcctattctcaattatagatgtggagaaaccttattggaattatcctcataatatatttttggagtcccagtcaagaatgtcactgaaccagaaatttgaatccggcatgccactttttgatctgtatgccactttatatgtgttattcctattttacccttaatgaataattttttatttaatttcaaaaataaaataaaaataagaaaaacataaatattctatatataaaccctacaaaaacgttggatttaatttagtgactgtatttactcaacatatggaccccactaaaaaatattttatctttttgcggtagaagatactcgtagttataccgttgtaccatcgtattcatagttgaactttccacaattttcataatttacagttgaattagaaggtaaataattaattataagttgaacgcacactttttctctattattttgtatttccaaagttttcataatatgacatcggtgaaaacttggttttttacctattttacttcatataaggtgctcatagactaaatgtttcttatattagaaggggtgttttatatgaaaacaaaattggattttagaaaatattaaattttattgcattgatctaaaattatttatttataatttgggatattcgtatataattttacatgtataataaattatcaattttacaaatttaatcattttaacgttatttagttgaactagttgaactaattatattaaatgttaccacgaaaaccaaagaaagacatttgaactagctcaactaaataaattaaaaagtaccacgaacacaaatacatatatgtttttaatctaatccaataagttgaactagttgaattgttcatacaaatccgagaaatacaaattcaaaatacatgaattaattttttcatgtgcaacaaattgttcaagtgtatcccaggcatagtcttgttcttcctcttacgacgcttttctctggttgatggaaaccagtttttttttttttttaaccattttttggtgtataaattcaattggctctgtcgactcgggaaaaaccatctctggtcggctcatccatttcggcagccgtcgattctcaggtgatgtgtcttcctccatcgatattgttggatcgaaatctagatcgatatctcgatatttactttgtccactctggaaacgttcctcctttagagataccatctccggtcgactcatatatttcatcggtcgctttttcttccgtcgcaacgtcttcttttctttacaagcgctttgtttgttctactctgtctatagatctcgattgaagaaagtgaatgaacgaaacaaaaatggctgtttagatatttgcaatggtagtcagtacaatgtagtaactgaatcgcgttgctccccaaaccaatccattgttgcataataaaatggtataactgaaattggttcaattgatctagttcaaatggttcaactgatctagttcaaatagttcaactgatctagttcatctggttcaatcgaacgagttcaacttatatagttcaaattgttcaattgaataagttccaatcgatttttcgggcgtatgatatgagtaaatttggaaaatgccttttttatgagtttttatttgaaaaatactatatcctactttatatataaaattaataaaataacctcattataatttaatataattaaaactttaaacagaaaaaatccataagttaatatttgatttaactataatttaaaagataattcttatcttaaatattttaaacaaaattttgtccaaaataatatatataaactatatttatttcaaaactatatttatttcaaactatatgtattaagtgataaactttaaaataatatatataaactatatttattaagtgataaactttaaaatatatttagatattaaattgttaaattttaatataaatagataaataaactatatttatttcaaaaataattaaaaatgttatcaacaactaaaacatatttcgaataatacatacatttcgaatttatcaatagagatttttaaaaaaaaatctattacttatatttcaaaatttatttaattttaatttttttcttctaaatatgaatcctgtttttatttattaagaataatgcttttaaatttggataaaactgttactttacatattaaaaatatagtattatttgggccaagttaattattttattgtacttgggtcggattattttagttggatctgtatattttaattttttaaaaagttatttggatatttacatcagttttaattataaaaaaaaataaaattataaagaataagtggcattcgtgattattattttggagaaagtgacattcctgccatttattcaaatttttgtggcaagtgaagcgacaggtaaagtaaaaccgacgccgttttaaaagccagtgcctttacgctatccgttgaaaagggaatacaaagtctcgatttttttttccgatacttgaacggccagattttaaggttcctgtcatgtctgattgcgaaatcgcttttttcttcttcctgagttcctttttttctccgatgaaattttaaccgtgatgatgatgatcataatgaaacagatatgagcaagaaaaatctagcgattctgttgcgtgctagaatgagatccaacaatccctccaaattttccctctctcaatttcctgtaagcttttctttttctctgtttgaattttttggataattttgcgattctgtccaaattcacacaatttgtaatcatg

SEQ ID NO: 6066 - DNA, 3000 bp, Unknown
  misc_feature (1)..( 3000): cDNA_ID_1829979_gDNA_ID_1620842_Annot_ID_50892 3000 nt of promoter + ATG
ggtatatttgcaagaccattataactacttaactgacagtgtttgaaattggaaataacttttttttttcttttaaaaaacaaaattggaaataacaaaattggagaaggaaatattaaaccatataatatttgctatgtacaaatattatttataaaatattttatgtttttattatctcaatgatggtgaacatatgtcagatttttacattctgtcatatataattgtttttacaaaaccataggttaaaaaaaaccaatttttttcaacttcatgcttcttaggttaggctattaggttcttccttcaaaaatatttgcgggaagttgctctcaaatataggattgaagcatttttcatattcatgagtggatgaatccaaaaggtttcgagcctctagaggttttctgcatgttttcgttgggttgtcccatccgatgttcccattggtttattatactgtttttcttaaagttttgttaaattttattatgttctctccttgatttcttatattattagtgtaagtatcttccatatttagtatcgaggaatatattatctattttttttttggaaaaatttaaactgttttgtagatgaatatatcaaactatgttaaattttatgtattttccatatatgctaaaaaaaaattctcgtgcaaactgaattttatttaagaatttaagtctttacaaaaaaaggttttttagccacattagctgattttctgaatttgcttgaaactacgtgaacattgaagaagctacgtgatgtgctacactattacaattacggtttgtgaatataaagataattgattcaaattttgaaacccaaaaatctatatttagaagtaaactggcaatgttcgaacagaatagtcatgccgttgaccgctataaaaaaattttaaacagaatataattacatgtatattaagaagttcaaaaagaagctatttgattcatcttttttttaatatatttttaaaccaaaatattgatagaacaatagggaaaagctcgagtttaaatatgacctcgtgaatttgttttttgttgtgtttttgaattattgttaaattatattcaaaaaaagaaaaaaatgttttacagcttaatgaatacgatttcaaaaacaaattctaacaacacaattggaacttaagctcgtcttgtagcaaaccaaacttgaagatcctcttcatacttatggattcccctataccccgaattgtacttaaacgatttctcacatttttgtcgatcatcttgatctggtggttatggttgttcaccgtgtcttcttgcattcctctctctccaaattgagtgtaccgtattttgaaagatatataggagaatgtaaacttttgttttctcatgtacattatgttaaacttaaatatatattccatttatttttagtataaagtttttcaacaaaatcttgatgtaacaacatgagtactttagaatagatgaaaataaaactagcttataaaatacaaaatgtaaaaataatctaaaaatgatgtaaaacacaaaatataaaatacaaaacgtaaaaatgagacatcaatatattgttctgtgaactttatatatagattagttacaaataatctattgtaaatattttaagatagacaataaattaatactttttagtaaaacatacaactagttaataatctaacgaccaatataaatcaactgccaaaacaaaatatatgaaattatattttctcaaaagttaattggttgtcttaaaatgaagatgttgactctgagtctatgatattagtcaaaatgcattttaacttttatgtacattccttgtatactaaaatgtctaaaaacacggtattgaatttcatttattccgtattataaaaaattacaaaaaagcccttcaaaatatatggaaacaaaattgtaaaataactgtaaaaagtaaaattatggttttgagataccaatatatttttgtatgaaattttatccaaacaataaataaatattgtatttatttgttttaaaattatatatgatggaaaatgaatcaatatttgttgaaagttggcaaatggtagaaacctaacggctaagagaatacgacgacgcaaatgaactgttttgactaattttaggaaaaagataaaacggttctctttaacaaatttgtcgcgtttgaatacgacatcgttaaaaactatgttaaacattatatatatatactaaaaagttcaaaaaactataaaattttagttttctcatcctttttatctttaaattatcaatgatttgttgttgatagaccaataatagctcacactaaagtaatttaaattttgaacacacttaacctattatctgcacctaaactattttattctataagtagaatgctcgttccaacacctcatattgttcaaaatgctcgttcatttttagatcgtaattgtctaattattaatttataaaaattgacagctttccttttaaaaacaaaacaatacaggtttgactacaaatacacattttcgaacagatagatagagagagaaaaagaaacacaataaaacgcgcgtaaaaaggaaggctaatttagtctttttcgtcgtaactcccataacgagacaaaacaatcttaagtgttccctctcatcgtaaaagcttttctccttccttctatgtacagctgtaatggcaatatcgtaaataactcgtaacagaaagggcaattattgtcaacatttataatttaatttctcccaacttctcaaattccaccatttttcttcatcctctcctccataattgattttccttttttttgtttttccttcttgcaactaaaataaataaatttttagaaaccaaaaaaaaaattgtagagagagaaaaaaaaaactcagaggagagaaagagaagacgacgaagacgaccattttttttttttttgtcaagagagaagacggagacaaca

SEQ ID NO: 6067 - DNA, 3000 bp, Unknown
  misc_feature (1)..( 3000): cDNA_ID_1829975_gDNA_ID_1620842_Annot_ID_50894 3000 nt of promoter + ATG
agcctacacaacaaaagcaagatatcaaattcagtctcctctcaacaaatttctcaacaaaattgattaccaattcccattaccttaagaccttgttgagaatagagtctctcctgcataagtaatagaatcgttgggacactgtttcctttctcatcataagaacattgcatcgattccgccgatacaccaaacacactcacactgcattaatcaaagagaatccaccattaaataagaagctacaatttcagatccagtttcagattctaaagcagtagtgaaattttgagagattaccttgcactagggactcgacatgggatctcaacttgaagctcgtgagggagaccaagaaagccatggaatcgatcgaatgttacatgagtgatgtgtcgaacatttgttggccaaccgatctccatgtgatgaacggcggacgaaatccctccgcctactccgccgtcgtcttgtctgttgtctacacggcaagaaaccacagatttacgcagcgccgttaagagaaactcaacaagagacagttgttgctgattctgctcttcttcttcttcctcctccgccgttgattttctccttcctccttttcctccgccgccgcaacctccgcctttagtcatcatcactagccccgtcattgagaactatgaaagattttcgcagcttctctctctctttctctctggactttgtgcttcttcttctctctctatggaagtgaatttgatttttgaaattctcgaaaaggtttctctttcttttttattcttttatgtgatttaatataatatatgtttggttttgaaatttttgtctttttggttggatttcaaagcaacggtccactcatttcaaaattttctccctctagggatattatttatctaatgtagcttttattggaatcacgttttaccccaaagaacttctctaaatctacgataatgccactcaatttaattggttgttggttgttgacgtggcgtttcatttatggatctacttgattttttgatttttttctttgtcaaattgacattttattttggatatataaatattttcactattaatattgaatccatgttttctctctcttttccctctttaaaatcttcgagagagagagaaagctgaaaatcactatgccgtccggaattcttttcggcttctgcctcttccgataaggattatcgtctagcaactactagttctttccggtgttggccaagttttgtccgacatcatttggctttcatagtgatgatgctcggctatgccgtcagcgctcttttgctgctttttgttttttcataaattagttttgttttcaataattctcatttgagatgtgttggtgataatgatagagcgattttcgcttctgttacttattatccaacctgtttttctttttgagtttagaagtgcaggaatcaaatcagagatttgagttgaagaacaaaagtgatttccgtcgcatattaacattgccttgagctgttgtttctctaattggagctttgattgttttaaccggtgaaaacccataagttttcatgtttgatttgttaatcgacgtcgaatcttcaccagaatcgatgtttgacggcaaaggatgaagtcgggaaaactttggattctcatccaatacgtgtattggtttctctacaatagaagacacgtggctttggatagagacaaaagataatacatttcttcttccatgttggtttctctgatgggctttagttgggcctaatatatttctgtagcttttgtgttatagggcattctatagcccaatgtaatatttatcttgctcaataaaattatccctcttgtgaaaaaaataaaaaaaattcactttttagattatttgtgatctatcattaaagttagtatacagatattttcatttcattttaaaaaatattttcagtttttattttgttaaacatatttgaaatttttattcacaactaaaactaagaaagttttttttttttgttgatactaattctttttattattatactaataaacttatttttctttttcatataaaataataataataaaccaaaatatttgttttttgtaatgtattattgggacaaaatttcatttgcaatgtaaagaccaattagatcacagtacgtgtgtatatttgtttttccttttttaccctttatgagcatagttaaccaaattttgttattaacaaaccggtttagcatacataaaaaaaagtttaagtcctccgccgctagggttcttgtgcgatgaagccgtctccgagaaatttgttacatgtgcgtcaatttcttttcagtttagattgaactaaacctattttactttattagatctagggatacgaaagatatggttttgatttttaacgattttatcattttcttccatgttcggtttctctgatgggctttagttgggcataatatatttctgtagcttttgtgttatggggcattccatagcccaatgtaatatttatcttgctcaattaaattatccctcttgtgaaaagaaaaaaaaaattcactttttaaattatttgtgatctatcattaaggttagtatacagatattttcatttcattttaaaaaatattttcagtttttattttgttaaacatatttgaaatttttattcacaacaaaaactaagaaagttttttttttttgttgatactaattctttttattattataataataaaattatttttctttttcatataaaataataacaataaaccaaaattttattttttttgtaatgtattgttgggataaatttcatttgcaatgtaaagaccaattagattacgatacgtgtgtatatttgttttttccttttttacctttaatgagcatagttaaccaaattttgttattaacaaaccggtttagcatacataaaaaggtgaagtcctccgccgctagggttcttgtgcg

SEQ ID NO: 6068 - DNA, 3000 bp, Unknown
  misc_feature (1)..( 3000): cDNA_ID_1829971_gDNA_ID_1620842_Annot_ID_50895 3000 nt of promoter + ATG
tatcccgagacacatatattatttcttatatacacatgttttgctgatttggttttaatggatatttgtatatgtaggttctctgttgcgccatgcagaatccttgatccctagttccctcaacgaggaagattttctgcttttgaggtaacataaagcctcttcagtcattctacttttcacctatgactacattaaagttttgtagttctcgagctgtactattttatgtagccgttgatattatttttttccggtatattgtcttctgcagggtgttttgtgaccagttacagccgttaatccattccgagtttgaggaaagtcaagtacaggtgaaggtgaaaaagctttttgctctcttatacattggttttacaattctctggcttatctgtttagttacactgatacaagtaggtgtaacaaggttttactcatgtccatcgtatgttaaatttctacgtaagacagatcttttgctaaccttcaaatgttatgttgtactaggatattgaaggtaggggcgggaatttatctggtaagctaaaagagcttctgaatcttaacaatgaggaagcttcagaggattgtgatgtccgagttgaaggtgtgatgacaaagcaaggcgtgaacgaggagatagacacagttgaaaggttgaaagagagcgatgcagatgctagcaatcttgaaaccagtggttcagatacaagctctaacagagggaagggtctggttgaagagggagagttggttcagaatatgagcaagcgatttaaaggcagtgcatcaggagaggtgaaggaggatgagaaatctgaaaccttccttgtctttgagaagcagaagaagaaacggaagcgtagtattatgaatgctgatcaaatggggatgattgagaaggcgcttgctgaagaacctgatttgcagcggaattcagcttcgagacagttatgggctgataaaataagtcaaaaggtgagttcaagaattctactctttttaatttccaaccacgtattacgaacgatgcgctcgttgattacatgattttgcagggttcggaggttattacatcttcgcagctgaaaaactggtacttgcttttatttgttcctcttcgtcagctgcaaagagaatctcgtaatcactattcattatctgacattgaaagtttattatcaggctgaataaccgaaaagcgaaactagctcgagcaaacaagcaaacggggccagctcatgataataacagctcaggggatctaccggagagtcctggagatgaaaacacttggcagcagaaaccatcaacaccaattaaagatcaaactgtaacagaaaccccgaaaacaggagagaatctgatgagaacatcgtcatcatcagaagaagggataaagcaagggcaacaagtgaggcttatggatgagagaggagacgagatcgggaagggaacagtgttgagaacagacggtgaatggaacggtttaagcttggagacaagacagatatgtgtagttgatgtaatggagcttagtgagtcatatgatgggagcaaaaagatgatcccttatggatcagatgatgttgggaggactttcacagaggcgaattcaaggtttggagttatgagagtggcttgggatgtgaataagcttcagtattagactcagttgcattgaatttgaccagtaggtttttgatttttgtttatttttaactgtttagagattctcctctgttttgtgagctttgtctctctctctctgtggttatttacaggcaaaggttgagactttgagaggaaggtaataacagaaggaatagtttgacttttttaatctcagttagttgactttacagctatttaaagaaacaaattttaattgtttcgtgatttaaggagattaactatagtaaatttaagaagaaatcaattccataaagtagctaatgattatatttgaatatttaggtggtgttattcaattatggagttaaagtcaattctttaaactttagatttgttttctatattgtttttaaaaatatgtttgtatgaatttcaaaatctctgcaatatgtcatggatttcgattctaatgatttactcatgaaactccaaagaggtttcatttcaaatgaattaatatacaaggattttacaagatttttagttttgaataacactggattttaatgaaatatttaaaatcttaattgaataacactaaactttaaaatctattaagcatgatttacaaagatgagttccaataacactagattttaaaactggatttagaatcattagttgaataacagtggattagtgttggatttcaattctattaaaatccattaactaataacacccccttagataaattaccaataaggctacagcttatgcattattattaaatttgttgaaaatgtgtatagaattagaatgttcctctaaacgaaaattcaaatttcaaagtttcgataataaagtgttgaaatagaaatgcttttcttagaattgtctacacacagtatttaccagatataaaaaaaaataacaaagggtaatctagacaattcacatacatataaagccgttgactaaagaagaagactaaaagtccagctcagcgaaaacgccttttctatccgaagaaaactgtgtcctccaaaactcggcgaagcaaagatttttattttattttttcttctcttttaattcaaaaacaaaaaatagtctctgaaaaaaaaagaaaggtttttactttgtggagaagacagagtccgtccgtcgtaactcgccaccgttctccgccgtgaattcttcttactccttcgatctgaactttctacctagttctttcgtccagtgccgtagtctttccttctttgattcgctttctaggtttcgtcttctcatttctctgcttctggttcagtattttggctgttgcgggatcgatttatacccgtaaagtggtttcca

SEQ ID NO: 6069 - DNA, 3000 bp, Unknown
  misc_feature (1)..( 3000): cDNA_ID_1829952_gDNA_ID_1620842_Annot_ID_50900 3000 nt of promoter + ATG
tctatgtgtaagctttcatttcctttttactttggcacaaatatattaaccattattcgttcttcgaggttcatgctaatctagtccggtcatgtcatatggcaaacggactcgaaaagtcgagctatgggtatttggcctttataaataacatatgtggatctataacttaattttgattaatagaggcataatataactcaaatattaaataaataatatagacaatccaactcaaatattaaataaataatatagacaatccaatttctctagcaatcactttgtaatgctttttatgattttatttgctcgcatcactttcaatataataatggctttttttattcttctttaaaaaaaaaaaaaatgttggtacactactgtttttattattctctttcagaatcttcttgttgaaaataaagagtaatcaatcatttacttggtgatattgcagacacttaggaaacggtagaactcgtgctccgtatcgccgagtaagagtagcaggaaaaagatgataagatacacagcagcaatatgagataatctggttttggacacgtgaaaattaacttttcacagcagcaatatgatatgattttcacgtatccaaaaccggactatatcatagaggcaccaaagaacttgtggacgagaagcatccacgtctcttcagacgacccgtagattaccgcgacttgtttaccttctatcactcagaagctggtcgtaaagttcaatctactcttcaagcttacatgtgtgcgcttgattccaagttttaacagagttaggtgattttaagtttgtcaaaaaccatgtagtaagaaaaaagggtttttgattagttgagtcatgtctgtttctgtgtgattcgtctttatatggatttttttggaggtctaagtctttgtgttgtatgaaaatcaatagagtatgtgtgcatgcatgcacatgcacatgtacaataatgtaataaattattgtatttgtatttgtatttgttgatggctccaaataataatagtgtttatggaatattctacacaggttggcgttccacgcaatcaagtgaacccatactttagggtatcaaaataaagaaaatgtacattttataaatttttcaaggctttttatgttttaagaaaaatattatacgcatttttttaataaattcatttttgttgagctttcttttcatgtttcgtgggatttaaacttgatgaaaacttatatttgttgtcaatgaatctaatttggtaacaattgggttttaaaaaatttaaaccttaaattgcttgcaaaatggaagacatcctaagactatattcatcagcgatatctagtacaatatatcaatattaaataaaagaaaaaatagaaaaagaggagagtgggagagagtcgtctctcgtttgagagactacgagaaaaacgtttcttacatgtggttttttataattagtcaagctgaaatacttattaatatgtttacacttaaaatttgtgttcacacataaatgagaaactaaaatcaagagaccatagatggtgatgctctaagatacggtgattttagttgcaaaattataaaaaaaaatctttaattaatcaagtaaatgtgttagctttgctatccattgaaataatttctggttgaaaaactcgattacgtgagtttgataaatgatattgaaggcaaaaatctaaacaatatatttacagaatgtttttttacttacaaactttttatgaaactaaaatatgttctataaaatttagtataaccgatcatatattactacattatttgtgattttataaaaaaaaatattataaggaaaagattttttatttgcgtagcacatttaaatatgccggaccggtcctgattcgaacttacgaaattaaatcggctgcacaactataagtgaattaactttttgtttttcaatttttcataatttatactaataaaaacgttgaaggataacacatacttctttaaataattttttgactagaagtaatctaaactacaaaatacactcattaaacagttattaggtttatgctgtatgacaaacttagagtaagatacttcactaatcatttaatttatatcaacgatacgacgctataagtcaataaaagaattaacttttttttctttttttttggaaatttttttagttgaaagataattcctagaaaataagttatatatttgagttttcatacaacttaaaaacagttaatgattagctatatacctatacttaatgctttctcatatctaattttgacaatctctctttttttttaatttttaatttaattttttcaccaaatactaccgtaccgtgctatatatcttggttgcttaattttgacaacctctctttttatgtatggtaatggaccacacatatccgctttgaaaagtggtccgaaggggaagacgtacggggctctcgacagctagcgaaggaaatgtagtttcttgccgtgattaaccttctttttaaggttttgtcgagaaatcataatcccgttatcgttaataaagttgttaatacccaaagataatttaagattaaaagcatgtctttgacacccaaaaaaaaaaaacacatagaagataaaaagcatgtcccgcaaaaatacaaatagaatattccttctttttaaggttgtcgagaaatcataatcactttatcgttaataaagctggtaatacgattaaaaagcatgtctcacaaaaatacaaatagaatattccttcttcttttttatttttgttgtcgagaaatcataatcactatcgttgtgatcaactaactgttttatatcgatcgacgatcgctcattacaaaaaaaaaaaaaaagtgaatgtttgtaccgaagttgtaacaataaataactaaggagtttggagagaacggagtagcttctttattaatgacgaacagaaaggcagtaattaacata

SEQ ID NO: 6070 - DNA, 3000 bp, Unknown
  misc_feature (1)..( 3000): cDNA_ID_4257535_gDNA_ID_1620842_Annot_ID_170091 3000 nt of promoter + ATG
ttttcgtaaatggcaaagaataatttatctcgagaatgaggaatataaacaatgactttataatataagtattatactatattatgtataatttaatattgtgtaaactatatataaagtccttttacagcatttaaatatagatatttattgacacactagtgcaacaatggaaatatcttgaattgattaaaaaaagttgttatctatacaatatgaaactctttgtatatcttaggtgcaaaactatttgataatataccgatacatagtataacgatattattggataatcctccaaaactcagctttttgtctcgaaacttaagttataacaaagttaattgaaaataatgagacagtactagagatgtatgataaaccaattaaagttgaaaaagttatattcttatttagctttgccgtcaaaaggtacgataaatggaaaatatgctcttgtcttctgagcctcaaaaccttaagaagattcttacatatcttacatgtcaaagtaaagagatagttggtaacacattcccatgtggtccggaaaacaaaagcttcctttattgttttggaatattaatcagcaactgtgtagtagtattctatgttgcatacgtaaaacatataaataacattataatcatattagtttgaataatagattctaataaaagatgatgtatctttagcctagtgatacgtctaatgatcttaattaaacttgtttaatgtaatgagttaacactcaatattaacaaacaaaaacttcatattctggactacgtatgttatacatatttcaaatatacatcaattgtctattctcaacttattatttatagtctctttgttttcttgacaaattattggtcatatttttctttcacatggttccgaaggttacgttttcatgtatatatacatttgtaaaaaaagtatatatataacatttgtacaaaaagcataaaaaaattaaaatgtttatcccgattgctttttgtttgtcacatcaatatttagtgctctaaatattttggttgagtcacgaaactgtaaattaaaatcgttgaagttgctcaattatatatacgtcaccgaagttgttgtatattaacattgcatgctaaaatatatttcagatgtttaggacacataatgcattttccgtaaaataaagcttaaaaataaattaaaatatggttttataagacactattttatcttcttttttttttttttttttttttttttttttttttgccaaacccctattttatctttttatcttttgaaattttttatgatgtatctatgaaaatgatttgtgactaatgcaccgaggcttcatatgatttcattaatcacatcccatataaaatcacgggttatgttcataatttgtttattcaatattagactactatgtgaacttttagtgaattcacttttttttttatccaatcaaacctctggtttcagaatttagtttccagttttaaacttttttcttgagacgtaaaagctctcatgctttgttgatgatgtagtggtggagaatcgtgatcttcaacactttcatgtaaaaaggcttcatcatcgttaatggcatcttgggtttactcttggctgaatataaaaaagaaataataggattgatatagactctatatattaagaaataaagtaagacagtccacggcaacgcatgtgattataggaaccactatcatgcaacgacgtggatcagtgggaaccgttgctttcgaaagcataagagagacatcaattaattacaaagaaattgtgtaaacacatttatatatatcagtgacatttgagattggttttgacaaagatatacaacttctctcccgacataaatgtctacaagaatacgcaagttaatcatatttggagctctttcatctatagttgtagacaatttgtacactctattagggagttctagacttttgatgaatagaaacattttcagaatttgctttatttttttaatataggaatgtgaatattattttaaatgattcgtttcaaactttggatatatagtcatgtattcttataactagaaacttcgggtatttgggtaaaattttcgattatttggatacaaattcgggtattgggtaaaatttcgggtatttggatataaaccgatctgaaaccgattggatccgaaccgaatccgaaccgagattttctatttaccctattgggtcctagaatagcatatccgacatatccgtattcgaccgattattacccaaacccgaccagcatacctgaataccaagccgtaatttagatatgcaatttataaaggctaaaaaatcgtgaaaaaccattgtgatatattataaattattttttgggagccctaaaaacattacatattttggaagctcgagacaaaagcctttcttttttttaaccctttaggcacggttatatgaatcatatgacatgtaatatagcagtttgtaatagtaccgtcatattgtttaaccttcaaattcaaatatgcatgatttatgttcttgacaaaaatatgtatatttatgcaaaattaaatattcatctataacgatcatattatctatactgttaattttaaaaggatcatatcatctatactgttaatttttaagtgatttttttttataatttggatcccattttatttgctcttaaaaactttggatatacttgatagctttttaacaaacaaaaataaaataaaaagtacttcgagcccacgtaaaatcgaataaacaaaaatttaatttgttgaacaagttggtgttttgaactaaggcccaataatagtaagaatactaaaatgggcttaagccgggtcgtcggatcgggtttaagaaaaaacagggtcgaggtttcaagagaaacccttgttactcaggcgactaaaaccccaaatctcatttgtgtgttcgcctttctctcgtacaagtcaaa

SEQ ID NO: 6071 - DNA, 3000 bp, Unknown
  misc_feature (1)..( 3000): cDNA_ID_2999710_gDNA_ID_1620842_Annot_ID_170085 3000 nt of promoter + ATG
attccagaaactaattaaattcccagaacaaatcaacacaattccacacacgatttctcaaacatagcagctcaatcagaatgcaatcgaatcaggataaaaaaccaaatcgtttgatcattcaaccaaataacaaaacacggtgccgcaaactgaccggaaacgcaagaaaccgcgggaagaaaaaaagacgatcggaagagaattcgatgagagatagggattgatgaatatatatatatatatattaagagtgttgttgcagagagcgagagggcactgtgataaagagaacaagtgcgtggctacaagacgaagaaggagcccaacaaaattgatcgtgagcttttattttctttctttgggtaacacaaaagagggttggtgcttaggaaaaaaaaaatcataattactgatttgcccctgagggtattttagtcattacaatttctggtccatattgttctgatttcaacaacatgatgaacaaaagaatcgatgacaaggatggataagagagaatgctaatctgatcaacaaagaatctgttcgaaaattcaaagtaaatcattcattctcctctcatgatgatgatacatcaagacatgaagcttgttcttcgattcattgtctgtatttggaccttttctttgttgaactccgggtttatgcaaactcctcgtcgtcatcatcttcttcttcctcgtactcggaatcagattcctcctctctttcaggttgcatcaatgtattcatgtcaaaagaagatggatcagtttctacctcttctatatctattgtgtcgtagctcattctctgttcgaacttctcatctgaacagtttagcatccaagccaatgaacatttgattcccttcttgattatcttcttgtgtctcggctttaccgtggactcaagcccatacgtaaagaatgcggggaaatccacaaggtcttgaagaggtcttttcatttccttttggaagtactcaaagctgagtttcattattccgaggttcaaagccagaacctgaggacacccgattaccatttcccttgtttggtctatcgaaaatccacacttggtaaggaaatcaatgtgctttaacataggagactcgctgagactaacaaactgcggcattctctcgatcaaagagccaagatcctctggatttagatgaatggctgaacaaagtagcttcctctgtgtgtcgagcttaggtttaaggtcgattccgatgatttcaggatactgcgcaattatagaaggaagagatgtttctctgacattgaaatcttgcaggatttgcacgtttggtttcaccgtatcatccaattcaaacccgagtatgtgaggccgcttctctatcaacctagctgcagccagtctcggaataccaagaacctcgagatactccacgagaggcttaattatccgagctacccgcattcccaaaatctcagggtaccgtgttaaaatacccccaatctccctcctagctacacctataccaaccaaataagcgactgatgtgctcatagtcccttccagcttaaaccccaaaacttctggatacctctcaagcacccgaggtacatcactcggtttaatatccagtccttgaagatacttaaccaccggtgcaagatctataacaacgctagagtgaagaacctgcgggtatcttctaagaaactcagtgaaagtcgatttcctgacgcctagtttcccgagataatcaagaaccggaaccatgttcttcttcacgctacaaccaagaacaagagggtaattgttgatatcttcaatggtaagccctaacttgtgaagaaactcgacacgctctttcatcacatcagctgttacagggagttcaaggccatcaagctcatcaggaacaatcccaatcccacgcaagaactcataaaccttagcacgattagcagctttctccttattcatatctaacaaactaggacgactatacaaagacttagaatctcttcccttatccttatctctatccctatcccttcccgaagaagaagaagaacgagaagacctttctcttctcggtgaatccaaagaacgtgaagaaaatctccgatttgcaatagcgcattgaacagttagaccaattccagtcccaggtctcttcttgtggttgcataagttgccataagtggaatcagagagtgaacgagatctaacggcaaaaaaagatggtggctcaaagtgaactagcaaaaacccaggctttgtgaagccattacagaacctaatcttcattctttacctgcacaaaaacggaacaacactaaaatcgacgattatcaacgagaaaatcataccaattcggactaacccagacaattttacagtacaattagctcagaaaactccgaaaaaataccatcattcatgttcatgttaacatcaacgaaccaaaaaaccataacctaactagaagcaaaccacagaaactatggaataaggagaattggaccagcgtgtgattgaaatctcaccggagctgaggaaagatatcggagaagacgagggttttagaggagcgggtaaggttttttcctcatcacacaacaaagtcactctctttctccattgaaatgatttatccgaattattgacgttctcccccttatttcttatatttcccattattgccctatactatctgaaattatcacattaaaccaatacgtatatgattactttggatgtgatataaattaataaaaaaactatatatcatcaaaactttctcttaatatttctaaaattaattaattccctccttttatcttcaacattggattatcgaaaatgaaaaatagtattttctgactcttttttatagtatcgggtttaattcagaaatatataaagctttggggtctgtttcgaagtatctttactcttttaacagttctgagacttctaaagagaggaaaattagttcgtcgaagcatcgagaaa

SEQ ID NO: 6072 - DNA, 3000 bp, Unknown
  misc_feature (1)..( 3000): cDNA_ID_1829948_gDNA_ID_1620842_Annot_ID_170081 3000 nt of promoter + ATG
taaattaattacagagccaaaacaaaattgtcgtttcttcaaatttcaaaaccagattgttctgtctcagaattcagaatcagtctctgatcttctccatgacgattccgtttcattgatcgatcaatcaaaatctcgccggagtttcttcccgccggcctgaatcatgcctctgcctatattcccgtcgcggttacagtgttcgtcttcatcgtcttcgtcgtcgtcgcgatcttcgttttttaggcctaagcttcgaatcgatccaagcttgaccttaattccaggcttatccaacgacgtcgggagactgattctctccttcgtcccttaccctcacatctctcgtatcaaatcaacctgtaaatcatggtacgctttcctctcttccaaaaccctaatttcactccgccatagcagagacaacagcaacaccaacaatctctcgcatctcctttgtatcttccctcaggatccttcgatttcgcctccttttctcttcgatcccgtgactctctcttggagatcgcttcctcttatgccttgtaaccctcacgtttacggtctctgcaatttcgtagctgtagctcttggtccttacgtttatgtcctcggtggctctgcttttgatactaggtcttatcctcttgatgttcctttgcctacttcttctgtgtttcgttacagcttcgtgaaatcggtttgggaacggttatctccgatgatgtctccgcgtggtagctttgcttgcgctgcgatgcctggttcttgtggtcggattattgtggcgggaggaggatcacggcacactctgtttggtgctgctggaagtagaatgagttctgtggagatgtatgatgttgagaaagatgagtggagagtaatgaatgaattgcctaggtttagagcaggatgtgttggtttcttggtggagaatgagaaggagaaggagaaggaggaggaagggagagagttttgggttatgggtggctatggcggatcgaggacggtttcggggattcttcctgttgatgagtactataaagacgcggtagtgatggatttgagagtagatggtggtgagaaatggagggtagttggagatatgtggggagaagaagagagacctaagctagggaagattgttgctgttgattgtgggaagcctgtgtttttcatgttggataaggattggattcttaggtatgagatgggtttgaatcgttggagaaaggagtcaagcgtgcctaagaaagctcattacgacaaaccggttggtttcgttgcactgaatggggaattacatgttatgattcttttggatggttataatctgatggatacaaggcatactagacaacagaggaaagctggatctttgatgattcatatgtatgatccaaagaagaagacttggagatcggttgtctcaaagccaccgttcaatcatcaacttgatttcaggaccacggttatgtgcaccatccgattgtagtaggtgtaaaaaactctcatcacacatcatctagaataaaatttggtgttcatgttgtgtgagctctgatgatgtttaggtattggttcgtttcttataccacttacatatgttaccacactgtctgtacaagttgaaaaacaaaaacaaaaaagaactgagtattctgtttatattgctaaagggtattctataaaaatgctctagcttgcgaacaatgcaacatttgcttcttctactctcgtttcaagttaatttcttcataacactaatcaaatccaagactttctgaatctctttttgactgtctatcacaattcagtttcgtggaaaaggtttttgtctcaagaaagaagacagtttcctaccataagcaagagtggttggtcactgaagaagacaagacagtctcttaccattagattattgtagcgtgatgtgttttgtttgtgctaccaaccagaaatactagcaactatcatactccacagaattgagattggttcaagtgtattatacattgatgatgaggttttgaattttgatcaaacaacacacaaaaatagtattgtagttggtttaagagcaatgacttggagtgatgaccagagttacttactcattgtagaaagtcaaacgtggcaacacagctttgcacgcttcattgacatacacgtcgacgaaaaaaccatatccgctcatcgagaaagtcggaatttttccgagaaaattcaaaagggcgaaaaaaagagcttttgcgtacagttttcgaattggtctccttcgtacgggtaaaatcagctcaaaaacctgacctttatttttctggttcttcacatttcccgatctgattttagagtcatagcttttctaaagttctcaatttgaactcatactgtttctgggttcttctttcgatgtctctggtgattttaacttttgtgctatttttaattcgatgctgaactgattagggttgatactgtttctggtcattattcactacgcagataaagacgacggctttgattttttttgtttggatttagggttttgtgatttctaatctctccttgtttattaaatctctcagtagattgattgtcaaattgaagattgatgaaactctgatatgatcgtaatcgtcgactgttttctttgattttagctcttcataattgggtttaaatggcaagagggttttaatagttttgacttacattgattgttaaacttaaattgatgattgatgaaactgaggtttggtcgtaatcgtcgattgttttctttgattttagctcttcatagtttggtttaagtgacaataaaggttttagcttcagagtgtggaatgtgttattgatgaaagttggaacatttttactggcttttacaggcaagctatggttcaagagaactatgaatgaaactgtggtgtaagagaatatcaatggttgttatctgctataatgttttttggaccaagtgagtttgatgctgatgaa

SEQ ID NO: 6073 - DNA, 3000 bp, Unknown
  misc_feature (1)..( 3000): cDNA_ID_3079472_gDNA_ID_1620842_Annot_ID_170079 3000 nt of promoter + ATG
ttatatggatttttttggaggtctaagtctttgtgttgtatgaaaatcaatagagtatgtgtgcatgcatgcacatgcacatgtacaataatgtaataaattattgtatttgtatttgtatttgttgatggctccaaataataatagtgtttatggaatattctacacaggttggcgttccacgcaatcaagtgaacccatactttagggtatcaaaataaagaaaatgtacattttataaatttttcaaggctttttatgttttaagaaaaatattatacgcatttttttaataaattcatttttgttgagctttcttttcatgtttcgtgggatttaaacttgatgaaaacttatatttgttgtcaatgaatctaatttggtaacaattgggttttaaaaaatttaaaccttaaattgcttgcaaaatggaagacatcctaagactatattcatcagcgatatctagtacaatatatcaatattaaataaaagaaaaaatagaaaaagaggagagtgggagagagtcgtctctcgtttgagagactacgagaaaaacgtttcttacatgtggttttttataattagtcaagctgaaatacttattaatatgtttacacttaaaatttgtgttcacacataaatgagaaactaaaatcaagagaccatagatggtgatgctctaagatacggtgattttagttgcaaaattataaaaaaaaatctttaattaatcaagtaaatgtgttagctttgctatccattgaaataatttctggttgaaaaactcgattacgtgagtttgataaatgatattgaaggcaaaaatctaaacaatatatttacagaatgtttttttacttacaaactttttatgaaactaaaatatgttctataaaatttagtataaccgatcatatattactacattatttgtgattttataaaaaaaaatattataaggaaaagattttttatttgcgtagcacatttaaatatgccggaccggtcctgattcgaacttacgaaattaaatcggctgcacaactataagtgaattaactttttgtttttcaatttttcataatttatactaataaaaacgttgaaggataacacatacttctttaaataattttttgactagaagtaatctaaactacaaaatacactcattaaacagttattaggtttatgctgtatgacaaacttagagtaagatacttcactaatcatttaatttatatcaacgatacgacgctataagtcaataaaagaattaacttttttttctttttttttggaaatttttttagttgaaagataattcctagaaaataagttatatatttgagttttcatacaacttaaaaacagttaatgattagctatatacctatacttaatgctttctcatatctaattttgacaatctctctttttttttaatttttaatttaattttttcaccaaatactaccgtaccgtgctatatatcttggttgcttaattttgacaacctctctttttatgtatggtaatggaccacacatatccgctttgaaaagtggtccgaaggggaagacgtacggggctctcgacagctagcgaaggaaatgtagtttcttgccgtgattaaccttctttttaaggttttgtcgagaaatcataatcccgttatcgttaataaagttgttaatacccaaagataatttaagattaaaagcatgtctttgacacccaaaaaaaaaaaacacatagaagataaaaagcatgtcccgcaaaaatacaaatagaatattccttctttttaaggttgtcgagaaatcataatcactttatcgttaataaagctggtaatacgattaaaaagcatgtctcacaaaaatacaaatagaatattccttcttcttttttatttttgttgtcgagaaatcataatcactatcgttgtgatcaactaactgttttatatcgatcgacgatcgctcattacaaaaaaaaaaaaaaagtgaatgtttgtaccgaagttgtaacaataaataactaaggagtttggagagaacggagtagcttctttattaatgacgaacagaaaggcagtaattaacataatggaaaaccgtaagtacagaaacttagaaccgaaagtacaggttgaaaaactgatattaatggtcggaaaacctgaaaatacagaacggaaaaccagaaagtaagagataaagagataggcagcaattctctcttaaattctctgagtggtgacttaggttctggatcccccttcttagtagtatctcttcctattggcaaggagctgatctagggttctcttagtctctcttgcgatttctcctttttgcccttctgaatttatcgggctgggccgagccgtgatgggcagagctgtgatgggccgagtagtcattctgatgggccgttgttctgatgggccgttcttctttgttatgagctttcttgacttggtctatttgtgtttaggccgaattgggcatggagggcaaagcccgtatcccacaccgaatctaaataagaggaaacaaagaaaaaggagaaaaagaagaagaagatatgcagccaaatgggcttaaaccattaacataatgggaaagcctaacttaagcccaatacttcagctgtcaaataagaagagaaagcccaatactccaaattcggatcatatcacattatacatctaaatctgtttcacaattcaaaacatacatttggattttgactagtcgaagcctagtaattagtaattaaccatatccatgtctcagccaatcataaactaccacgtgggtgattaaattaattacagagccaaaacaaaattgtcgtttcttcaaatttcaaaaccagattgttctgtctcagaattcagaatcagtctctgatcttctccatgacgattccgtttcattgatcgatcaatcaaaatctcgccggagtttcttcccgccggcctgaatc

SEQ ID NO: 6074 - DNA, 3000 bp, Unknown; identical to SEQ ID NO: 6066
  misc_feature (1)..( 3000): cDNA_ID_2025218_gDNA_ID_1620842_Annot_ID_170070 3000 nt of promoter + ATG

SEQ ID NO: 6075 - DNA, 3000 bp, Unknown
  misc_feature (1)..( 3000): cDNA_ID_1829948_gDNA_ID_1620842_Annot_ID_50901 3000 nt of promoter + ATG
atttttgttgtcgagaaatcataatcactatcgttgtgatcaactaactgttttatatcgatcgacgatcgctcattacaaaaaaaaaaaaaaagtgaatgtttgtaccgaagttgtaacaataaataactaaggagtttggagagaacggagtagcttctttattaatgacgaacagaaaggcagtaattaacataatggaaaaccgtaagtacagaaacttagaaccgaaagtacaggttgaaaaactgatattaatggtcggaaaacctgaaaatacagaacggaaaaccagaaagtaagagataaagagataggcagcaattctctcttaaattctctgagtggtgacttaggttctggatcccccttcttagtagtatctcttcctattggcaaggagctgatctagggttctcttagtctctcttgcgatttctcctttttgcccttctgaatttatcgggctgggccgagccgtgatgggcagagctgtgatgggccgagtagtcattctgatgggccgttgttctgatgggccgttcttctttgttatgagctttcttgacttggtctatttgtgtttaggccgaattgggcatggagggcaaagcccgtatcccacaccgaatctaaataagaggaaacaaagaaaaaggagaaaaagaagaagaagatatgcagccaaatgggcttaaaccattaacataatgggaaagcctaacttaagcccaatacttcagctgtcaaataagaagagaaagcccaatactccaaattcggatcatatcacattatacatctaaatctgtttcacaattcaaaacatacatttggattttgactagtcgaagcctagtaattagtaattaaccatatccatgtctcagccaatcataaactaccacgtgggtgattaaattaattacagagccaaaacaaaattgtcgtttcttcaaatttcaaaaccagattgttctgtctcagaattcagaatcagtctctgatcttctccatgacgattccgtttcattgatcgatcaatcaaaatctcgccggagtttcttcccgccggcctgaatcatgcctctgcctatattcccgtcgcggttacagtgttcgtcttcatcgtcttcgtcgtcgtcgcgatcttcgttttttaggcctaagcttcgaatcgatccaagcttgaccttaattccaggcttatccaacgacgtcgggagactgattctctccttcgtcccttaccctcacatctctcgtatcaaatcaacctgtaaatcatggtacgctttcctctcttccaaaaccctaatttcactccgccatagcagagacaacagcaacaccaacaatctctcgcatctcctttgtatcttccctcaggatccttcgatttcgcctccttttctcttcgatcccgtgactctctcttggagatcgcttcctcttatgccttgtaaccctcacgtttacggtctctgcaatttcgtagctgtagctcttggtccttacgtttatgtcctcggtggctctgcttttgatactaggtcttatcctcttgatgttcctttgcctacttcttctgtgtttcgttacagcttcgtgaaatcggtttgggaacggttatctccgatgatgtctccgcgtggtagctttgcttgcgctgcgatgcctggttcttgtggtcggattattgtggcgggaggaggatcacggcacactctgtttggtgctgctggaagtagaatgagttctgtggagatgtatgatgttgagaaagatgagtggagagtaatgaatgaattgcctaggtttagagcaggatgtgttggtttcttggtggagaatgagaaggagaaggagaaggaggaggaagggagagagttttgggttatgggtggctatggcggatcgaggacggtttcggggattcttcctgttgatgagtactataaagacgcggtagtgatggatttgagagtagatggtggtgagaaatggagggtagttggagatatgtggggagaagaagagagacctaagctagggaagattgttgctgttgattgtgggaagcctgtgtttttcatgttggataaggattggattcttaggtatgagatgggtttgaatcgttggagaaaggagtcaagcgtgcctaagaaagctcattacgacaaaccggttggtttcgttgcactgaatggggaattacatgttatgattcttttggatggttataatctgatggatacaaggcatactagacaacagaggaaagctggatctttgatgattcatatgtatgatccaaagaagaagacttggagatcggttgtctcaaagccaccgttcaatcatcaacttgatttcaggaccacggttatgtgcaccatccgattgtagtaggtgtaaaaaactctcatcacacatcatctagaataaaatttggtgttcatgttgtgtgagctctgatgatgtttaggtattggttcgtttcttataccacttacatatgttaccacactgtctgtacaagttgaaaaacaaaaacaaaaaagaactgagtattctgtttatattgctaaagggtattctataaaaatgctctagcttgcgaacaatgcaacatttgcttcttctactctcgtttcaagttaatttcttcataacactaatcaaatccaagactttctgaatctctttttgactgtctatcacaattcagtttcgtggaaaaggtttttgtctcaagaaagaagacagtttcctaccataagcaagagtggttggtcactgaagaagacaagacagtctcttaccattagattattgtagcgtgatgtgttttgtttgtgctaccaaccagaaatactagcaactatcatactccacagaattgagattggttcaagtgtattatacattgatgatgaggttttgaattttgatcaaacaacacacaaaaatagtattgtagttggtttaagagca

SEQ ID NO: 6076 - DNA, 3000 bp, Unknown; identical to SEQ ID NO: 6071
  misc_feature (1)..( 3000): cDNA_ID_2999710_gDNA_ID_1620842_Annot_ID_50905 3000 nt of promoter + ATG

SEQ ID NO: 6077 - DNA, 3000 bp, Unknown
  misc_feature (1)..( 3000): cDNA_ID_1829921_gDNA_ID_1620842_Annot_ID_50909 3000 nt of promoter + ATG
tggagtagcatgctagtttagacaaatataaaatggtggaagagtaaatattcaattttgagagggtaataatgtaatcaataacatgctagtttagacaaatactcccaaaagaatgtctcaaactcaaagagttggttagaatttaaagtgtccaaatacacaaataccccaaattttatactatttatgtggctagtggctacatacaaatttatccagtgaacttgtgtgataatttactgtcttaaaagtttatctgtatctagaaatagaagatccgatcaacaaaatacgagtgagcatttcttcatggatcatgatcagaaactttcttatgaaaaacaatgagcaccacttttatgggtcactaagggttcgtgagttaaccccatacctcttttgtgtgtgtgccataggtagtggaaaagggaatctactgatgttagagggtggtgctgtttcggcgacccacaaatctggacgatgtaggcccaaattttacctcaccccaccattttcgtagacttttcattccggtcccataattttacatttcgttggtctaacccatcattcattgattctttacctttttgccaagaggctacttaacctttttgctctttatggattggtgataataatttagtctcaccataaaattcaatgtttttctagtcaacaccatctaaattctaattcaacatttttttcaacgctaattaaaacgaaattcacatatttttagatttatgactactagataaacaagttttatcgaaacttttttcaacaaaaatttcatgcgaaacaacaaaccacggatcaatacttactaatcacggatcggaatcttctatttttttttttttctattttgtaactatcatatttaatgttttcaactaatcacgtagaagggagctttttcaactattagtgaattgacttgtaaacaaaaggagaagtcaaataagaacaacgataatagtagaagaagctcttagactaattaattaatatcttagaggtacaaaaacaatttgattattattactttatgcgtcatctcttagatcatcttccacgggcctcatggacatggacattgacatcatgactcatgagtttggttggtgtaaagttcaaaaatattaacacataacaccaaacgatcaatgtcttatacatatttctatgtttaaaattcactaaaatatgttgcaaacagaataaaaaatattagctgcttataccaattgtagaagaataatatatagcaacaaaaataatatagaatgagtacaaaatggaaaataatctggtgtgtatataagttgattttcataaaattctgatagtaatatttgacacaaatcattcataaattaaaattttctatttaatagcattttgaaaaaaaattatttaaattataaattaacattttctatttaatagcattttgaaaaaattatattattcataaatgatgcattgaaatgttagatttatggtaaacatcaatctttatacattattaaaactcgttgaaaagtttaagtatcaactaaatttataggcgtttattgttttaaaagtttagaaccataaagttcaaatcattccaccacaattttgatcaaagttaaccacaacaaatgacaaggattagatgttacttggaatcgtttgattatagataaagaaaacgatattagtacttttatagttcagaataaatacataattggaagtcattttatgtgatacggcaagataactcttttgttcagcgccgttcttttgttgtcccaaggaactattgtgcgtaaacatcaaccccaaaaatgcataccatgtcacaactttttgaaagaacttaaattaacttaccaattttacaagaagtgaatacaactaatacagctttttaacctaggcttaattgcacgctaatgcttacaacatattccatcagattctgtcttttctttataaaaagttttagagatttctttctatttcaaattatttggtgttttacatctaaagtgtaagaaaccaattttcttttttttcaaaacgcaactaaaaaaaatcctttacatattatacattttattcttatttcattaataataaaatataatttattttataattttctctatcatgtattcttcaataatataacatcatattttgaccccacaaaaaaacttatataaagagtacaagaaaaacaaaactaatgtttgatagcttttacatttttaaaatctgagaaaattgaagttttaactccatcaaataacattgcaaaatcacataaaaattatgatttgtgatttcacgtttaaattttgttttgttagaaatctatttgataaagtagacgtttatataccaacataatcgtctaggtaattaaattagacatccacataacaaaatagcatgttatatatatttttaaaaatcacatattcgataataattaaataaaagttattaaaaaattaaaaatcaatatactatttaatggcgatcaaaaacatcattatttgtttttaaatttcatcgtcaaatcttgccatctacctaatttaaccacacaaaaacatcatcaaattattcctgtataataccaaattaaactcttttgtccaaaacaatttcaaaaaagaaaactctgtggaataagaaacgggcaaagaggggccagaagtttagccacgtcagctacaagagagtgccacatcatcaccataagcctctcccacctgtacggatccctcccaatataaattggaaccaaactctctcctcagaaaaaaccttctcattacacttgcatgtgcaacgacccgaccctatacccgacccggcccacattttaaacccattttagccttttctgtttccgccgccgactgatcggaataatcgatcaaagagagaacaactgaatcttcgccggatactacgccgatg

SEQ ID NO: 6078 - DNA, 3000 bp, Unknown; identical to SEQ ID NO: 6070
  misc_feature (1)..( 3000): cDNA_ID_4257535_gDNA_ID_1620842_Annot_ID_50910 3000 nt of promoter + ATG

SEQ ID NO: 6079 - DNA, 3000 bp, Unknown
  misc_feature (1)..( 3000): cDNA_ID_3076928_gDNA_ID_1620843_Annot_ID_170107 3000 nt of promoter + ATG
cggctgcatttctcgagactatctcaccggactgcattgtcaggtactaacttagttttgggtggaatcatattgaaagtgactttatggatggaattattcggaccgttgtagaattagggctaaatacctctatgacggattcaagggataataaatgttaaggaaagtgatttgcactacatgattttccaaacctatgagattcatatgagatgagagatgcgagaaataatggagagatgtgttgagtcatatattttatttcatctgttaagaaaaattgaaaaaagttttaaaaaaaactaaaactttatgttctatttctaaaatcaaaaaaattgaaccgttatccggcatcacgggtcaaagaaaagtttttatggacgtgaaaacactgactaacacaaaacaatcgtaggttgtgttggggtacaatgggttttaccactagtagctaattactacccatgttggttctcttgattcgaaatgttttttcctgttgtggatctgttgggctctttgcggctttgcctattagatttagacgtttcggctttgtaaaattttctttcttatgcaaccaatagcaaatcttttaagaaaaaaaaaaaaaaaaaaacccgtaattaatatcgtaagtttgactttatttgcttatatgccagcgtcaaatccgattgagcacgtataacaatatccaaacaaaaactaataccattatttatacatacatgttgcatcacgatgaaataaacaccttaatggcagtttaaaagtttgtgtgtatcaccagatctgttaccaacacgtaaatctattacgagatctattacgacttacaagagagaaacaaattgtttaataattcaagttggattgctttcaagtagttaaagtgagttgtggaaataaaagaggattgtttaatggttcctcggtaggaggcaacacataaatatatatcacgagtgagagaaactggatttttttatgttcaaagaaagaaatggaaatgataatcatctctctctgcctagcaacaatcctagcccttcttctcctaaaacaatttctgaatcgaacgtacactgccaaagtcaacctaccaccgtctccgtggcgagttccggtaatcggaaacctccatcagctaagcctccaccctcaccgctcccttcgttcccttagccaccgctacggtccactcatgctccttcattttggccgtgtcccggtcctcgtagtctcttcctctgacgtagctcatgacctcatgaaaacacacgaccttaaggttgcgaaccgcccgcaattaaaagtggtggagaaaattttcaacggtgggcgagaaatggttttctccccttacggagaatattggaggcagattaaggtattattttttttgttttgaaaagtcatttattttttatacaataatactttcctatatatatatatattttttttttcgaaatttaggaagggttattggtttatagatttatctatatatacattttttcagccattttagcaaataaatcctaaaatttgacttatttacaactcaatgctattagcattaaatctttttctaaaataattatattttttaaaattcttaatttaaattgtcaatcacattatcaatcaaatttaatccaaacaaacttcacatcaatcccttaaaattagcataaacgtattttgttaacaatattttaaaacaaagttttttgtttaaataaatattgttcttactaaatgttttttgtttaaataaataaatcatgtatttgaacttatttacaaagtcatgctactgaaattaattatttaggaatgaaaatatttaattaaagatttaaatcgtctaaattctttgcttttagagttattatgtcattacctaaaaaataaaaaatattataatttttaaatgttataatttatatatttcaactttataaaactttattaatatttaaacttataaaaagtttaatatatcaaaaaaatttaacatcattatataatatatagagttgtttttttacgtcatattttacggttcgaaattttaaaaatgaacatatattaaccacttggcgaaaaatatgtgggttcaacgtcccgcatcgattaaaatatttagacaatgattcataaacatatcataaataagattaacattaataaaataaatagttttttttgtggacgggtttggcgggacgggtttgacaagacgttacttaataacaattgtaaactataaagtaaaaatattttatagataaatacaatttgcaagtttttatatatactaactttaaaaaatgaattgtccctgcggtgtaccgcgggttaaaatctagtaaggaattgaaaatccaaacaaaaatcatttgttatttaatcattgattttaaaattctaattaaaaccatgtgttattgattcgatgatttataaatactagttaaaatcctttgttattcgtgtagtcatttgtttttggatttgggaatccaaattatgttttaaatggaattgaatggatttgaaagagaaaaatagaaggattcaaatccatgagtaaacacatgttatttcaaaatcaatatatcttgatttcataattaatagagattttcaaattctatatagatttacaaatcaataaaccaataacaccttagtttctgtttagctctcttgatttgctatatgtgcctacaacataaatatgaaagttcagatttgatttagtttacatgagcttgatagttacttggtgaagaaaaagaaaaatatctatttaatatttgagtcatgtgatctatataaattgaaactagaatatgattaattaactgatgaaaatatcaactctgtcttgtgaggaagagtgtatgcatcgtcaatctactcaataaaaaaaaggtacaatcctttgaaaaggtaagagaagaggagataagtgaaatg

SEQ ID NO: 6080 - DNA, 3000 bp, Unknown
  misc_feature (1)..( 3000): cDNA_ID_3079516_gDNA_ID_1620843_Annot_ID_170109 3000 nt of promoter + ATG
tctaaatatagatttctttataaatagagaagatctttgctccaataattgttgttttgttcctctaaacaaaatgttccaaataaattttattttaatttctaacataatcctcctttatttttaaagtttataaattctatccacttaggttatttttaaacaaaacaaaataaattttcattataacacataaatagacaatcgaatgattaagacattatttttaagcatcatcattagtactatttttatattttaaaatttcaattaatttagtaaatatatctaatacaaatttatatttttaggtattaaatgataacttattaaaattggaagagttttttgtaaataaaaaaattatgctttaaaaatagagaaatgattagtattgctccaaatttggagcaatactatctttatttttggcgcaagatattgagtaccattgatgatgattttatatcaaatatagagcttgtagcaagaagaagggtgacttacattatccttgtggtaaggtttgtagtacgaaactatttttaaccattatccttcaaacaaacaatgttaataattctatgtcaagtttctagatcttaatctccgataacaaactaataattaacaattgttagaacatccaacaataaagcataaagagtgaaaaaaaaaaaaaaatccaattaaaacctgcaatttttctcgttctcaaataaaacttctaactaattaattttcttaaaaaatcttcaagtcgtcaaaattcaaacttttcctatttaaaacttatcttgaaaacctccaaattgaaatattttcccaattaaaacctcaaactttttttcgtttctaaataaaatttctaacataactaattaatttttcctaaagaaacgtttaagtcatcaaattttgagtctgatcaatgatttactaacgataaacggcttttaacaacatattttccatttatttagtttttgaaattcacatgttttagttacagtagaaaatataaaatcaaaattgaggattgaataaatttatacttgaatgattgttaaaatttatactttaatgattatggttaaaattttaaatcaatcgaagtaaataacccaattggtaagtaactaagtattaaaagattccaaaataggaaatatacaataatgttttgcttgtgcatcggtggtcattaagtaaagggcaccattcaattcttagagtggtaggaagcgagaaaccaagccaatatggtatcccatatggctaagcttatgagagagttagagacaagtgtcgcattaggtgtcgtatgaaagatgcatacgatgtatatacagtttttttaacaacgtgtctatttgtaattatcactcattgtcttacttgatagcttttgtttgcttcttcttaataggatgcattttattgcatgtgtatgcatttctccaaatgaaatcttgtgaaacacttgtctctaagagtctaactctcacacaagctaaaaacacgtcagcttgaggtccacttagcttattgatgagtagttttaaagtttgtgtgtttccaactaatcagtaactagtaatcacccaacacataaataaatatattacgagtgagagaattgtttcaaagttagaaatggaaatcataatcatctctctctgcctagcaacaatcctagcctttcttctcctaaaaccacttctgaatcgaaccgttgccaaagacaacctaccaccgtctccgtggcgagttccggtaatcggaaacctccaccagctaagcctccaccctcaccgctcccttcgttccctcagccaccgctacgggccactcatgctccttcattttggccgtgtcccgatcctcgtagtctcttcctctgacgtagctcatgacctcatgaaaacacacgaccttaaggttgcgaaccgcccgcgattaaaagtgattgaaacaatcctcaacggtgggagagaagtggttttttccccttacggagactattggaggcagattaaggtgtttttgctaagtcattaatttatatatacagttaacaattagttgtggttagctctctggatttgctatctgtggcctattatataatttccaaagtctatatttgattaagttttaccagttagattgatagttacatgttgtagtgaatacatgcaccgtgcgtttgattaattttgatcccccttccgttttattttaatttgagtatcgtcttgtaaacaaaaaatgtcgtttaaaaaaaaattcaattttattttatagttttaatttcttgaccaataaaaaatttacataacatattaataaaaggtaaaaatagtattgtttcgttaatttgtgagtaaaaaactaaaagacatataatacgaaatgaattgtatactatttacttcttgaagtacgtttgttttaaaagtcagaaggtatttacttgttgaaatacatatacagttctataatgtttaatcttccaattgaaaaatacaatacatttaaataaaaccattaaatatttttatacaaactttcttattagatatttgattttcgtaagtttagttaataagaataacttgtatatgaaattaacattgtttggcaagaataatagcagaaataaataaataaataaaaaatgagaagaattgtggacttcatacataagaattagtgtttcttttctaatatatagaggatgtaataaaggcatgagttgagctttaaaagaaaaaaaaacatttgctttgtgcgtagagaaagaacagaacacatttttttgcaaaagataaacaacggaagtttgagagaaagtagtatttttgtttgttaaaaactttgatatattaatgctcttgatacttagatatattaattttctcattaagaaactgatgaaagtattacgtctgttttgtgaggaagactgtatgcgtcgtccatctactcaataagaaa

SEQ ID NO: 6081 - DNA, 3000 bp, Unknown
  misc_feature (1)..( 3000): cDNA_ID_2054365_gDNA_ID_1620843_Annot_ID_170115 3000 nt of promoter + ATG
ctgccttctagccgcactctcagtagggtcagcacaggtaacatactgcactgtaacttctcttagctctcccagaacttgatctctagaaggaatgaccactggtggggaagtagcctccagcgatccatgccgccagatgggtgggggtcccacacttggagggggaggggttactggatctggatcaaccacatctctctcaagaggaggtcgtctggttctagaggagtcagaaacagcctggtgttgctcagagggggtgggggccttttccctccaacggagactgtctcggagatcaatttttcgagaagtgttatggggatgggaatgtgacgtggtaagcggtctgtaatggttacggccttgatggtccgtgtatctactatgagagtttcttggtcccgcagcccctgaggatctctctgctgatctaaacccacgtctctcatggcgatggtcagaagatctcttatgtgggtttgaaacttcttcagagaaggtaggttttgtagaggatctttggtggctcactggtgccttgaaattatcccgaggagtgtagtagttcctagagtcccctttagagccaagagacagggccggaggagtagggattgcagacttcattttagaagtagtcaaaccaggacagagctttgtctcatgggagagtctgaggcagtggtgacaatggttcttgaggttcttataatccagatacacaagtgcttcactcccatcaggaaagtccacaatggtctctttgactaaaggttgtaagccattgatgagcagcttgaacttaactgtggccgaagttatttccatttccaagatctcccccaattcttctccaatggtttttagcatttctggttgccaatagtgcttaggtaggccctggatttctatccaaaagggaatgagggacgggaaggagtcagatataacaggctcccacttctgtagtatcaccatccattggtcatagtgatatgacctgttctccaggactttttgcatatcctcctcaaaatcaaacttaaactggaagcaacctttgcctagatctgaccctatggctttacctcgcaggttccacctattagagaggaaagggaatagagaccagaggcgttgcacagatgggttagtgagtcggcccatgagagttagagaattggcttctataagctccgaggtatccagatctggggctctaattctcttacggggagggggagagtaacctctctccaactctttcccttttaaatggaatgggattctcttatccatagaaacagcaagagcttttataaggttagggagtggttgaggttagttcttcgggtcgcaataaatgttcttgacaaggttaaaaggcttaaaaaggttttgaagaggtgtacaaaggttatagaagtatcgacagaagaagagactacctgaaggatgtcgaaacctcaaacaacctggtggagaggagtagagagcaggggaagagcggtggaagagtagaaccagtcgccggaaaatgcaattttgaaacaaagtttgccattgcaggtgtcggaccgctgaatattactccttttgggtgggaaatttgaaattagatctggttaaaagggtgcatcatactccttaaacacaatctcgacaaaagtgcttgggagcgttttttagaaaaaaaaaaacccctagtaattgttgtattaaacgcataagaccccaagtaaagtatcattggaccagcccttctgcgtcaaaatacttcagtaatacatacaaatcaaacaactcctgcgaaaacaaattgcaattacgatcacgttcgtcacccaagaagttgtcataaatttgagtttgtactttccgatatttacataaagttccaaatacgtgacgctggaccgtccctagttgctatcgtcgattagtgtaatctgtatctagtcgcatctcccacgttacatataatttacataattattcgaaagatcccaaataatatacttcaaatagcaattaaagaagcattattgtgtacataatgcatacacataattaaacgcatccttctttttttagttgaaatttaagtcttagtaaatcaaaatgaaaaatactataaaatgtgtctgtttgaatctgatatgcataatgctttttatggctatcataatcaaatacagaaattatacatgtaaaacgtaattgacaaaaaatgtgattatcttagtaaaatattataaaaataatgttgatgaagttaaatatatggttcttaattagtataatataattgtgattctcttagtaaactagtacaaaaagagtattgatgaagtattcaattaatagttaatacaaatcatgttcttcacttagacatagtcacaaattaaaacaaatacataaaattatttttctcgagatatccgaagtccgaacctataaattcgatcattatcccaaactcttatttcttttttcttttgcaagaaaacaattgtactcctccgcattgattacaagagacacacaataagagggaccgaaagatagaaaaagagtacattacacgagattccatatttttcatgtttttattacgtacgtaactgtatgtatatgtaccatatatagataacggaccattaattatttgaacatttacctcaaaaagcaaagtactctctctacttcattccaaccctatgcgtatgtatcttagtgtatggaccgatagacaaattaaatgtataggtagacacatgggctacagttatgaatgttacaattatttcatcaaaagcaaagtactctccatcgttacatgtacatatatacatttcttataattatttaaaacctgtttggtcaaaaggatagtgctcgactatacatatagccaaagaagagcagaaaaatcaaagtcgtgagttcagaagctataacaaaatttctaagaaaaagaaagataagaaa

SEQ ID NO: 6082 - DNA, 3000 bp, Unknown
  misc_feature (1)..( 3000): cDNA_ID_3079496_gDNA_ID_1620843_Annot_ID_170120 3000 nt of promoter + ATG
ctatcacgagcgtgaattaatttgttgttgaacttgttgtctagggatagcttctgtgaagttttgtcaaccgcctgaatagattaagaagaccacactgttcgattaccctatccttaggaatcatttatccatttgattgcctgttatcatttctgctttgtcattcacttgcctgctattgccatttctgcttttagtttcatttcatttctgttattgcatactaggactgttagaaccaaccaactttctacttggcttgacttagagctttctgatcatatctcatctgtttgcatcacattggattgacatcctaaaatactacaacgacaagatagtgttttaggattaattgagtaaaatcctactatcatatagataaaagcatttttatttggatcaagagcgatctagacgggaatgcgaaacttagattcaaccatgattttgattgctaaaaaaatgttagagatttaggtttgaattagtgttcttatactatatatgtaaatatttttaatgtattttttttgttattattgattctcttttgttagagatttaggtttgaactagcaatgatgatttacaaatatttaccaaattaataatttatgatttctgtgtactgagttgattaagactagaaaatgcaattatgctttcatataatagattaacaattttatccaaaaaaaagctagctagtttttttttttttttttttttggtcgtagctaactagattaactaaaaaaaactatagttcataactttgaaagagaaaaaaattctcttttatgattctaataaattttcaaaaaaaagaagttaaaaagtgcatttaaagtaacatatgaatatgactatataactcaaaagagttcgtgggaaacatctcttcacatgcagttgtattatattaattaattttgtaacaaaagagtggcatatgaccccatggaattgttcgtaacgtatctttacaaaatcaaactatattgtttgtagcgaaaccatgttttttctgtaaaccctaccaacattttatattttaaatttttatgattatgtgttgcttgcttgcatgcttctctctctcgatgttaggtactagactacgagagaacaagaagtataataatatgtatgcaagcaaatgcaacacatacagatagaaaaagacgtatgacgtagaaaagcagctttaggatgattccaaaacttgtttcttcaagttgacatttttgcagataagtgttaagttaaccctatcacgtctggtcgtgctggtgcgtggtcctcacgctccctcaatctcctgtgttttctgaaaatgtaggcccattttgctttgacttgggcccatttaaccctctcctcatctttcaatcttccaataaacaagtttttttaattaaggaagcaatgacttttgatgtctttaattagtattttattctgttttttgaagtttattattataattggtttcgtttctatcatggatgtggatcttctttgtttcttctcttcacgtcgtctttcctttaatagttacatattattttaagttatataagaaatatgaacccctttaaacatggagaccaaatagaaattatttgattattattacctcaacaaataattttgtcaatttttttggttgagaacgacgtttttataacaaaaagacaaaaaaaaaaaattgttcatattacactcttcttatcatctttattcttcgtattttccatacagttttattttattttattacatatatatttttaaaatgaaaaataatttatatgattttcttaaaaattgttttaatatgtgtattgtttgattatgtatgctaaaaaatggtacgtttctatatcatcttaggcgtattagttagtgtttagaagaattttcttacaagaatcgtgatcgtttaacgcttaacgagttcttgaaattactattactaattttgataatatgagtgctatttatcaattaatcttatgtttccttaaactccctttttaacttttttcacgtagttacaaaaagaaataaatatatattagtataaattaaaacatatcattccgcgataactagcaacggtgccgtttcaataacctctctcatgtcctttcgtaactcaacgaaacccaaaatcaacggctcagatcattccgacttctgtttcgcctttgctacgccacttcttcttcttcttctccggttttaaattaaaacctctcacaaaattattcggaatattatttcttcttcttcttcttcttcttcttcatcatcgcatctctctcacttcacgttttcttcggtgaagagatagccgccggaaaaagttatcatctccggaaatttcgctctttctttacggtaattacgagaaaaacaaaatccaaaaatcgtttttttctatttgatgattttgccttcgtattcaatattgtaaagttttgttttttccgttgtttaattacgtaaattcgataaaagtttcttcctttagattgaatttttctgtttctatggcttgagaactagtttcgtgtggttgtttcttctgattcttgaatttgattgagaaagtttatatctttggttaagagtttttttgtttgtgtacgttttaaaatccatggagaagcttgaatcacggagaagactagtcgtattaatggaaactccgtgtaaatcgaatgagcttcttcttttggatggttcttcttctctttagctttcctcttttctctctttttggtttctttaacaatctctgacttatagcttttgaagcctctgtttgtttatggttatatcctctctgttcttctcatttctaaagactgaattttgaatggtaaaagatcgtgtgtgtgtgtctgtatccttaggctttgatgcagttttctgaaaatttgaactttgtttatatgttgcagtgtttgagggtgtgttttatgt

SEQ ID NO: 6083 - DNA, 3000 bp, Unknown
  misc_feature (1)..( 3000): cDNA_ID_2054341_gDNA_ID_1620843_Annot_ID_170124 3000 nt of promoter + ATG
ctcattgacccactcgtaggttgttttcttagtgatcaactcatatgtaattttacgtaacaatcaaggaaaaatatgtaaaagctatgaagaaaagagaaaagaagccgaaatttctggaagtatgttgaaatgtgcgttgtcggttttgggaatctaaggtactgtgagccgacaaaagtagagatgtaataaagattttggtcaggcaatcataaatccaaatctttctgcattttataacaatgacgctcatcatcactttcctcttcaatatgtctcagcttttacttacgtgcgttatcatcatgttcctataacgtatcatctctaactttttatttaaacaatctgcggagcatatataaagaaccggataggacaagaacaaaacgtcaccgtttatatgagaaagcaaagcccactcactctcagttttgatatgtttttatgaatagtatcaccagccgcatctattcattcacactaataacgatatttataagctaattatggattttaaatttacgtacattgtgaatttctatgttaggtaacataagtataattcattataaggaacaatgcattttcacatactgcagtgcacattattaataaacaatagtgtctaacatattgcaatgcacgttacttgatccaactctctatcctattttgggttgagaggaagaacattttttgaattggccgtcatttggtacgtacaaatggttgaacatgattgcgactaattttattttttatatatcgttaaaaaaatttctgaatagaatcttcaagtaatttgagacgtctctagtatagtgcctaatatttcgtctctactaatgtctaatacgggttcaatcacaaggactcatccatgtagtgagtaagataccaaagtactcttcagtaattttagtcgacaatattttgtttttagcgtgtgaattaagtttccatatatgatacgtacccaatttttgacctttgtacttatgatacataaaatatttacgcgtcgaacgttatgtatatacgtatgatataatttatttttattttgtgtgggggaaaatgacagttgagcttcaagttgattgagagaccaggcctactatacaaagagaagcgattagcaccaaaaaacaatagtagtacggttgtatttgtcggatctatcatggtctccattaagtaaaatatattcatttaatattcatgaagtagtggtcgatataaaatccaaagattctgattaggaaagtgggaaattgaggaaatatatgagaacgtgaaggtggcggtcttacctaaaatggataaggccattaaaagattcgagcctacgaatacgaaggataaatatgaatatgtatagtgtattattttgatttagtataagaaaagctgtgattggttgattcttccctcgcgttacctttttgttttgcaagttgactacttgacacacactttataagacatatgtgaatatgtattgtaatacaccatagtaatataagtaggtcggtcatacatttgtatcaatatgaataattaatccacaaatcttttagccatagataacacagagatggctcttgattttatttcctgttttgggggttatgacatgagttcatttcacatgatgtcgttattttgaagcaaattatatttgaaatcgttgtgaaaatactcgaactattaactatgtttgatctttcaattgcagatgaaacttttaaacactagaccaccataaactacatatgagtggattgttgtaatcttgtaaaatcttgatcttaagggattgttctacgtctatttattttttggatattgtagaccttaactatgtaacgaaactttccccactactccccactatcaactgtatgaaattgataattaatcacctaaacttttgtttccactccgaaaacacctttaaaagaaaaaacacctaaaattgcatctcacatatataaattttataaaaacttccaacaagaaaaagtaattatttttatagtttggaaatttgttgtttaggtttttcttttttccccgtttttcgatttaaaagccttagggattgttattaatatcaatctggttttagattttctaattttttttttaaatgactttaataattaaaaaaaaaaacattataacctattgctagagagttttctataattattttgattagtttttcacaatctttaaaaatttctcaaacaatatctctattttaataatattttcatgattttattttgtaaagaaaagtataaaaagtcataaatcaataacataataatttaattcattaaaaatcatagattcttttgttttaattgaataacacaaaaaaattaatgacatttataaaaatatgaatccaaaacttcagatttataaagattctatattacttttatagtgtttaaaataataacaccaaattttaacaaacttattaaataataacagattctacgtaatgtattaatattttaagtgatgaaaactctatttaaatcataaaccaataacactgtttttaaagtgattatgaaactagtccaaaaataaagaaaaatcatgaaactaagccccgtattaaacctattaaggatagttaatgggccatagcccaaaacaagcaagaaccctaaattttcgtcatcttcatcacacgtgcccagaaccaagagcttacctcggcatctgatttagcaatctggatcaggtctgcaatttctgatgattcactctccattgttgtaaatctatgtttcagcttatgatcaaaaaccaatgcgtatgaatcgtctatgttcaccaaatcagtacacgtaaaagcgaatgtgatttctctaattctaccggagagcttattcaaacctgtaattcgcttcgtgttttgcgtatacgtctgctcaatcttcaagatcataactttttgattaacctatg

SEQ ID NO: 6084 - DNA, 617 bp, Unknown
  misc_feature (1)..( 617): cDNA_ID_2054329_gDNA_ID_1620843_Annot_ID_170127 3000 nt of promoter + ATG
acaggttatgtagtagagtaatttatgtaagtgtaaggttcttgacatgtgccaagaatacaaatgtacatgagtgacaatattattatctaaatattttcaaatatttaaaagcttatttcgaaatattttaggatccttttatgaatataagctgcttatatatatgcctataacattcattttcaaatcaaaagctccaacatattaatgagctgacaaacaacttaatgtttgaattcagatatgatttatattgaaagagtctccagctatcttagatagtctccctagttaagggattaaaggttatcattagcatataattggtaccataatattcaccaatactacagagcctaatatacatctctgtggctttgcttttctattctcttttgttattgttgtcattaaagaaaaaaaaagttggaaatgaggacgttgcattgacaatgcaaattcaattttgcttagccattaagaagctttttcacaactttagtaaagaagagagacttatataaagaagatgtctatcaccacttactcttcccctctcctctcttttccaaccaattctcttctttcttgtgtgttcacattcaaagaaaatg

SEQ ID NO: 6085 - DNA, 3000 bp, Unknown
  misc_feature (1)..( 3000): cDNA_ID_2054333_gDNA_ID_1620843_Annot_ID_170126 3000 nt of promoter + ATG
gtgacttagtgataattggcaaattgaccattataaatgttttaatggtaagaatacaacttctgatctcgggtaagacacaagtcgagatccatggttatattgtttacttgtccggtaaatatttctgaaaagtgtcaacttcgaatttttgaaaatttgctattttaatttgtgccagtttattaagttgcaatgctctacgtcgcaagttggaataacaaaataaacatgaacattatcatgtatgataatgtctacaaatatttataacaattatttggataataaaaagactaattaaaactcaaaaagtttactacataccatctacgaaatcggccaaacaatccctttgttgaaaggcaagcatcctctgtgaagtgtcatacccaactgcatgatcaacaaaagctgatgctccaagcacattaatcctttcctcatctttcatcgatgatctgaccaaagccgtgcagagagaagatgggctgtcttggagataaagtcctttgtttgagatagtgtaatctaatccttggaaatgaagagtgagtttaggcaatgaatctatctctaacccaacctcggttgtgaaacacattagttcgttcacttcgtatgcgaccgctggtccaatctgcgccgttagctcttccttcacctcctcgtagagtgatggctctagactcgtgtagtaagtcccaacgtctattgctattccactactctcattgcttctcattctaataaaaaaaaagatcatgagaaacaatataatggatatttacatttagagaaaaaagagcttgattgttttaaatactaacttgcacgtttgtggttttatcttttatgtgaaacgttagaaaaccattttcttaaaatacaaaatatttttcttgtttaaaagtattattcaaataattaataaaatggtgttcaatatgtaggttttatttggaaaaaaaaaaacaccttttaacgcaaactattaatcgaaatccaaatatcaaatgtttgagtctatgaaatttgttgttaaaacgtatattatatcaaatgtttacgtagctatgttagctagggtttaaagtttaaacaaattaaccccaacaaaatgttagagcatctacattgcataacctctcattgatgtctccaagatcaaccatggtaaaaatagactaatcaagattaaaattaaagacattttcctttttaagtgtctaaattgtcttaatgtcttagagaagatatttttgacatccaaaaaggaaaatgtctttaattataactatggttagtttttaagacactcatgagagattatgcaaaggggatagtcgtagctaggtttaatggagtaaattaaaaatataatcaaaacatcaaacgagtgatatgtttatacctctgttggccaagactgatcccgaagagagcaacgtgatacgagtaagcttccgtccccgtcatgtttaacatcggaaccaacaccatatcgccgccgtacgaagccgctgatccgagacggatgtagttacgcgacccggctgcggaaggccaaagacagtgtgaaaatcttgtgagacgtagctgagagaggagcgagaaacggtgagtcgttagactaagtctcccgtcgacgccaccaccgtcttcctccggcgtcgcacggtttctagccccgcagccaaagacaaaccctcgcactatagagagagagttttcttggtcggtgattgaggaagttaactgaagtgtgtcggagacaaggtagccggagctagagggagaggcctcgtagcggcagaaatcggaaggagtgcagagaagagagacagaagttgttgtgtttgttgttgttgcgttgaaatagttagtgtaattggtggagacatgaggacaaagagaagagttattgcaagagattgtagagaaagtgttggaagatttgtctgagagggagcattggtggtcatcatcattatcgaggcatgtgagatgtgtagaagagtctagcttgaggttaaaggttcgtgttggggttccaatggtgatctcaacgtaaagattagattcgaaaggtaagaaaaagccgttcggtatatcattcgggagatcatcttcaaggctagagttatgagttagtacagtgaagaggagcagaagaagaacaagaagaaagagtgagtttgatgaaaccatgtttctttggttttgtatagcttaatgctcccaaaacattcttaagttattagctactttttatatgaggtattgtatttaaattatccttgttttttacgatagtgttgcaccttggcttgcatgaaataatgttttacgctgtcagaaaaaataaaacaataataataacgttttaaatgtttattagtatgaaaattgcctaacatttttataagttataacatttttataagttataacgtatataatcgacactaatttttatatgtatgactaatactatatcttagaactaaatataaagtagtttgtacttacacgttacaactataatttttaaataatttagttacagtagtatatgtttttgttatttctacatgtggcatgtgtggtttatatatgcaggtgggttggttactaaacgcatctaccgtgacaactgacaagcatatattagatgacgtggcccattgacgatcacagtaacttgggcttattgggcccataacgcgtaaaataaaaagcccaacagaatcagaaaaagagatgtgtgggtcccataggaatctgcggtatagaatcaattgcttcgcgggggttttacttttcgtctcatcgcaaaaacgcatgacgcgttttttctccgtagatctttgtcttcgtcttcgtctttgtctttgtaattcttacgttaagctctctcacctacccgaaagctgcgaacttttcctagaaagctaattcaaacgtagaatattctaatcccaccacttaattttataa

SEQ ID NO: 6086 - DNA, 3000 bp, Unknown
  misc_feature (1)..( 3000): cDNA_ID_4270016_gDNA_ID_1620843_Annot_ID_170123 3000 nt of promoter + ATG
ctaagggataatttgtttatctcaaaaaatttcgtggagtaatgtgataagatttatgattaatttcgtggagtttagaattcgtggagtaaaaattaatttcgtggagtattcgataatatgatactacattatattattcgtttctgtctaggaaacttgcaagtttggttgtaacatttcacgcatgtggtaaacacattttgaatatttggagaaattaggagcagtaacaatatgtaaaacataaaataagtcttaaccacaaatttatacgatcacaatcttccataacactaccccaaaatttaatgacagaaaagcgatctcatataccattttcaccttctactccccccttcttcttttttcggtttcatttaaaaaattgatgtatttttgtataaatctcttcatataacttgatataatcttctgatcctacaaaacaaccactatattttttctcaaccaagtaaactatatttgtctaggtattacaatcgaacaattcattgttcaattaatgtataattccgtaatttcgtcatctcattatgcgtacaatttttttctttctatcttaaatctgactgttaaatttcctttagcatcctttccgattcgagcagttataagcacacttttttgtgattaaacattgtcatccttcacgctagcttaccttttaaacgacaaatcagcaataaataaaaaacatggacaatgactctaatggtggagctacatatatcgtgacgaatcacacatgtaagagaatcatgtgaacaatagtggtaggcgaatctctatctcttaatttgattcttcaaaataataattaatgattcgatattaagccactttatcaacatttacttccctaacatagatatatgattctagcacagccaatcgatcattgtattagtgcacgcacacaataatcttatgcgtcatcggtcggaatgcattttttatgttgcacaagattaattttcttcgatgcgtagaattttagtaacattgtttatatgtttaatttacaatattactttttttgtagattaaaaatacaatcacaagatttaatggaagtaataactaattgaaagtttagagatgcgggaacatttatacaaaggagcgcatatagatgctccaagttataaaattctttaatattttggattagatgaaagaataaaagaagcatgtaaaattgtgtctaggtacatttggtttagtagtaattagatttgggacaagatgtataatcgttttttaattagtttgatctttctaattaataaaatcggatgtccattgagaaatacggattgagaccatttgtattgccgatggtggtgttacatagtttttgcagaacaagctcatccatgtctctccaatccggtgccaagatctagttggaatccatgaaccaaatcttttttgttggactgattcactcttagaattaatcaaacaaattaaattggttataattttcgaaattctagtcctcggtaaatcccatttcgttgctaacctagaatttccaaagttattaagaagcatgtaatagtcggtttatatatataaaggatttgttttaaatataggtctaagccataaaaacaaacccaaaattctggaatcgaatcaacctaaaataaaagtctagtttggtattctaaaacatttgttttgcggttgggttggatacgaaatctgaaatccgatacccgaacaaatatccttaaattattatttattattgctactttttatcatgaaacaaatgaatttatgttactagaacaatgaacttttttgtgtaattcggtccaaaaacctaaccaaaataggtttcaattctatgtcggaatgaaattaaatttcgaaaaccgattcgaacctgacaaaacccaaatcgacctatatagatcataaatctccctatttgaattattccaaatccgaaaaaaccgatttgaaaacctgaatgcctaaacctactttaaagttaaagaagcaacagtagccataagaagacccacaatataaagattgaaagaacccaactcgaaccaacaatgttcctaaaaatagaagcccataacctagatagagcccaaacccctaattcttcttcatcgacaacatgcaataaactttgctcttgctcgttagatctctcgctccaagtccaaatttctccataaagatgaagactattagagcatcattattgatgatctcttaaaacaattcttatgttaagaaacatgtcttataactaacaaaaggctcttatataagagacattaagtcacttttgttagttataagacatatctcttaacataagagttatgttaagagaccatcaataactatggtcttagtgacatttgagaagaggagcagccaaagaaatttcagatcacatgttcgattaccaaactactaaaaatagagactgtagagtatagacttattcacaaacttggaaaaaagattaagtttgttttatattaaaggtgaaaacttttgccaaataaaagcaataataatgtgtctcaaaaaaaaaaatcctttttttttttttttgtgcacccaaaaaaaaaaaaaaaaagaataatccttaacattctctctcacataagctttttgaattagacaaaaaaaaaaaaaggcactagtcaagtttttttttttttgtataacaaaaacagagacagatccagacaaaaggctagacatccaccacgtcacgcttcccaaccaagtgacacgtgtcgcatccacaactcgtcaaaacacaaacaccaaaaagtagatgacgttacaaagcatcatccgtaaatggcggcttcctctctctcgctctcttctcctctctcaaacccacttcgcagattcactcttcaccatcttcacctctcaaagaaacccctttcttcctcttctctgttcctctgctccgccgcaaaa

SEQ ID NO: 6087 - DNA, 3000 bp, Unknown
  misc_feature (1)..( 3000): cDNA_ID_1011596_gDNA_ID_1620843_Annot_ID_170117 3000 nt of promoter + ATG
aaataacatttaaaggttaatatttatgtatgaaagatgccaagaaacttgtgtcttgatgatttgtttcgtatttgtcttgagattgtgggtggaagcattataattaacctttctataaagttttagccaaccaaaccaacattaccttttctttttctctctttaataatcaataacaacaataaaattgattactaaaatttaaagttttacatatataaaaatgaacaactaaattgaaaggagacgataataagagagggagaggtgtggacatctgaggatgattctctgccaccaagaagagcaaatgttatgattttaatttctaaattaagtaaatatgttgcacaaaaaaaaaaaaaagtatatataagaagacctcaacatcatcccattggccactttgctttgacctttataattctgacttttaactaatattaatcacgtttttttgttctaggtaaccttttacgtaattaatcatttgttaatcgtcctttctactcctctacctacctacaacttacaaattcgatgaatatttgcaaaataccatttcgtcacgatctttttttttgtaacaaaatagtttaatacaatctattaaattactttttctgactgtcttagaaacatttctatttcattattgggttttaaggaaaaataaaaagaacttatcgttgaagtttattattagtctttttggttaaaatgttgaaaaaattttttatataaaaaggagggtaaagaatgaatattcaaggatggcacgaaacttgtaatgcctcttattggcattataccataaatagatctaagacttgtgtagggtcagaagttaagtatagatttggtcatttataaaaagattctgtatcttttcatgtaagcgaggatatatattatctggactttcgagtaagaaaattgcaagttagatttataaatatccaaaatgaattatcaattggcaaattgtagcaaaagaaatgacattttaatcttgcataaagagaacggtatgaaaacaaaagattagttcaaaatatgatgtaatagctcccattgcccattggatttgatatgatatgtatataattaaattcaatatatttttttttttgctatctattaatatttaaatagaatattcctttcttttatcttaattgagttgtgtgacccactcacccactctatagatcgtcttctcaaataccgaagtatcgaaccaaaccgaattagctaaaccaaaatttatttataaacagtttgatttaattatataaacttgaaaccaaactaaaaccttttctataacctaacggaatatatgtaaatttaattaaatttattttaatttagaaaagactacgaatttaaccatatacatgcatatatttttatttattttaatttagaaaagactacgaatttaaccatatacatgcataaatttattttaatttagaaaagactacgaatttaaccatatacatgcataaatttttatttattcatatattgaggcttgagggtatcacctataagaggttttttaaaaaggagtaaatgtgctaaaggaaaatagaagaaaacagggcaaaaatccgaatttaatcgtttctactttttgtagtggggagttttcaacattttacttaattgaaaaccggacacattcttaagttatttaataactaaaaccggacaaaattcaaatagtatcaaataaacggaaaccaaactgagttaagaaaaaacgatctcgaattacaatttacaaacatgattttccatcacttgagtcttttgaataacagtcaataacaaattctaaatttttttttttaatattcattgttaacagtaacattagtaatgcaatcaaataagtacatgattggttgggcggtaagttatacctgacttacattcttaatttttcttaaaatcttaattacgtaccaatagtgttgtaactttacctttaaacttacagcctattttttttttctttttttttttaagcggttagaaaataaattctcaaacctatattttattagttatagaaattttaattcattaaataaatacaaaaaattaaaattattaacataaatatataaccaaaaaaaatatttactatattttatttttctatcatcataatatatttatttaaattagtaatacaaactattttatttactataaaaaattattacaactattatattttactaatccattttttataaattatttaaagtcgaaaacttacaacaataattctacaataataactatttttccttgacatctaatcaagtttgtacagcatatattaaaacatttgttaataaaatgaccaaaaaagaaaaactctcttagagataatcttatttacttacaaaaaatatatccctcatgcaaagaatatacgaatagatttttacacatctaccaatggtagtttttagtattgactttgtcaagtgtatcattaccacaaccctaaaagataccacttctttgcttttgggacaaatgtttctaaattctaatcctgtaaataaactttccaaattaaaaaaaaaaagaaaaatacagaaatgagaagcaaaggactagaacaagcattaatttaaagatattaattaccaaaatcacgcatacacatacacacacatatatatattaatctcccaaaagccaagagtatatattttatccaattatcgtccttatcatcttcttccttcaattttagttttatattaccaaaagaaaaaaaccttatcccttctctctctctttcttctttcctctattgtctgccatggcgatttctactattctctgagtctgtgatcttaaagatttgatgagacagaaacccagaaactgaaaaacaaaaacccaactcgtgatatttcgttccgaccaaatctgtctgatttgtgatctgaacaaagtacggta

SEQ ID NO: 6088 - DNA, 3000 bp, Unknown
  misc_feature (1)..( 3000): cDNA_ID_2054379_gDNA_ID_1620843_Annot_ID_170111 3000 nt of promoter + ATG
attttactttacatgatacctaccacacatgtaatctgaacgaaaaaacctatacgctaacatagccatacataagcgtttttactatcatgtcattttttgcaaaattaatcataattttaactcaggtcctgaatgttttatagtttttaattggtttttagttttcggtttttgaattttggtttttgatttttgaagtttttgatttttgttgtggattttagtttttgcaaaatcaagaatggaaatttttttatattttttttaactcgaatggaaatttatataatttttaatttttttacttaatcttaatgtttaaacatttttaaattgtgtattttatctttggatgaattgataaatggtaaaaatagcataattaaataataatagtaaattaaaaaaaaagggttacgtaaattgttttaaaaacccacaaaacttagtttttagattctatgaagaaatagctaaaaactcctaaaatctagttttcctattttttaaaaaatctactttttgtagaagaatgaatgagtaattatttagtttttgcaaaatcaaaataaaaaaactacttcaaaaattggaaccattcaaggcctcaatcatttgtccatttttaatctaaacgaaaaaacccactcctttcatttgtttctttaaatttctgcaatgtttaatttttattaaaacttatgttcgtttctttcaagtcatctagtttaagaatagtacaagagcacagtacgagtgtacgacacgatcaatttatgttttttcactttatagttttgctcgtaactcatatttattgatgatgactcgactcccatggtttttgccgccggcatgcttttatgggttgggaaaaaataagtaatttgagaaagatgatgtcataatatggacatgtgtccgttcacagattggcttcaaagagtttcaatatgtttgactttggaacagttgtatgaatttgctctatttgctgcaactacctgacgcggcgatgcgactctgcctacatcataactcataattaatgcaacgctcatttgaatcaaactttcacaaatcaatacggttacacatttttcatgatgtatgattctgacactttcaatattgtttttttttctttttctaattaagagttttgataatcactcctaatttttattttcattttaattatttaagtttcaattattatcatgcttatatatttctatttttttttaatttaataatgtcaaatcaaatttacttttgaagttttaaattttattagttggtcagacacaacacaacataaaatttattttgagaaaaccaagagtacaagatgtaatgtttaaaatcgtggtagaagtttgatttatggagaaaagaaaaagagttttcataagaaagtgaaatttttcattttatttcattatcaaagcctaaaataaatgacgattctcttcactttctcataaatactctttttttcttttttctttttgcagaaatcagtccaccgcgattttcaaaatcttcatcttgtactctcaattcttttattgcctgttgtgttctgtctagttctgatttatgcttaactaataaaatttccaaaaaaattgatttgacacaattaaatcagaataatagagaaatgagaagcatgataaatgaatcttagataattcaaaataaataaaaaaaaaataaataaataatctaaaatactaaaattacaacaaattattagtaaaaaaagaagcatatattggttttacatatatatatattttatacatgtcaaaatctgatcaatagatataatatgcgagttactaattttgaaataagtctttatttatattgtaataaggatagtaaaaatttataaggtcttatcctggagttatgtgtggaatagttacggtgcagttaaccatgaaattttgaagaggtatttttgatgactatctagagggcgttgatttctttgttgataaaaaaagaaataagtttatgtgaaaccagtgagtttgtgttgtgacttttagcaaattgagaaataaagttattgggctgaaataagcattttagtgaacaacaaaacacatacatgcagaatatatcagtaataactagaaaccaatggtccacataaggcccatattcagcccactagtgaccgacctacccaccggccatttactttatcctcgctagtcacagtatcgtttccatttaagtttgctcctcatggtggtggtcctaaaactcatctacccatacttcttcaccacttttttcattttattttgcaatagaaccactctctgtgtcagcttatggatttgaatggttacgacggttggggcgaacaaaaccgtcaatggatcagatcgttttttgttttatcattcatcaaaaatagtccgcagtggtccggaccaaaaaaaatagaagaaaaccgctgcggaccatctgcagaccgtttttacatacaaataaacttggtttacagcgatttatagtccgccccaaaaatgagatggagtaaaccgcagacaaattagaccgctttgtccgctgcctccattcataacctataaatcatataaaaaagttcgtagacaaatttgctacgcatcatttgctaaaataaaacacctgttgccaaatgtcgacgatccagaattatgattacaagtatcatcatcatacgattacaattatataaagaaataaagaacacacagaactataatgccaagtaatttcatcagaaataaaattacgttgtttggctaagattttaccacgtgtcaacttttcattcgatctagatggatacccatggaccccacatggatagactcattgacacgctcatgtgaagccaatagtaacaccaaccacaaaagaaagagagagagagagacactgaaacatagagagaagaaaaagaagaggtttagagagagaaaaatg

SEQ ID NO: 6089 - DNA, 3000 bp, Unknown
  misc_feature (1)..( 3000): cDNA_ID_1830037_gDNA_ID_1620844_Annot_ID_50914 3000 nt of promoter + ATG
attatcatggtatcagaaaaccaactattcttggtgtcagggagcatatcttcacgggatcagtctcgtcactggcgtggttcatgtctgctcaggagacaagttttgtcactcttggtcagcgtgttcttgcaaacccactgaaggtcagaatgcattatggccaccctgatgtatttgacagattctggttcttgagtcgaggcggcatcagtaaggcttccagagttataaatatcagtgaggacatctttgccgggtttaactgcacgttaagggggggaaacgtcacccaccacgagtacattcaggttgggaagggtccacaatttggattatttctaactaactatactgctacaacgtttttttaacgtttttaacgtttattaattatgcaatctacttttgttataattatgtaatttaacgttttttaatcttctaaattcaaaaaatttgagtaacctttgtctttatgcatttttcaggtcgggaagggacgggatgttggattgaatcagatatcaatgtttgaggctaaggtagccagtgggaacggagagcaggttctcagccgagatgtgtaccggctcgggcacaggcttgatttcttcagaatgttatcatttttctacacaactgtagggtttttcttcaacacaatgatggtcattcttactgtttacgctttcctctggggacgggtttatctggctctcagcggggttgagaagtccgctctagcagacagtacggacaccaacgccgcgcttggggtgatcctgaaccagcagttcatcattcagctcggtctgttcactgccctgccaatgattgttgaatggtctctcgaggagggtttccttctagcgatatggaatttcattcgaatgcagattcagctttcagctgtcttctacacattctcaatggggaccagagctcactatttcggtcgaactattctccatggtggggccaagtatagagccactggacgtggatttgttgtcgagcacaagggattcactgagaactaccgactgtatgcacgcagtcactttgtgaaggccatcgagcttgggctgatcctcatagtctacgcttcgcacagtccgattgccaaagactcgttgatttacatagccatgactatcaccagctggtttcttgtgatttcatggataatggccccatttgtgtttaacccatcaggattcgactggcttaagacagtctatgactttgaagacttcatgaactggatctggtaccaaggcagaatctcaacgaaatctgaacaaagctgggaaaaatggtggtacgaggaacaggaccacctgagaaacaccgggaaggcaggattatttgtggagatcatcttggtcctccggtttttcttcttccagtatgggattgtataccagcttaaaattgcaaacggatccaccagcctttttgtctacttgttctcatggatatacatctttgctatatttgtgctcttcctagtcatccaatacgcccgtgacaagtactcggcaaaagctcacatacggtacaggcttgtccaattcctcctgatcgtgcttgctatactggtgattgttgctttgctcgagttcacgcatttcagcttcatcgatatcttcacaagccttcttgcattcatcccaactggctggggaattctgctgatcgcacagactcaaaggaagtggctgaagaattacactattttctggaatgctgttgtctctgttgctcgcatgtatgacatattgtttgggatactcataatggttccagtagcgttcttgtcatggatgcctggattccagtcaatgcaaacgaggatattattcaatgaagcttttagcagaggacttcgcatcatgcagattgtcactgggaagaaatcaaaaggcgatgtctaagtttaaaaaacggtaaagctccttgttctcaacaccttatgttatgatcgtttaaatcctggatttcacaccaatgcgggctttaaatttgtgtaggtcttaagaagtaaatggtagttcaaatcctattggtatgtggcgaaggaatcagttggaggttagttttcccgaaacaaccgaattcgaagttttgtttcgtctaaagaaaaactcagatgctgatgatttatctttgtattttaaacaggtttttggagagtttggttggatgaggaatcgggaagttggtttgattcggttagatgggtttagggagatatttgattgtcagtgtgtgtggagggaactctgattcttgtatggtttttgttctaaaggtacagcaatttgtgtagtgaggctttgtgtatttgttctccttctctcattatagagctttagagcatttttagtttatattcagattgttatctaatgtcatctcgcagagcttttgttcacatttcacatcttttcttctccttcttagtagagatcagtttcagattagatacttgtccatattccactactctcgtctattatcggtttctgcttgtcaatttctgggtccaaaattgaaataaatttatataattggaccacaacaccactttgtcggttttgacttttctacttggatgctcctgaacttcttgctcccttttctattacaaattgggaaacaatcagtgtgaattggggaataaaaaaaaacagaattgagcaattaaagccacgtggcaagaaatcgacgagggaccaacgtgtttgtctgcaagatctaatccttttattaacaaaacggcgactgatctaacgggaaacttttaaaatcgagaaattgttaataataaattcaactacttctgggccatcatcatcaatcttgttcgtcttccttttgatcttatcaaactacagtcaaatcactcagagaaagctactaggtctctcctcgacatttgctttcaattcgatccagtaattttcttctcatcggagagagaaaaaaaaaatg

SEQ ID NO: 6090 - DNA, 3000 bp, Unknown
  misc_feature (1)..( 3000): cDNA_ID_1830033_gDNA_ID_1620844_Annot_ID_50915 3000 nt of promoter + ATG
actgatcctaaatattatttaaaaagattttttgtttttcatcgcatattaacaacattatttattggcaacaaaaatgcaatgaaattagtattttgtagcaacattttcacaactattttgcagcatgtagattgtgattttctcgttatactaagttttaagtggtgtaatataagaattgaaaattatgatgttactaatttgtgttattcttataatgatcattagctcaatttgtgttaaatatccacctgactttttattcgagtgtactgttttttttttttttctgttacaatttgagtgtagtgacgattttatatatatttttgttaaagactatctctctagattaattaaaaacttatctatactcgaagttgatatattggttctaaaacgaaaacgctcgatgtattttaagaaagtgttatgaaaaaatgatagcaacttgaacacaaaacgactgcatacatagtagatgattgattgtctaaattaatttatttccattcgaatataatttgatggtgatttgtgtgtaagaaggataggtgaatcgttgggtggaaagttaaaacgtttgaatgcatatctaattactaactagtattcgtgtcttaatacaaagatttcttatcgtttcgtttgttaggtgaagattagctaaaataattaatatgtttaatttgaattggtgtatcatttttttgtcattaaccgtgatgaaggtgatgacaatgctgcttacgtcaagcttatcggcggctctagcggtggcacaagtgggaaagaagggaaacgcaaacgcaggttggcttccgatttgcgggcaagttccaaagttttgcgatcagatcactggagctttaattgccggtttcgttgcactcgtcctctatgtactcttactcttatattctctccacgccgtcgtcgacccttttctccttcaaaaatcttgaatctacctttttttttttgagtatcgatctaattttatgtctctcatacatatatagatagtagacacataaacataaatttgctcgatgtcgatttgagacgtagttcgtgtgttgtgcttgtataatttccactgaaaagaacgttttctaaaagttcatgaccataacacgtaaagaggcgaatgaaggtaatattaatgtgggacatagtgttttgcgtgatccaaattattttagtatcgcaaaccggcctgtcttaaatggacatttgtagtaacaaaaccgaccatcagcaaattaacgttaacgttgctctaatcgtgtgtatttttctaatgcttggtgaagcacatgcgaccatttgttgtgtcagaacaaaaggaagattccacatttagaatttagattataatcccacatgcctattatttaaacatatgtatactgtaataaattagtcccagaagagcatttcatcatactgtataattaatcaaatttaaaaaacatttgtgttgaagagaagatgactagattcacttgattttttttaatactgattggtcgtttgaccagtcaggatccagactgaaatattctcaaaaggtatgaactattttaatgaaatatttgagctgagaatttgcttatgggacattctatccttctaaagaaatcattagaaaatggagaaaaagttactagaaaaagagagggaaatggggcgagagtatgaagaaagggtcccatgtgaatctaataattgaaaagcaaatatgagatttattttagggttcttgttttagcgtccaaagcggtcgcagttgccgttcagcgacttttctctgtttatgaaataaaaacgctccacttgttcttttcttctttcaacccactttgttataactattaacaaatattgcttggtccaaattttattatactgaattattttagtttttttgtatcatcatcctcaatgttagttttgaaatcctaggtcagtaagtcaataacgaaaatgacaagtttaattttgtaattggaacttacatgtcacggtctttgtttacgatcattgccacgaattgtttagatacgggctttttttttctttccgtgttgatgattatcgtttcttcttacatatcttgatcaatcactaacatttacataacctacaattttgtaatataattgcaatactcgagatcttcaaatggtgatactgttaataaaattacgaacttttaatcatcatcaaaatctatagaaaaagatacataggaccaaaacaagcctaaaacaaagagttataatttacaaataaatgcatgtattttgttacttttgttaaggattttcatatcaatgcatgcataatgcattctctttttattttatttataatgcattcttttataatattcggatccaaaattatgaattaattccagattgccataaatgtctttctttgtttatgctgacttttttcttttcttaacttatatagtaagtaaaccagaaaggtggaagatacaaagcaatttcattgcattaataaacttcaaatgtattatccaataatcaaaatttatctagtaattcacaaaaaaaaaaaaatctgtctatcattcaaaatttcaccaatttggataaatatctagaaaattttaaaatacaattcaataacactattaacatatcaatcaatatataacattgcaaaagtttacttgatcattagtatattcattttaaggttaaaagatctttaagaaaaggaaattcaaattatattgttggaaaaaaatacaaatcaaagacagcaaaaaaagtaacaaaaaaaaaaggtagaagaaactgaaacgcggaaaggaggcaaaatcttctcgtcgtcgttgtcgccgtcttcagagctacaaacgaaaaaactcgcttccgtttcgatttctccattgttattgtttcttcagtgaagcttttttcttcgagaaatttctaagatctaccacatgctactatg

SEQ ID NO: 6091 - DNA, 3000 bp, Unknown
  misc_feature (1)..( 3000): cDNA_ID_2991244_gDNA_ID_1620844_Annot_ID_50918 3000 nt of promoter + ATG
gataaccatgtttcttgtaacaagtgtcttcaacatgaccagggcgactacagtaagtacaaactggcctctcctttttctgataggtgtctccattaagaacagattgtgaagactgattggagactgcaaacactgatgaagtcattcctggagtagtagaaatccttgcagaacgttgaatttcatcctgatcaatcatgttgaatacctcagacaaagaaggcaaagttttcttcatgagaatctgacttctaacagcatcataacaatcattgagtcccataagaaaatcaatgactctattagtctctctttcaatcagaagatcttctacagtccgtggaatagcctgaagactcgtcaattcttcccaaagagtttgtttacgagtatgatacgatgacaaatccagattgccttgacgaagagagtgaatctgttgacgcagcttgtaaagtcgagggaggctagatttgtgaaatcgagtatagagatctttccagattgcagcggctgtgggaaaatacaagatgcttgtatagatctccttcgatacactattcagaagccaagacttaaccatactgttacaacgacgccagattttgcaataaggatcatcatcatcaggttttggaatagatccatccacaaatccaagcttattcttagcttcaatgctagtagtcatggctataatccaggtaccatagctgtttccatctaacagttctggagctaagactaaaccaggatgatcggagctaacaagatgataaggactgtgactattatcaggagaatccgatacctcaaagtgacgcgatgagctgtattgagctggttgatgaatcgcagcatgaatcgaggatcctggagctcttgctgatgaaccagaagactgctcatgaatcttcgatgaagcaatgacaagtagatccggtgaactactccgacgaacactctttccatttcgtttacccatggagaatcgaaacagctaacaaatgagactggatcgcaaaggaaacgaagagaaaacgtgtagaagttcaagagaagaaaaaaaatgagaagatgaacaaactccggtgagattccagtgaaatcaaatcggaaaagtttgttacgagactgagatcgagatattttgctctgataccatattagtaaaacaatctcattctcattaattagcaaaagagtacaattgggggtttatatacaaactgatattggcctaaaccataagcctctaaaccaaaattaagattggtttatagaataccaacctgtacagactctatatgaaatctatactaaccaaactaagcttatatacaacaatctaagctatatacattaatagacgaaatttttaaacaaaacccaggattcgaacatcaaataacccatccccaacgcaacaaatattatcaaccaacttttcatttcatcaatgacactgtgaatcatataaaagagatatgatgtcggtgttgaagataacttctttattgtaagattattttgatcgaataagctgcctcaaatcttctaatttcgacaactctttatctgtgaggacactatgaacacgtttgtaaaaatccatcacttggtctctagctaccaccattttctttcttcgcatagggctggggaataatgagttcttacagtgaaaacataagtggtgaccggacgcattgaacctaacatcgtagaaaacattgaggaaatttttgtaacataataaaaagagacatgtggaaagagaaaacaaaaataaaacaaaatattgagaagaaaccaagaaaggaggaatttctttagtagagagatctaccgagattataaagaaattgaggagtagaagagatgtcagcgagctaaagtgacatcagaggaaagactttgaagtggttcctcaatactagaggtatataagaaaaagaaaaagaggcagatccaaaatgttggttttgaaagttttatagatttttaagattttgtttttgttttcatttttcaagagctaattgtcataccattaccaatcaagttttaaaatgttggttttccaagaaaatacttttgctataatctttttttttgtcatcagatattatttaggattcaacgaaccaattttgaagaaaattgttaacaaaagcgaatttttcatgccaaatagttttttattcaaaattttagacttttagttatcttataagcaagcgttataatttatttatttttttaaagaaaattttgagaaaaacaattgcgaaaaaatgtcaggagatcttcaaatgttcaaaaatacaaaaaaaaaaaaaaaaaaaaaaaaattagtgtggggtaaaataatacgtttaaattttattgacttttcatttcaatagtcaacttttagtgacttcttatttcagtcgctaactttttgttgatgttgccaaaatagtcattaaattgacccgagatcacaaattgcgggtaacggaactttgttaaaatttctgttaaatccacaagtgactggattaaaaaaaaaaagtgcaactggcctaatatgagcccaataaaaaatatctcaaaagttttatgggcttattacagatgggcttagtcagagcactatcttacccaaacaattaaaaaaacaatttacaatatgttttcgttttctacttttttcggttattttgggcaaatgatatctacagctcaacaaatcaaaaaaattcaaaaatatttcaatttattatttctcgatttttttcacaactgtattttaattgtatttttagtagaaatacttatttttccaaaaatatttgtttgtgttgatgtatatataaaaaatctgcatcagtgttttgtctacattttctcttccattagtttcgttatctttttattttctctatctatctggatattattttttcacttggggatttggagaaacctctcctctctctatctatagcc

SEQ ID NO: 6092 - DNA, 3000 bp, Unknown
  misc_feature (1)..( 3000): cDNA_ID_2137741_gDNA_ID_1620844_Annot_ID_170158 3000 nt of promoter + ATG
atggttcttgtgattgggaggtgtgacacccaaattagatttatcaaactcaatttatatatgtatgtaataattttacaataatccggataatatatcagaatttaaatctatataacaatcaccaaaataaattaaattacactgacaatatgaataaattcaaaaaagtacatactattgtactacaatctattgtcggcagtacataataaatcttaacgttagttctatgggattttgtgttttgtaaaagccaaaagaaccttacaagacttttgcaaataataatatggatacatttgaatctcaatcgttaaacaatttgtaagctttaattcaaaaaacaacagaaaagagtttaacaaaacaaaacatatgaaaggaaaaagagaaatggatttggatgtgaagaaaaaagtggaagaaacatattggctttgtactttaacaaaaagaaaaaaacatattggttttgcttccaaatagtgactgcgttttgcggtacgggaaaagtgcggtgcagttcaaatagtaacgaaaatacatagatatatatatatgtagagattttgatattgttacaacactgttgcgatgcgattttgggtatggtttcggttaccattcatagcctttgtagtagtggctatacaaatctaatcttgatcgttgtgttgctttaattaggaaatacaagggagggaagatataaaaatatatctaaaaggttatttgattgatatcgacatatgaaatttcgaagtatgaacacatgaaagagtgtttacacatttacatatgtatttttcaacacaactagaaaagtttacaagataagatgaatccaagtggatgaaattatctgtcacttgcatatacatacactcaaaatctgaaaagtcagaacttgtgaaatgattaaataaaataaagttcgacacaaaaaagggatgaatcatgtaggtgacgagagacaggtattactgttagtgatgcaatataatcaaagcttagattcaggcccatcctcatcatcatagcctgcggcaacaatcaagaaaacatgttttagattcaaatgcaattttttatttttattttattttcatttccgatgaacaaaaaaatacttaaaagcaactaacttagttacatgctaattttatattgtaaacattttttttatataattaatatgggattaaagaaaattttaaaatagacaaatctagtactcttgtctttgtgcgcaagatattaaggttttgaatggatattgtggttagtgctgactgatccgtcagcggttcaattcatattatttttggggcggacaataaaccgctacaaacttagtttaaagatggtctgcagttagtacacagcgcttttcttttattttcttgaattcgcactattacagagtatagttttgtgagtatagtttgtgaacgataaataaaaagcggtccgatatataaacggttttgtgcgcttggacatgtgtcaccattcaaagcctaagatcattaagtccatgacatgtagacatgtttttttctgcaatatacggcaaacatatttgcttgcgacattctaaacctttgttaagttttgcaccattagatacgataaactcaattctcttggaattaaaccatatatacatggtataaaaacctttagaagagacttctactatacattaagtttttttgtttttattattatagaaagtaatcatttgtgatggagagtgtatggacttgattagtttgggaaaattattcaaaatttcatttcatacaaaatgtggtttagaatttagaaaggtaatttgcaaagcactaaagcagctttaatatatctctttcatgaatttttaaaaaataaaaagatacgattttttttggggaaactaaaatctttgtttttctctcttatctctctttgtgtgtttcaattagtgagaaattagtaactctctttctcactctctctctctctctgtttcaactgtctgtgaatcaactgttcttgatctccagaaacctctacacaaacaaaaggtgcgttcttttgcgttgaaatggctcatatctcaaatcgtttgtttctctttgtgggtttcttgttgttaccatgtttaaggcaaactgtctgatctgctcagacatttagttgtttttcctcttcatcactctgcgctagttttgtttccgaattcttttgagacaatattggtttagtttcttcttactcgattcacactttacgacattggattcctataaagtgatttacttttctctaaaaacggcaactttgttgcttaagaatctctctgttcttcaggatttgcattaacgtctctcgtttcctgaaaggaattgatgatttacgccagtagaatttgaatattgtctatgtggcagatgtaaagaacaagttacaaagagatattcacaagaatccgtctggattcatgtgtgaatagaaatatgagcaaactctgttcttgatctttgtgctttcttttcataaggattcatgttttgtgattcttgtaggtcctactttgattaatttaatcacagggattagtaaacaagtctcagaacatagattaataagatccccaatggtgataaacaatctcaagacagtctttttggtaatacatacctttattctattgctaagatcacatgctagaatttggtctttactacttcttgaggtttatttatctctgtgatcttattgaaactgctgttaaactatctacttaatcatttgtctctattgcttttaggtcatagtccatcgttgaccaagatttgaatccaaggctttcccggagagtatatactagttaacaaaacactcataaaaagctctggcttgaccaaattttctacttaagcataacggtggagatctgtttttttgtgtgtggctatataacaaccttattgtctaggctgggattaaaca

SEQ ID NO: 6093 - DNA, 3000 bp, Unknown
  misc_feature (1)..( 3000): cDNA_ID_3079534_gDNA_ID_1620844_Annot_ID_170155 3000 nt of promoter + ATG
tcttaatatacaatacttctttttcatgcattaagccccttacaatgtcgagtaaacaaagcatgtgtccgctaatattgtcttcgagcttggtatttttgtattctgatacggtatttggggacgacatcttttgttgactcgatataagaagggggtttgtggaagaaattgtagtattatatatcaagaatggctctccaaaccatgttgctggccacttagctattatcgaagcgtttgttgcaacatcaatatcatatcttcagctattctgttttagagaggttgagactgaatctatatgatctgaaggacggagatactgctatgcatttggccttgacaggtcgccatgtggagatagctgcatgtctggtaaatgtgaaccaatgtgcttcatttcttgcgagtaaagttggaatatctcccttgtatttggcagtggaagctggcaatgtcccactcgtggtatcaaagttgagaactacaagcaatgaaggaagaaagacgaactttgattttgtacacgtggctttgaaggccaagagtagaagtttgttttgcttcttaccaattagtagctctgtttagtttgtttgactagtttgggacagaagactaaatatttgcatgtgggctaatttatacagatccaagtcttggggatgagtgatgtgaagaagggataaattctctttcaattggagcatccatagggttttataaaggagtatgtaacctgttagtacgattaacgaagagtgtttacgtgtgaaacaatgatggaccctttccactcatttggcagcaacgaatggccatatcagaattgtcaaagagactctaaaacattgtccagattcaaaacacctgcttaacaagcttggttagaacgttctttgcattgcaacaaatagtgggaaatgtaagtgtttgattccgttgttgttatatatgcaattctgtttcattttatttccgcactttgggttgaattgtcctgtttctctatttaaagaaaaaagtgcttcattttgatgctttgtcgatcaaactgaggtttgattcccaagagacacatacagattgtatcataattagctaggtccagtttgatcactgtgattgtagttgacagatagtcaaaatgacctcttgttgttttgctggtgatcattatttcagtacctaagttttttttacccaaccctcacttcaacacatcttttgctgccaccatttcctttcgctttcggccgctggtcacaactcacaacagcaacaatgactaaaagaatctgcactaagtcaatttccagcttcttgttttattaaggaaaatctcgtgccatgtaaattgtcagacttttggtttgtttccagctcatacctggttttgaggtagtctatgttcttggcttgccatttctttttaatcttgagctatgttcttagaggcggctaagcagttcaggacttggttgttggttaacttattgtagcaatacttgttcttatttgggctttgctgggtgatccagaactcggccacaaagcctttcagtttgcctttccatttctgtctttggctctaaactccatgtaggtcgcattctattttggcgtgctcgctacaacaagtgatatactagttattttttttcgttcttcactaaatactagattttaacccgcggtacaccgcggaaacaatttattttttaaagttagtatacataaaagtttgcaaattgtatctatctataaatatttttattttatagtttacaattgttattaagtaacgtcctgccaaacccgtcccgccaacccgtcccataaaaaaaacatttattttattaatgttaatcttatttatgatatgtttatgaattattgtctaaatattttgtaattttgtaataattaaatgctatcaaatatctctgcgatttgacgattataattaaattgttatagtcatggagaaaaacaatatcaaaaatgataattttgtagtaaataaatgatattaaatattttgaaagttttattttagtaactaatcgtgtagttaatgtggagagatttagggaagattgttaaatgtcaaatatttaatttgaagattttttttctaattatcaaaaacaaacattaaaatccagtggcagctattgtaaataagtcccaactataagatttatttcacaaaattgctgcaaaaatgtatatatagatattcagcgcgtattttattttgtgctctattttcttcttgcctattacactgtcccatatattcctggctttggtcgttgtcactgggcaacggatatcctctccgaatgctattatggtttgttgatgaagaagatgctgaaacatatcacacctctggctctggtccgtgtgattgaaacaaaaaagacgaaaggatgtcttcttatctatttgattcagttgttgttttcataactagtaatttattacgttggtttggaaagagtcagtaagcggggatagctcagttgggagagcgtcagactgaagatctcgatccacgctcaccgcattacgttgtcttttcgtttttattttctttctatatatcttttactcattgattgtgttacatgaagcggggatagctcagttgggagagcgtcagactgaagatctgaaggtcgcgtgttcgatccacgctcaccgcaatatttagtcatttaatttttttcccaaagccatgcaaacgacgtcgtttaaaaccaaaacacacagagatagtcatatacggtgtcgctttatgaaaagctcgaattatactaacggtggttttacaatatgaagttcaaaaagcccattaaaaagcccactacatatcccaccgcctttacctctgaaccgactattttttttccaccctttatattcgttgtaacagcagagatttttatagtttggtttctttgaccggagaatctcgattaggttacg

SEQ ID NO: 6094 - DNA, 3000 bp, Unknown
  misc_feature (1)..( 3000): cDNA_ID_1830001_gDNA_ID_1620844_Annot_ID_170151 3000 nt of promoter + ATG
accaatacatgtttctcacggatatgtggaaaaactttgttgaaagactctaacttggtgtggcacttggttagtatacgacatgttgttcattcaatggttgtttgacataattcgctttcctttttgttcatgcctcagtctctgtgttgactttttttctataatcatttgggtttagagccagactttccaattctttatgtaaaaggtggcattcacactcatagctacttctccgggtgctgccacattgcttgaaagtttggaacactaaagggattatagtaataaacgaagatctatatgatcgaaaggaaagagatggatatactgctatgcatttgaccttcacaggtcgccatgtggagctagctgatgtcttgtcaatatgaaccaatgtcttcattttttgcgaataaagatggaaaatctcccttgtatttggcagtagaagcttgtaacgtttcacttatgacagaaatgttgagaactagaggcaatgatggacttggagggagaaagtctaactttaattcagttggaagggtagaaaatttcttctatacatggatttttaggcgaagaatacaggtttgtttttgatgcttcttacccattagtagctatgtttagtttgttcaaatttctatattcagctagtattgagacggaagactaaatctttgcatgtgggctaatttatacagatgaccttaatgcttttcttaaagaagatccaagtcttggaaatgaacgagatgaagaaggaataacttgtctttcatctagagcatccatagcgtttcataaaggagtaatgcaacctgttagatcgatcaacaaaggttgtttacgtgtaaacgatgataaatgttttccaacccatatcgcagcaaagagtggccacgtcaaggttgtcaaaagagattctaaaacgttttccagactcaaaacacctgattaacatgcatggtcagaacgttgttcacattgcagcaaatactgggaaattacatctatatcatttcacaaactgtgataaaaccaaatatttacctctactggtggtatgtcttgtaggcttgtagttgtagccacagtaactttttctgtaggttttacaatggcaggaggctttgacaactcttctccaaacttgggaatggcaacattagccaatgcccccaacctcttctattttcttatcttgtatttgacacccttgcaatgcaaatctctgttatgacaatacttaactcggatttatgtgcagttgagggatcctacactcgctcacagatccttttaagtggcgtcaccattactgttttttgctatattctgcatgccctgcgttctatttttgggtggttattacagtaggaaattgtagaggacttgtcatagtcttttccattacatctataatcttcttgggttatattaatttatatacccagaaaacataaaaattaagaatatacctataatttttgtataattagttctctttcctcaacttatataagttggacaaaaatacccttccgctcatcttaaattatttaacaacataagaaaattattacagacgtcttttatctgattcaaatgatattgtttatcaaatatataaataaaagtatattatgaattaactgataactattatgttaacatgataacaaaatatagatcaataagtttataaatatattatgttaaattatattatatcgcgataagattataaatataccgtattaaatcatattatatcgcgataaatttataatttatgtgatatattatgttaacagtgatattttgttaactatactttttatgtatttgaattttagtttttatgttttctaggtatataaattaactattttgttatcttgttaacatagttattagtttattgtaaaaaataaaagaaattgtaaaaggtaaaatcgtctaaaataagttaacagtaacatttgtacagttaacaactagtcaaactaattataaggtcttccatgtgtacagagtgatattacccgatcttcttctctcttgccatgtctttttttttttttgctaagagagtaaatatcaatatatgaaaatgtagttgtcacaaacttacaatagtagaagacctaaagagtttgatccatgccaaaaaaagagagcttaaaaacagggatcaatttacaatatgcatctatccttagtggagccacaagctcatgaggtttctcaatttcttcatcttccttctcctggctgtgatagaaatttataaactgatcacggtcatgttcttttgtaatcgctgcgtcagcaatcagcgacacaaagttataacttacttgcatgtaaagtatgtggagagtattttaccacgacatgatccacgacatactaagttataacttacttgcatgtaaagtatgtggagagtattaaatagcacgaatattctctaaataaagattgaaacttggaagatgtctgtacaagacaaattttattctaaataattctaccgaatatttttctcttaaattttagttttaagtatatttgattttttttgtatttgttttgattttccaggaaatgagtaaatttcgtcgagtccctctaatattgaatctagtgttttttataattattttagtaatgcatttatgatgttttatttttgtggctacgagaagaaaggccttgaaatcttcgatagaattttgtcttgttcagacatcttccaggtttctattttgttttttgtaaggaatcttccaagtcttcatgcgggcggacaaagctactatcggtctaagtctccgcctatgagtctcctgctatcttcctttttaatcttcttggtgatagttacgttgagatatgcggttgcctttttaagcttaaaacttaagcttctttaattttataattccaacgacagctttacacgaaacaaacaaggcacagagatta

SEQ ID NO: 6095 - DNA, 3000 bp, Unknown; identical to SEQ ID NO: 6091
  misc_feature (1)..( 3000): cDNA_ID_2991244_gDNA_ID_1620844_Annot_ID_170140 3000 nt of promoter + ATG

SEQ ID NO: 6096 - DNA, 3000 bp, Unknown; identical to SEQ ID NO: 6090
  misc_feature (1)..( 3000): cDNA_ID_3076251_gDNA_ID_1620844_Annot_ID_170136 3000 nt of promoter + ATG

SEQ ID NO: 6097 - DNA, 3000 bp, Unknown; identical to SEQ ID NO: 6089
  misc_feature (1)..( 3000): cDNA_ID_3079550_gDNA_ID_1620844_Annot_ID_170135 3000 nt of promoter + ATG

SEQ ID NO: 6098 - DNA, 3000 bp, Unknown
  misc_feature (1)..( 3000): cDNA_ID_1830013_gDNA_ID_1620844_Annot_ID_50922 3000 nt of promoter + ATG
ccactcagcctgcagtgctaggtgcacctcagctctcaaggtgatcttaaaacaccacccagacacaatagaaatgcttaactcacagggtcaaaacgttcttcatgtcgctgctaaaagcgggaatgcacgagctgttggctatctgctcagaaaatctgacgtcaaaaggttaatcaatgaacaagacatagaaggaaacacaccgttacatttagccagcagtaattctcatcccaaggttgtaagtctcttcatacatgatagaagagttgacttaaaaatactgaattacaaagggttcaccgctttagatgcagctgaggatcatatggcgacgattccttcactccaagaggtttggcctgcttttgtacggcattggatatatttgtactcatttatatgaagctgttgacatcactgaacatattctatgttatacccatttacagtggttgatatggatggcattggtggctgctggtaccactagagctccacgagttcatctgagagcagacatccctggtctgacaacagatgaggacttaatcctaaaaattcacaaggatagagtaaacactctccttgtggtggcaacactagtggctacaatggcttttgctgcaggcttgagtgtgccactaggttacaacagcacagagttcaagtcaaatgtcaaacattcttacgaagaatctgcatttcatgcttttgtcatctgcaatagcattgccgtatatactgctgttatatcgacagttgctcttatagggacacaattggctgacctaaaatgcatgctgaccaccttcaagtttattgtgccactcctggggttttctattatcgccatgtctttggcttttgttgcaggcttatacctggtcttgggacatcattattggcttgccatatttgtcttggcctcaggcggtttctatctcatggctctacttctgctcatcatcccttacgcttcgccttatacttttagtccgctattttttcgctactttttgcggtttcccttttcaatgttggtttcctttgcatactggagggatggcactgatggggaatgctcgtcacgagtttttcgttggtcatttcttggttaagaagatcaagacttgaaaattcctgaattcccttgtctcatgatgttttagcttgagtttgaattatgcggtgctggtagtagttaaattggtttcgggaagtttgccttaaaaaccacattgtatcttgcttcctaacatgtctcccatgagttgcaaagtgtattcttatgttgactaataaatactttcaactttttgttacagtggtgttattctcttactttctattgtggtaatcaatgaagctatgtagagaactcaattttcctttaacggcgaagaaagatatttaattagccattatggtctgaagcctctatgactagctctgatgtgtcttcattcatctgttgctgcattgacataattgttgctctttgcagcactatcaagaagcctgaattctttagtacagaatatgtcgaaggaagatgttgattccgtaaatcaactagttcctgcaccaacagaagagttgggtatgacttatatggagacgaatagggaacaaggagcagcatcaaaaccaacaggaagatgtcaccattaaccacgcaaagggaggtcgcttactgcaagatacattgccataaacgctattgacattgatgtaagcgaaaagaactggaagtgcgatgttgaaggcttttgagttgagagaaagatactattgtcatgatagaggaatacatcgccaatatgtcacatacaagaaagaattggaaagctgttttctgagccaaagtggccattcccaagttgggaacagagcctttgtgaccacctggtaatgtgaatcctgcagtaaaagtcatggtggttacaagagttgcaaccaataaacggaagaattgacatgatctttgtactttccaccttctggcttgaatgatctaagactttctgaaactggactggaacttcttggtgcaccagcattgatcaaagccatccaagtcaatcgctgtatacaaggtaatattggggtaacatctttgtcatattacctgttgaaacacgtagctccaatcaatgttctactacatctaaagctgtggaaccattatagtttggttttttcaggtcacctctatgatggtcccaagaaaacatactcacaactttagggtgccagttttggtggctagacagcaaaataatagcggcttgacagctctggatatcgccgaactaaatcccaaccccactacatcttttgagaggtatttctaatttcccactacaacattaccttttctcgatcagtttgtcggtttgacctttgaatcttggttgatagaaaccgactaagagtttggctctgtgtcttctcttgttttgggatttcttatcgccagcttggtgctactgttcagtttttcatatgtgagaaaacataaacaaagaaacatacattttgtgttagaaacaaatcggagttgcttaacgttcatgagtttgtatatagattcggtagatggtggcttgatttttgaggttttgttgttctgttttgtttcttgactttcagagttcagacattggttttaatacaaataaaattagacggcaaaacaaaaagatggtggcttgatttacataagtcaatgcaatttcaataaatttttatttttttcataatataataaacaaattaccttcactctgtttctacactgactttggttttataaaatggacgaaaagagtatactaactcagatcctaagtatgaatctgaatcgactcttttgctgggagggaaggatttcaatggtaataccatgctgatcgaatgtgaaccctaaaccaccatcttgcaacaaatagtctaccaacgatgccactcgctcctatcttttcttccaaagga

SEQ ID NO: 6099 - DNA, 3000 bp, Unknown; identical to SEQ ID NO: 6094
  misc_feature (1)..( 3000): cDNA_ID_1830001_gDNA_ID_1620844_Annot_ID_50925 3000 nt of promoter + ATG

SEQ ID NO: 6100 - DNA, 3000 bp, Unknown
  misc_feature (1)..( 3000): cDNA_ID_1829990_gDNA_ID_1620844_Annot_ID_50928 3000 nt of promoter + ATG
atttatacataaatatataaaaatttatatgaaaatttataatttttcattctgactactttcatttgatttagatacaagataaaaaaccatttttagacccaaaaaaaaaaataggttaaaatataaaataaaaatggtggagtaagatattgtaattttattaaacaaaactgttgtaatgttaaaaattatgtaggtgttgaataatgatgtggtagaaagaaaagatgatgtggagtgttaaaagtgaaaaagtgggtgttgtaaatgagtaaccattgtagataaatagtctaatgattaattttgccaacaatgattatctcaacttcagggataaaccggcctaaattttagatttgagtttgatcacttatgtgtgttatgtctgcatgcctaataagaagtattatgaccaacaaatattcaatgtcagtgtaatccaaatttagcaaagcaatgtaaatgagctgcatattatatgttaaatattgtgtgtactcgtgttcttgtttttacatcatcagttactaattctaaatccgaaattccatctacatacgtagatcaatcaaagttgtcctaagaggaggccttgtgagtctcattgggttttacagaaatcgtcggacctatttgggctcaaacatataaaagatccaagatactggatttaggcccaaactcttttctcaatacgataggatccaaatctttttgtagctgtggaatgtggtggataacaaataacgtcacttggtaaaaatccaacattttagattcagccatcggtcgtacaacgtcactctcatcaacttctttttcagttccccaaatcacgatgatcgcttagtcatcacacccatctagcatcccgccgtcagataaaccggtcatttacccttaccaacataccggttttctcaatttacaaattcggtttgataaatatcaatagattaggtaaatagaaattaagttaattcggcacgtgtcacgaaaactaccacatggcgcaaaggccaaaaccacaaaattcagaaaagttggtatgcttccacgtaattgacatttttcacgtgatttgcttgtgactactgatgttacaattagtagacgtaccgttcaataacgtgatatttattagagattattgatttgcataattagttacaaaatcacacgtcacaaccatttttccccaatattacgtccaaaactgttgattcgtttgatttttattgtccgtccaatgactatttcgatttattataacttcttgtgttagtaaatagtaattcaagtctatatatactcttatatcataaattaggaaaagtaagtactgtatacgatcattgtatctaataaaatatgaaatatgcgagcaataacggccaaatagagcgtaacttcagttttttttgtgatacctagttttaaataccctaaacatcaagttacctcaaattggcaaaacctaattttgctgaaattgaaagaaaaataatatatttttatttctatatttgacttcatttaaatattattttcgaaataaatatttacctacgattgattttatcaaccagttgaacgaataatcttcttttttgtatgttaaggtgcacttataatatatatttctatatatatcacatgaaagaaaaataaaataatttaaataataacaactttcagaactaagtttttttcatattaattataaaaaatttgtatagtatactatagactcaataatagtaagtactaagcagtaaccatcaataacaatattttctaggactaacattttatttctcttcctacgaacgtaccacattgtatcatgatagccaatcaaaatacacagtactgaaactagtaatgataataagttaggcagcctaattatatacaacttttcaaatacgtcatatgaacaaataacattttccgtaatatgtactgaaaatttccacgataaaaaacaataaaaatgctcgattaatgttcttatacactggcattaacaattctcacagcaaaactaccacactaatcacaatcttatgctcatgtagtatttttagacaacattgtacatgtagaaagttctttaactcttaagtattatcgactagttttttttctagaatgaatttttctaatcgaatactttaaaaatagagtcgacgaaagagattaaatataacaaaaccaaaccacgtgaggatcataagctatggacgaggaaaatcgtcaaactttgagataaatttttgattgattaggtgtttgttgtactttttcttattaatatccagaattcagaaccttctcttcctcaaatctgtctttatcctttttaattcaattttaatctcaacttttctatattttatcgtctaaatttaaagaaaagaaaaaacccaaaaacagaggattttgatcaagtaaaagaaagaatattttctagagaaagcaaatcgattctctcacctttatatatataacctctccacctctgtttcgtctctcaatatatatccactggtctttcctttttccggcaaaattgtaacagaaccaaaaattactctgtttttttttattttcttgacaagtctgcatttttctcctctgttttggaattttctcgtttctggttttccgatcataaaaaacaaacaaaactaccgtaaaataggctctctccacagaaaaaaaagaagacttttctttcattcttctgcaagtaactgagcagatttcggttttttcttcttcaaattgatatttttaaagttataaaaatttcttgtccataatttccgttttccttaaattcagctgtcctaacgtcaaatctcagacactcgcttgcgtgtctccctctcttaaactctctctttctctttctcttttggtttctgggttatttcaaagaaaagaatcaagaaacccctctttctctcttacaagaatcccatcatg

SEQ ID NO: 6101 - DNA, 3000 bp, Unknown
  misc_feature (1)..( 3000): cDNA_ID_2992383_gDNA_ID_1620844_Annot_ID_50930 3000 nt of promoter + ATG
tacaacatatcttgacagagcaaagattgatttttacctcacagaattggtagtaatagtgagacagtgaaccatggagtgtgaatccaacaagacctgatctaagaacacgagttcgatcaaactcaaacagcggttttccttcgtaacactgcataaagttacagccaaaatggtcagagagaactcaaattaagaagctttttagagtatttttagtttcttacttgtgcaatccaatctcctaaagaatacacaattccactaatcgccattttcgccaaaacagggtttgttttgagaatttgttcatacgcaaaccaattatgttcaggtgcatacctaagtatctcgtagagagtccaaccctaagaagaacaacaacaatcgtgatatcaatttcagtataatcccataaaggagcaagctttgcagagatagaagaaccaatcaatcacaagagagataaagaaaaccctaagcttacttgccaatagtcatgatcaatggttaaaagcttagtaaccgcaacggtaccggcggcgagaactatagctgcgttgatacctcgactcatcagccgatctgtatcttctactttatcttctgatagttcttcctctgccttgaaattgtcatttttaacatcgattgcttctctgtcttcaatgatcgatttaacgatcaagtttcttctctctgtaatcaatcgtttctgattcttaaaagggttgattcggggtaatgggcctgcggttttaatccgtgaagaaaccttcccggagacgatgatggtggtgggacaacaacagagagctgccatggacttgcacttctcaaaggaagatactttttctcttctcgttggctctctcacagccaaaggagaggtttttagacttagagaacaaaaaagaagcagcagactttggtgaccaaacggtaggaactgagccgaaccgagtttcggttaaattaaaaccaataaccggtgggttttaatttggttaaaaaccggtttgcacaatctcaaaaccgaagccgaaaacaaaggtcctaccgagatttgaactcgggttactggattcagagtccaatgtcctgaccactagaccataggaccagttgcttcgagtcctaccgttttggtttaagatctagacatgttcaaggactacaccatcgtggtctccgccgatacggcagtctgatcaaaacgattcaagagaatcaggcggaaggttttttctgaaattcataaaatcgggtgatctttgcaatatgcatacgtatatccttggtaaatgtattggctttgtttggttaacgatgttgataggattaggttgtgatcaaattagaaaaaaattgggtcttttctgattttttttggccaattctctgattatgagttttggaatggttggaatggtagaggagggtttaggcgtaaggtaagagaaaatgggattgaacccaatttgcatacttcaaattctctggtgagcttgatgtttcattgatttgacaaagcatgtatttgagattgtgggcagttgcaggatcagactacatgttacttacaacaggcatgatcaaggagtattgtaaggtagggtagagaaatgatatgacaatgatgcaggttttgagtattgcctagctttgtatcaagatttggatgagaagtgactttcaggcttgtagtttagtgattggagattctgcaagaagggaaaattacatgaaggttatgtggtttttctgcaatatgattcgttaaggaggccaagccaaatgtagtcaaatacaccacgttaatgattcatccgtatggggacagcttagatttttctgtgtgttgcatccaaagatgtactgtgtacccaaattccgagttcaccaaccagggatgaatgatactgtgtacctaaattccaaagatgtactgtgtaccctaacagttttcgtctggttaggagataatcacttcttgaaagcagtttgaatgtttctcaaagaatggtcatgtactacccacgttttttgtttggttatcttggaggtaagatgagctggtgacaattctgtttttggcttatactaagattaacgtggagctagtcctttgctttacggagctttgataagatgttttaggatttaattacccatcaagaagataatgagggagaaaaaggctaaagagattcattcgacttgcaaaaccatggttggaattttgtgcacatagtgattgaggagagagatagaaagtgaagggactttaaatgttagacccgttgaaactagtggtgggcctgtgaaggttgaggttgagggaagagccagcctgcccaaaagaaaaaatatcttgtgcaacttgtgatgcttggtagctttggtcctacatgcttatccagatatttgcagagaaagaaacatcaaaaggttagccacattataggaagaactaaaattttctaatgctattttgctcaaataggtgtttgagagctctgttcatttaataatgtccatatttgtggctatgttcactgaattattaacagggaaagcagttgaaagatagctaacatgatgtaggggttttggtttttaggaggcaaagaggctttcatgggaccacactggatgatagttgcaaaatacattgtggttaaggtttgtctcttgagcacatgttgagactgggatactcttctgtgagaacgcattaatagctgtattaagtgttgatagaatttgtggacggtaattcccgtgacatttatggaggtatctgtgatgtttttcctattaaaaagacaaataaggagacccaaaaaaggtgagaacaactatacacacaaagaaatttcttttgtctgaagacaaagggagtggtcaatgaccagtactcccctatatgttgggttaggacttctactcattttgcatcgttgagatactatactgccttgaaagacttggtattgg

SEQ ID NO: 6102 - DNA, 3000 bp, Unknown
  misc_feature (1)..( 3000): cDNA_ID_2138868_gDNA_ID_1620845_Annot_ID_170167 3000 nt of promoter + ATG
tattgatacgcggtgtctttgaaaaaaaaactcttctgttagatcttgaactgattgtaatctgtaacctaataaatcgtgaaccacgggtctagaattatgacgcgttcgttgtggtatgggcagggatctcgctggagcctccgggcgaggactttcatatacgcagcaatatgctgtacaaaaataaaaccaacccagacaaaaaaaacaacaacattaactcaccattatctactttaactcaggcagaacaataccataacttagacataaccaactacaactcagtctgcacaccagaataaaccagctataatttatttaactcagcctaaacaacacgataactcagccataaaatagacaacctcagacagaatataacaataacttacttcatcacccaaccatccataatttgaatctggccataactttctttcggtcatgaaaactccgtagaaatcaacctcgtctattccattttccaacgattttttgctaacaaataataaaagaaagttaatatacacaaatagtgtaagcatgtcgtacttaacaacttattaaggtataaagggtcatacatgtcgagacttgacaaataatccttaagtttctgcatgcaatttggactcagaatcaactggatgaaaaaacagtctatgtgtatccacgcatgaatgatttttccactggccagctcatataccgaccagaatgattcttcttccctttcagcaactaacggctctgcaaaagggaacatatatagtgatatataactgatctgtcgcaagaacatgatgaccatttcttcctagtgagtattttgagtgaggggggagtttttagccttgctcttatgatttagggattttcttattcatgacaatattggacccctaggtagtactaataacaagagagggtttttgttttcaaatgttggtttactggttaggcttttattctccaccatggtatggttcctataaagctacataagaattcattttgaagtttgtttggtgtgtgaccgaagaaccaaaaaaaaaaaaaacagttgctcattctttgtctacttatctcactattcggcaatgcatatacgtcctaatctttgttttgcttatcttagttattctatctctctcccttacctaaaaagctggcttcaaaggacttgacggatcgtttataaaacagactagtcataaacatagatttatattcgagatggcttcaaatacgaatcttaaactgtttatagtatatatagtatctaatagctgcgggtgttgtgaaagggaacttagtgttgaccatggtcatggagtttaaccaagaagtttgttgaaccaaggattcacacaatagatttgtttagagagggaaaacaaatctagtaatttctcttcattaggtattctatccaagactcgattacaagaggggttctaatctcttatgaaatacattagggttttgctcaagaacagaaaaagaattagagttttaaaaaggtatagctgcatccatgatggattgcctacgtaccctgtgaagggatcaagccattcgtagttttcaataggtataaagttctatgtttcttgtgaatatcccaagatctccccctttttgtgaagtccctaaggcactttatataggatccttaaaccgcctccctagcgatattcttcggaagattcttatttatccttaggtcggttctagaggataatcgtcctaaggatattctccttattcttcggaggttttggggagatttcctgatttcgacattatcttcaaagattctcctttatcatttctgaaagtcccataaaagatcccattttaccggaaatgatccttggagaatgaatggtttttacaagtctttgcctcgcgtgttcttcacggctcggtggtcgtttgagaggtggcttcggggcaaacggtatgtaccggctcggggcgcgcttgatgactgtccattaagctcagttggctgtctcccgagccgatatagatgtttcccgcagcgttctcacgattggttcgggctgtgttcatatgattaacacccgagccattttacaaactctcttcgggacggtcgatcgaataaggtcccgaggtgctttgttctaggctaggggccaatcatatgtttaaccatgaggtgattgttattcttagactgtttggctcggtcttgcttgtgggggaatccgaccccaacaaagttgtaccttgacggaagagagcacgaatgggatcggtgcgggtgtctggaaagtgcctgaagaaggttcatgtgatgatcaaactctggaatgctactgggagtactgactgtaccaaaacctcctccaacagtgccacagggaacaagcaagccccatatcaatgtgtgatgaagttgaaggagcagggtcgtaaggtggacttccacagttagaaggaggcttgtgtgatggaggagctccatatccttcgtcatagtactgatttccggatctgaataaagaagcatggcatcatttggaagtaagagatcacatgagaataccatccctagaaccgagagagaaaagtttatgttaataaatttttattgtataattgatattgaaaaacattaataaacattaataaacagtgttcacataaggtgtaaattcaccccaaaagcactctaaaaagtaaaaaccaaaagagaaaaaaacatagaaatggttacttaataatataccgagtttcatctatttacttaataatatacggttatttgatttaccggttaactaaaaaatatctggtttaatcgtatttattgttggcaaacacaacattgggcgcgaagtggtttttgatgcccttcaacaacatttgggggtttcatttcaatcgcatttctagggtttctttctctacgattcaatagattcggacgaattgggggattctgaccagagagaagctatg

SEQ ID NO: 6103 - DNA, 3000 bp, Unknown
  misc_feature (1)..( 3000): cDNA_ID_2138868_gDNA_ID_1620845_Annot_ID_170173 3000 nt of promoter + ATG
aaagtactatgcatacttaaagaacgaaacaagattggaattcttacattgggagctcaagaatcatggagaatattatctaaaggtttccttagtcattacaaagtgacaggttatgcaaaatgcattgatggagtcatctactatgaaggttcttttggtgatggtttaagacaagagcttgccataatgagttttgatttaagatctgaaaagttcagtttgattaaacatccgaagaaaagtagcatagctacatgttggtcatcttatgagggaagattagctttggtaagttccattgcttctggagttagcttatggattttggaggatgctgataatcacaaacaatggatatataaacattttccttcacatcgagaattcatcaaagagagatggaagttgaagggtgttactcgtactggtgaatttatttacacatcttacagagcttatgtacttaatgttgaaggaagggttttatatcaatggttccgtattttgtatgttgatcccaagagaaacagtatgagggtagttatgcatggaggaattgcagttgacgatattaggcgacttgatgaagttggatatgatcttatgaaagacttgactgtcataccaaatcacattcagatttgaagctgatcttaccatgtcgttgtaagagttttcttcatttttcttttcttaagttctgcaaattttgtgatgatttttgaatcattgaatcccattgaggggtttttgtcttgatttaagaaattccttataaaatcgtggtagtgaagtaacacctgactctaacgcaagaacatcactgaaatgtgtagcttagtcttctatattggttacatatatagtcatctaatgttcttgaataaaaatacctcatgagcagaactccaggtcatatttttcttaatcaagagaaatacattttgttatgatttgataagttccttaatcccaacatgtttttattgtgtttggaagacagtttgattacctaagtttgtaggaggtctaggcctgaaatatcactttcatgtaataaactagaacaaactattttatcaagatggaactaatatgcactttaatattaatacataatacttttaaaaatggtgaaaaataatgagcttatctaccaaaaaacagaaccagttgtttatgatggccaaaagtgtcataattacagtccctagttgctctcatgtgtctttcagatttccagctcttgaaactttgtcaatgtaccaagtgagatgatgatgatgttatgttttgtgaattgtcaacaggtcctgaattggagcgcttgttgaaggagctgatttggactcagaatcaactggatgaaaaaacagtctatgtgtatccacgcatgaatgatttttccactggccagctcatataccgaccagaatgattcttcttccctttcagcaactaacggctctgcaaaagggaacatatatagtgatatataactgatctgtcgcaagaacatgatgaccatttcttcctagtgagtattttgagtgaggggggagtttttagccttgctcttatgatttagggattttcttattcatgacaatattggacccctaggtagtactaataacaagagagggtttttgttttcaaatgttggtttactggttaggcttttattctccaccatggtatggttcctataaagctacataagaattcattttgaagtttgtttggtgtgtgaccgaagaaccaaaaaaaaaaaaacagttgctcattctttgtctacttatctcactattcggcaatgcatatacgtcctaatctttgttttgcttatcttagttattctatctctctcccttacctaaaaagctggcttcaaaggacttgacggatcgtttataaaacagactagtcataaacatagatttatattcgagatggcttcaaatacgaatcttaaactgtttatagtatatatagtatctaatagctgcgggtgttgtgaaagggaacttagtgttgaccatggtcatggagtttaaccaagaagtttgttgaaccaaggattcacacaatagatttgtttagagagggaaaacaaatctagtaatttctcttcattaggtattctatccaagactcgattataagaggggttctaatctcttatgaaatacattagggttttgctcaagaacagaaaaagaattagagttttaaaaaggtatagctgcatccatgatggattgcctacgtaccctgtgaagggatcaagccattcgtagttttcaataggtataaagttctatgtttcttgtgaatatcccaagatctccccctttttgtgaagtccctaaggcactttatataggatccttaaaccgcctccctagcgatattcttcggaagattcttatttatccttaggtcggttctagaggataatcgtcctaaggatattctccttattcttcggaggttttggggagatttcctgatttcgacattatcttcaaagattctcctttatcatttctgaaagtcccataaaagatcccattttaccggaaatgatccttggagaatgaatggtttttacaagtctttgcctcgcgtgttcttcacggctcggtggtcgtttgagaggtggcttcggggcaaacggtatgtaccggctcggggcgcgcttgatgactgtccattaagctcagttggctgtctcccgagccgatatagatgtttcccgcagcgttctcacgattggttcgggctgtgttcatatgattaacacccgagccattttacaaactctcttcgggacggtcgatcgaataaggtcccgaggtgctttgttctaggctaggggccaatcatatgtttaaccatgaggtgattgttattcttagactgtttggctcggtcttgcttgtgggggaatccgaccccaacaaagttgtaccttgacggaagagagcacgaatg

SEQ ID NO: 6104 - DNA, 3000 bp, Unknown
  misc_feature (1)..( 3000): cDNA_ID_2138885_gDNA_ID_1620845_Annot_ID_170179 3000 nt of promoter + ATG
tcttacgtattagttataaggatagctcctcaaacatctttcaaattacttgttttcttatcataaatttcgaaaaacttagatatatttaatctgcatattcatttagtttatttcataataaacgtctaatttttaggtaaggaatatgtgtagcatgtttggattttatgatcactttagccactaagtggatctcaaaattaaaaagaatatattgaattaaaaagatatagaaagaatgatggttcaagttctgactaattatactctcatattttagttgttatgttgaattaattactaattatgtattagttattttatgaagtctaggtggcaagctctcatgtgctgatgtgtcaagttgtgggagagagttaaccttctttcatatatatgattaaaacatcaaccactagatttttatatgattgtgatgccccttaaaactttgatatatttagcgccttggatttatagatcacatgtaactggattctgaaagctaaagtcgtgagtttttgtgtagaatttttataaaaaacaactttaagaactttaccccacacacaagctttagaaatcattacaacgcttgattagtgttgttgtagtcaacatatgtcattatatgattaagtataagaactagatatgcaacgagattcagaaagttaagtcgtatatgtatttgtgtagaagctccaaaaaaacttctataacatcacccccatccacaaagctaagtaatcatacaacaattcaatcattaagcatcaattcaatccatatcatatatatttatgcataagtctacacttagctaatatctcatctagaagctaacatttaggcaaccaaatcaatcaaaaactctagatctacaaacgaaagaaaataaacaacaatcaatcttgtttagatgagttccatgaactacatgtaaccacatgaaacacataaccctaattcacattggtctggatgaacgagaaatcgctacccttgaccaacccgatctcgatctgcctaagctttctctgactcgtactaatgatggatataagcttcagaccaaaaaaaaattagaaaaatattctaaaaatattctaaaaataataaaagactaagggcgggtaacacataccgattatccgactaacttgactcttagctatccgactaatgataccgaccaccacagtttctctgacgaagcttaacgacctaattagtttgcttatacgtttaagttataataaaatgatgcatgaaaaacagtattgtttgtataaaaatcaaataatataaaaaatcatataaaagacaaaaaaaaaaatagactaagaatatcaaaaacttacaccttattacaaactgtacacaatcaatcataattttataactaaaaaacaacaaaaagtattatatacaacaaattcatcggtttatacaaaaagaacaaattattaatcttgcagtatatattgaattatacgtcttttaaataaaagtattataaaaaagaaaaataacaaaatgatatttagttttacaggatgggttatatggtaggacagattttgggtcgaaattagtttgagactgtataccatgggtaaattcttaaaattaacaatcaaaatacaatttatacaatcttaaacactagacaaaacaactataatttaaaattttgattataaaagatcgacccccagtgtatccacaatcaaacataagtttataccaattaaattaaaatacaacaatatcataagtttataacaaaaaagatatatatatatcatccggtgtacctttggtcaaatcctgttattatgtaagtaagctaaacttttgatattattaatttgtcttaaacgtcatactcaaacacgacgattacacttaaatcccccattaatctttgatattaatatatatatatatatatatatatatatatatatatataattacatattgttatttacgttattatttgttttacgattatatttattttgggtttttatgcaaataaaagggtactacccatatttaagttccaaaattgaaaaatattatcaattaattgaaatttgccactattttgcaaatcacaattatacaatatgtcaagctctattaataattttttttttttcagtcgaatacggataaagaatttagaaaatattttaatatattaacaaaaataatcaatagaattaagattaatagtttaatatattgaaatttccgttataggaaaaggaattctcaccttttttatataattttttttaacttatgcatatatttttttctgatagagttatacagcttttcttatatttatctttaaatatattaataaatttagatttgagacatgatgatatcgtgatcacatgagttagcaacttgtaaaattcaacttataataagatggtcacattaaataaaaacacatgtatgattagaaatttccattttacaacctaaattatatgtctcttttataacaataataataatgcgtctgttaaaaaaaaaagcgtcttttacattttataacccttggtcttctctaacttgctaaattgagtgctaaaacaatattcgagaagcattcttgtactcaccaaaatcttcacatttcttttgtttacaaataaacgtactaacaattcaacctggaaatgttctgaaagaccattagctaaacccaaaaatatatgcacgaacatagatcattactttggtagttacaacttacaacttagtagcataataatttaataaagtactactggttacaactttaaaaaggaaaaggacatcttttactttattaggacagctttttgagttgtaaatttagagcccaacattggattcctcttctttgaccattcctctctacctgaataacccgttaatctctctctgtccctttcttcttcttttttcaagaacaataaaaaaatg

SEQ ID NO: 6105 - DNA, 3000 bp, Unknown
  misc_feature (1)..( 3000): cDNA_ID_3076533_gDNA_ID_1620845_Annot_ID_170185 3000 nt of promoter + ATG
aacaaacagaacatcttgaagatctaaagaagagcctaactgaacactgccttgttttgtagcggttgtaaaacgtccatcaggaagtttaatcaaaacaggaggcatatcacaaacattacggagaaatgcaagagaaccagtcatatgatttgtggctccagaatcaattatccaagattcaagaaaatacttaccagactgatgatcatttaaggtagatttccgttcctcaagaatcgtttgtaaaattttccattgtgaatcattcagcccactaagtcctatgcgatcatctgatgtcaatggagaagtgagcgatgaattcgtaacaacattggcagccattccagaagaagcgacatgattaatagaagatccacgaccatgactctgttttcctttgaacgaacttaaaccaccacgtgaagaagatgcagtgtttttaagacgcaatttttcttcgagccaaggaggatacccgattaatttgaaacattgttcggcgagatgaccaacacggccacaattactacagactctgttttctgaagaatctcgaggtcgtgaagtagtttggaccgcgaagctaacaccgtcaaccctctcgttatgtaagcgactcaaggatttggattcttcgtcttgtgtcaaagcattgtaagcttcctcgagagaaggtagtggcactcgagagagaagagccgacttgacagctccgtacacagattcatcaagtcccataagaaactgatgcaatttgtcttcttcacgttcttttctgacgtcgtccatggttttagcttgttggtaatccgccaagctacaccacagttgagagagacagccgtagtaagtttcaatggccactcctttttgacgacaggttgctaactctgttttgagtcgctgaacatgttgtccattcttgacaccaaagcgtttctgaatgtgtgtccagagctcatgagaatcgtcgagatgagacatagatgtggaaacagtttcatcgatggtgagcttcatccatgaaaccacaagagcattgttggcagtccaatcttcgaaatcgggatctgtctcaactggttgtggaatagatccatcagcaaacccaaatttctttctagcttttaacgccaaacgaagatttgtggcccattcgtcgtagttgggtccacgaagcaacggtttggagatgagagttccgggattatcaccggatgtgagatcatatggcgagattgtacgccttgtttcagtcctagctggtgtggtggagctagcgagagccaattcagtactcatgatgaacggagagtttgatgcaagtattaagtagagaagttagaaggaataagaaagcgatctcttatagcggaaggagagatcacagaatcgatcacaaaaaccttttagtagttaggtattgtgctctgataccatgtcaagaatcaatcgaggttgtgaaaagaagattcttattgattacggcaagaggcaatgcctttatatacacgataagtttagacctagttaatctatacaatataaatgggctaaggccacacagcccaacatatattgctcataaacaaacttttcaattgaggcaagtctcaacatgttttgatcaaatcgacgcttttctaaaccactttgttttctctttttgcatcgtgaaccttccttgatttggaccaaacttggaatataagagataacatattgtttacagtttccgtctacaagattcagtttttctaagtatccatcctctccgacgatgctaataaatgttttgagacaattagagtcggggtcaaggtttctaccgaaacccatgaagactttcttctcttcgtctacgaagaaactatgtgatatctttatcttaggtctcgtatcaattctaaataacttgctccacgacaccgtttcggcatcaatcttagtcgtaatccatatctccaactcagataacgctgaaataaagctgcaagcttctcttctttaacacaagataaagtcacatctacagcgctgcacggtagagggagaagcggcccgaatctctctcttgtaaaatcaaaacagataatgtgatctttgtgaccctgtgacctcctttctttagcacaccagtaagtgtttcccttaatagaaacgccactggaagaacaatgtacaccccagtgtggagtgacatcaagagttgtctataaacccgagtcaaaatcatagatttcataccaaaaagattgtgtttcgggtgtattgtagaaataatctagaaacctcaggaacttaaaggtacgacaagattccttatcttcgtatccaagagcataactaaacctatcaaatccattcggaggttgagaatatcggaggttgatccaccttgtatgcccccaatacggattccaaaccaaaaccctagtaacgtcgtctttcaagatgcataacaacaaaccctcaaagtggaaaatattagatatactcacttgattgtgaatgaaaagttgacctttaacctctatagatggatcaaagtcgacgacaccgctcattaaacaaagtttgtgaggcatcatcatgatcatcatagtctctccatctcttgttggtgttgtcactttaccaatgtgcatcttcgtaaaaccctcacttttggataaattgttccaagttttgcaagttaatctcaccgctttcatagatttcaaaggaaccctagaaatgatctcctcgatcaaatcccttggaagattgtagatcatcgtcgtcattgtttcaactttcacaacgaatgatttcttgcagcttagggaaaggaaaaaggtatacacgacgacaaattataaccctaaataaatttgggccactagtgggctttcagaatctaattgggcttaagcagacccaatttgtatctggcgcgaggttttagtttctgcggaggaggagatgatcgacgattcgtctcttacggcggag

SEQ ID NO: 6106 - DNA, 3000 bp, Unknown
  misc_feature (1)..( 3000): cDNA_ID_2138932_gDNA_ID_1620845_Annot_ID_170191 3000 nt of promoter + ATG
cttttgcgttgaaggctttaagtgatcccacttgctcagcaaggcttggcacgattggtcgtggatgtttgcctccaagaagagacgccccattatagtttcatctttgcttatgagtgatcccaaaactgaatcaagcaaatcttcttctaacggtgtagtacagttttcaacctttagagagaaatgaaaatacagacttctgtcagaacacaaagatactatgtttccagctgaaatgatgaaaagtagcaactaatagatacatcttctgactaatgttgacactaacagatctttctaatcttcatttgtttgataaaatatgctacatctcaaggatacagaaagataaatcatggatggaacaagcaatctctcaagcatcatagacaatcaaacacttatcaacagcctttatccacctcaagctatcaaaaacgcctaacaatactgtatatatgaataatatgaaaaacccatttgatatatcagaagaatccaaagttttattaccctcagaaagcaaaacgatatggactgacaattataaaaaccagaaacataatgtggactaccattagagtctctctattaagtgcatctactggataatatcaacaattgtaagactttctgcaaaggaacacaacatggatacttatgaaatgataatacagagttctgtcagaccacaaagaaactatattgaaatgattataagtagcagctaatagatacattttcttactaatgttgactctaacagatctttctaatttctatttgtttgataaatatgcacctcgtattagtaccattaaacattggatggaacaagcaatctctgaagcacatagacaaccaaaaacttatcaactacctttatccacctcaggctattgaaaacaactaacaatagaggatatatgacaaacccatttgatatccacctcaagttatcaccttcagcgagaaaagcgatatggaaggacattttatatttcatagtactaagagaaacttaatgtggactagcatagtctctctctcaagtgcatcatatctaccattctatgacttttctgcaaagagactcaatgagaagtcaaacttcatgagaacttagataaatcaagttgtcaacttaacaaagaaaaccaaatgatggtaccccatgtgctaattaaagagtagagagaagacaatagcacttgagtaaccatttcatcaagaacaagctaaccaaactataaaccagcaagtgcaaaaagcaaactaatttactcgagggcaatgcaattctaaacccaacttaacccaattaaagaaaatttagggttaatatgaagaaactcttacttcaccatctccgatttgacgcttaaatctctgcatttcctcagacattcttccaatttcatcctccaattcacgaaccctagcttctgcttctctagctctctcatcagattcattcccaaactccatcaacgcatcacgatcttgatgataaagcaaacactctttctccaatttcttacactgactcaacaaattcccacactcactagccaatttctgattctcttcaacaaacttcttcaacgcttgcgcattcatactcgcttcagacttataaaaaaaaaaaaaaaaaaaaagattcagattcaaatcaatcaaatcccagaaaacgaaagatacccagaaagaaattactaaccctaacacgatcgattacatgatctttctcctttaatcgcgaaatcagaccctgatactgttcgcgaagacggcgttgagattcttcagccgtataaagcttcttctgaagagattccatggagatcggaagacctaaagaatgatcaattgtatctttgatatattcttcgacttcttgcgagagatttgttctcgattttgtttctgcttcatctgaatcaattctctcgctccgcatggtttactcttgaaacaagatttggatttcaagaagagaatttagggtttcaataggaagaagaagaaaggggaattagtaaaagagacggaagagaagaatttcaaaaatgaaatcagaagtttgtagccgttacaaaagttattgcatcgatcgattcgtgcctacgtggcatgttttaagtggcggaaatatttggctcctaatgcaattttttggttatggtttttgggatccggtttggtttattttgtcggttttacttgtggaaaacttttttttttctctgttcggtttgacacaattcggtttttgttcgagttggttttttatttcggttttgtttttgtttaaaaacgtattttaaatatcaacaaaaagtgattacctaaaattacaatttaatgtcattatatcaaacaaataattatcaactaagtaattatttttcctctattttcagctcaattttttttattggtttatttttattttttcatcttgactagtattaagcaaaagcgtatcattcaattatataattgtatcaatttccaatttatttctatataaatttttcattttttgagtgtactaggataaaaaaaaattatatcattgggtggaatgaaaccttaatgtttcatgactatgcataaaaaatgaacgaaagatgagaagaaacatgaatcaaacctttatttttatttagatgattagatgagatatatacattaggaattttgattcgttcagttaattttgttcagtttcataaaatttaaatttgatttaaggttcagttccaataattctatttataagattttaaactattagtattattcgaatttggataagttcggttagattcattcatgttttcaccactcatttcctaagaaaacctttttaaaaacaaggtcattttaagaaacacataattttacacgaagtcgttttaaatgaggtagtttaaacgaggtcgttttatcttagtaaaacaaacaaactcctatgcttttctctatataatg
